United States Patent Application Publication US 2020/0377945 A1 - sequence listing, part 51

SEQ ID NO: 11287 - DNA, 107501 bp, Unknown
  gut microbiota DNA sequence
atcatttgcttttcttacacaggataaagtcaacctgatgatgagtcacattaactcctatacaagaaagaagctgaataatcgatccgcacatcaactattcagcttcttttatggcgcggatacagcctctaagcttaacctggaagctgttcctgctaatgaaatcatactaaaacctgaactgctgaagtaaaactgccaatgtcatctcctgatcatgtcacccatatcccagaggtggaagtttcccttgcaaacatgcaaacgaagcgacgacttcttatttgcatacagtaaaatatgacttcaagagtatagtaacatgctaaaaagccctatttcaagcggtttgtaatactaaagtccactcttgcaatactaatttccagttggcactgttttcgcaagacttatttctgttttcaaggtgctgattccgaagttaatcttgcaaaaataattcaaacagaagttacctttgcaaaacggaagttaaatttgctatttacccaattcggaggattgttcctttttgattggaaaaaatgtattaaatcataaaatattggtcagaaaaaatgttgaatatacaattgatttgatcgaaaaaaatgtggtaaactatattatgtaagaaaggaggccgccaatgaaacgatttgccatggaacaattacaaagctggaaagaaaagggaaaaagaaaacccatgattattatgggcgcaagacaggtgggaaaaacatggttaatgaaggaattcggaagacaatttttccccaaagtggcatatgtatccttttataataataagagaatgagcgatgtctttgagatggattttgacattcagagaattcttatgaatcttaatatcgaaacaggggtcacaattactcccggagatacgttgatcattctggatgaaattcaggatgcaccgagagtcctggaatctctgaagtatttctgcgaagatgcaccggagtatcatgttcttgcagcggggtccctgttaggagtagcgattcatcagggagtatcttatccggtaggcaaggtggaactgttggatctctatcctttgaattttagggaatttctatgcgccatgggggaagaagctttgtctggggcattggacagcaaggacttttccattatagacaacttttcggataaatacctattttggctaaaaaattattattataccggtggaatgcctgcagtagttgacctttttagagagcagaaggactatgccggtgttcgggagttacaaaaagacatagtacgtcagtaccggggagactttggaaaacatatagatgccaaagatcttcccagaattcgtatggtatgggaatccattccgatacagctggcaaaggaaaataagaagtttttcttcggacagataaaaaaaggagccagaagtgcagattttgaaattgcgatacagtggctcttggattgcggactgatttacaaggtaaatcgtgtgaatgagccacatgtaccgctggctgcatacaaagagatgaatgtatataaactgtttgtactggatgtaggactgctgggggcaatgagtgatttagatgccatgagtattctggagggcaatgatatttttgttgaatttaaaggcgcattgacggaacaatacgtattacaacagattatttcggatacaaaatatacaccttattattacggaacggaaaaagcaacctttgaacaggattttatgatacaaatgggaaaagatgttgttcccatcgaagtaaaagcagagacaaacctgaaatcgcagagcctgaaatgttattgtgaaaaatatcatccgcagacagctatccgcttttcggcaaagaaatatattgatcagggttggatgaaaaatgtaccgttatatgcggtgtgcactttgtaatgaatagataaaagtacagaggagaaaatatatatgcagatccatgatacagcatttatagcgcctggagcagtggtgcttggagatgtgacgatcggagaaaatagcggaatctggtacaatgcggtggtccggggcgacagagattctatcgtcatcggcaaagagagcaatattcaggacaatgcggtagtgcatctgggcagtggatatccggtggagattggagatcatgtgaccattggacacggtgcgatcgtccacggctgtaagatcggcgacaataccatgatcggtatgggagccattctgatgaatggctgtaagatcgggaaaaactgcatcatcggtgccggagcactggtgacgcagaatgtggagatcccggataattccctggtcgtcggtaatcccgggaaagtaaaacgtgctgttaccgaagaagagatccggtggaatctggaaaatgcacgtatttatgtagaggaagcacaagaagagaaaagagcactgtcctagcggaagtgctcttttgcaaactccatgtcctgtaccagttccagcgttcccagatattgctcctgcttatcccggacggcataataagtcactaagaaagtccggccgttcttgtccatccagaccggtacctggtccagattccctgcacggaattctccgataatgcggcgaacccgttcttcgatcttaggcgggtgacaggtgaagacctcccggcccaatgccataccgggacgcttgaataccttgggaccttcgttgaagtagcgattgatattatcgatatctacgaaagagatctccaaaggaatcgtattcaacatggcggtcagctgcgacagggtcagactgccgctggggaggtggattctggtctcactacctgtaaaagcgtgttccgcagacatggtgtcagccgtagaggcagtgtcggtcagatgtgcttccgcagcctcccaactatcaccccggataccgaagcattccgcataatctttggcatcccggtaaatgtgataccattcctcctccgagaaattcagtgcgcagttggggaagaggatattggattccttgtagatcatttcttccatgcgggataatacggctttcaaacgttgtttccatgcatcggtttctttttggtctttttgttttgcaagggcattcagttcatcccggatctcatcatccactgtccacatgaccgcagagggaccgctgatcccatattgcaccttcaaatgtggataaagtaagtctccctttctggcatagtggatagcgatctggcgcagctcgtcaagcagttcattggtaattccattattttccaatgcctgcctcgcacgggcaatcagcttttccagtgctgcattttccagcgtaaaagtctgcaggggatgcccggagatctggatcagggcggcagcagcggagagccgttggttctgtatgtccttagcgtgcaatttctgggcatctgtcgcggaaccatggaacagggcggaatgcacatcacagagccgctgcaattcttcgatggaagtaccctcccgtagcagctcctgttcggcctgcataattgcggaaggatccacatccttacattcccggacgaaatccgcctggacattttccagagcttcgccgtgattcaaacgttgtaagtaagacttaatctgatctttcatataaaaattcctccggaaccagtatgccccggaggaaagtttgttattcttttatttttatgattaatcatcgtagagtgttttgataaattcgcaatccactaccaatacatagaaaaccgagccataatgttcactctccacgatacgcccataatccagaaccgtcttataagttccatctttgacagcaagtcggtatttgacataatcattgtatccgttcatgccggattctatctgctgccagatgctttcttctacctgtgtcagatcttcaggatgcaccagattacggaattgatgtttcgtaaaatgcataaaatcatccagatccgtacatcctgtcagctgaagcatttcctgattagcatacaggatgcgttcatcctccttttcggcccggtagatgaaaaaggcacccggcaggttgtcagaaatatccgataatgaaaaaccaagctgtgtccgtttcgaattgtggaaatccggccggtaggccagagcaccatgttttccctgtaattttacctcatagagtgcaatgtcggcataacggagaatgtcagagactttttctgcgttggcggggtattccgcatagcccagggaaatgctgtaattgtgttcgacgcctttggctgaaaaagagcgggaagtcttgctgaaagcgtctatcattggggcagcttcttctgcactgcaatccttcaggataatacagaactcatcaccgccatttctggcaataatggaattatccggaaaagcctgcactaaggattgtgaaagctgcaatagaacctgatcaccgatagtatgaccatagacatcattgataaatttaaaattatccacgtcaagtaatataccgacacagtttttctgcttgtttccctccagatactcctccagctgcaaattaaatccgttacgatttaagagaccggtcatagaatccgtcagagagagtctgcgaaattttttgcgttgctcgtcaacgagtagtatagatatcgttagaaccatcagtagtaggatcactgcaatgccacataatactatcagttgtaaaagtgtgccattcttccagccaccggtgggcatgatttccagcctccagttacatccacccagagtaaaatcataagagacgggatccatcagagtctcatccgactggtctaccacagtatattcatcggtcagaggtgagatggtcttcgatagccggtattgataaccgaaattggttaaggcatcagcggaatgctgaaaaatatcaggaaccttgatgataaccatagtcatgccccaaaaatagggagtacccttctcatcctgtaaaaaaactggattacggattgaaagaacgtgtcctccctgctccagctcaaaaggaccatgtatgataagcgcatcattggcaatgctgtattttacagtctctccgcggtatttgtcatggatcaggtctattttacctgcttcgttgccttcggcgggatagatatctgttacgatgcccccgggagccacttggatgctccggacgtaatctgccatcattccgcccgcaatggtatcaaatttgtcgattctgccgtccgtactgatcagaagctgctccagtgtatccgtgatattgataccggcattcagatctgcgattatgttatcaccgtaggttacagcatttagttccgcaagagtgcggatgtgcctgaagtcgtcctgctgtaccgcatgagcgatcatatataagacaatactgccgataagaagtatccatagcggcagcagccatttgatatgaaaaaatttgatttttttttgtgtcatagtgctatgcttccttcgtatgtgttggcaaaatgatttaaatttaattatagcattttgacgtttttttgtatagattatattttcctataatcaatgtttttagtatcataaaaaagaattaaaatgtgttataatacctagggaaatccaattagttacgaaagaatatcgcaggaatcatacataaaagattgttaggaatatcagatggacaaggagaagatgatggaatatatatcagatgcacaggcaaaacagatgatcttagaggtaggacgcaggatgtatcagggcggcttcgtggcagcgaacgacggaaatatctcctgtaaagtcggagataatgagatctgggcaacacctacgggagtttctaagggatttatgacagaggacatgctggtaaagctggatctggacgggaacgtgttggagggaacgcacaagccttccagcgagatcaagatgcacctcagagtattcaaagagaacccgaaagtacaaggcgtggtacatgcacatcctctgacggcgacggcgtttgcctgtgcgggcatcagtctggaagaaccggtgctgatggaaggtgtgttgtcactgggttgtgtgccgttagtgcattttgccctgccgggcacagaggaagtgccggaagcggtagctccctattgccgggaatacaatgcagtactgttagcaaaccatggcgcgctgacctggggtgacaatctcatgcaggcttattaccgcatggagaccacggaatattatgcgaagatcctgatgatgaacaacttcatcttagggaagaagacgttgttgtcccagggacagatcgacgatattatcaagatccgtgcaggatggggtatcaccacaggcggcagacccatcggaccggagggcgcgcagaatctggaggatatctgtatctcccggaagcggtgatttgtttttccggacacagatttttcacagaggtatggatgttgatggacagtggggaatattatctggatggcatgacccatgaagaagcagagagtatccattgccagagcactggtgggacagccggcgatccttctggcagatgagcctaccggtgctctggatcagaccagcggcagagaagtgctgaagctgttccgggaactgaacgatatgggtaacaccatcgtcatgatcacgcatgacctgggggtagcacagtcagcgaaacgtatcgtgcgtattgtggacggacagctacaggaataattacaatttacgagatatcaaatgttgtctccgttccaaccccaatattttacggtctgatactttacatagacatgatccggagcgatgttcatgatctcatgaaagatattgcagatctctgcggttagtgcagaaaaggcagtggcatcttctccgccgaaaacactgacttctaccatagccagcggttcgctgttgctgccacgaaaatataagttataattcggctcaaatccaagcataagccagctctcggatttgccgggaacaatagagatggcctgtcccaatcgggttttcagagcctgctcctgttcaatggagatgggagtactgattttggaattaataaaaggcataagatatcctccttaaaaaattttatctgtctctatagtaaatccagaaatggcgggaagcaagtcacttttttccttttgatggctttggtatttgattttctgattttgagcataaaagagtcccattttgcaaaaactcctggtaacacaatgcgaaaggcaggaaagagaaatgcagatgcgggacgatcttggaattacaacaaaactggaaaacggcaaggcttatctggaatttgtactgccggaaaagattgggcgtttgctgtccgctttacagatcgagatctgggaagaagcggagggcgggcgccttgtttttcatggagaatatgttccggaagagtcagattgcatgacggcgttgctgctgcggccgcatctgtgggacggcttgcgggatccctatgtctatctggtgaaggcgcagggaaggttcggaaccgtggagtatggagaaaagacaggttgcacggagaatgaggaagaatcagagcctgctgaggatataaccggggcagtggaagtgtattggcggcaggaactgaccatttatgacgtgcgtgtcgtagataaaaagggaattttcctcaatgaaaaagagttccttccgcatgaagtatgctaccgaatgcttctgcagaccggtgatgccgggatatgggaggagcagatgaaagaggatctggaacgattgacccggatgggagtcaatgcgatccggctggaaggaaccggatccggggcagagagacaaaactgctacgaagtgcgggcgttttaccgtctgtgcagaagaggtggattcctcacaggtgacctgtggataagaccggaaaatctccctgtgtaccgtggattacccggagaaacgacatgccaagcactcctggcggcggacggcaggacattgacagagcgatactactattatcaggcaaaatggagcagcgaaccggtgctctatccggtactttccactctgcatcgtcaggagaacggattactttctctgacaatttacagcaatcagaaaaaagtggtgctctatgtggatggattactttttttattccagacggccacatccggtgatccggagttcatttttgaagatattcctgtggcgaagctgccgctgcatctggcggtggaggcaggaaatttaagcatttctctgaccgtgtcgaagatttaagggttgtggtttcacacaattttcacaaaggtttcaccttttcatgacatttgaaacatatactgataccaaaatcgaaaagtccgagaccacatgagcttgctcagatgtggttgagagactttgagatttgccccgatatgagtacaaaagtgggatgataatcccacgatgtacgaatagcgggtaggattgtgagagtgcgtagcacggaacaatccgtaggtatcagttttgggtacccatagatatcaggtgggggatcacaccatatcagggaggcaaatatgatagaagtaagcaatcttacaaaaaaatatggtgaccatattgccgtagatcatctctctttccgtgtggaaaagggtcagatctacggttttcttggtcctaacggtgccggtaaatccacgaccatgaacatcatcacgggttacctggcagccacggagggcactgtgaccatcgatggcaaagatattcaaaaagattcggaggaggcaaagcgtgccatcggttatctgccggagcttccgccgctgtatgttgacatgactgtcagagaatacctggacttcgtggcagaactgaaaaaagtgccgaaaaaagagcggaagcagcagatcgatgaggtcatggaaatgacacagatcaccgatatgcagcagcgtctgatcaggaatctttcaaaaggttataggcagagagtcggactggcacaggcgatccttggatacccggaggttattattctggatgagcccacggtaggtctggatccgaaacagatcatcgagatccgtgatctgatccgcaagttgggggagaatcatactgtgatcctcagttcccatattctgtcggaggtcagtgcggtctgcgaccatattatgatcatagctcatggtaagctggtagccagcgattctccggagaatctgcagaagcttatgagcggctccatggaactggacctggaagtaaagggaagcgccgctgcggtgaagagtgcattgcagaagatctcacagatcgaccggatcgaagaaaatactgaggctcccaaaaatattgcaaagctgaaagtgatctccaaagaaaatgccgacatcagagagcaggtattctatgcactggcagaagcaaagctgcccattttagagatgacccatgcggagaagtctctggaagacatcttcctggaactgaccgaggatgtagcacctacacagtcggagaagcacaaactattctcaaaaagaaaaaagtcggaagccgaagaaactgtaactacaaaggaggcggaataatatgctagccatttataagagagaattgaaatcctatttccgttcctttatcggatttttatttattgcagtcaccctgtttttcctgggactgtattttagcgtttataacctgatgaacggatatccttattttgcgtatgtggtatccagtgttacctttttattcatgctgaccgtgccgatcctgaccatgcgtattctggcggaggaaaagcggagcaagacggatcagctgatcctgacggcaccggtgtccgtaggcggcatcgttatggggaaattcctggcgctgttaactatatttgccatccccgtagcgatcatctgcttttacccgctgatcatggcgcagtacggcagtgtttccatgggagaggcctatctgtcgatcctggcatatttcctcttcgggatgaccgccattgccatcggtctgttcctgtcttccgtgacagagagccaggtcatcgcagcagtacttacttttttagtattgttcctgggatatatgatggattccatttgctccattatttccagcaccggcaatctgttgacaaagctgctgcgctgctttgacctttatacaccgttttccaacctgttaaacggcacactggatgtatcttctatcgtatattatgtatctgttacggctctggttctgttcctgacggtacagtccattcagaaacgccgttacagcatgtccgtgaagaacttaagctttagtgcctacagtaccggtatgatcgctgtagcggtagcattggtagtagtcgttaatattatcatgggcgagatgccttctagctggacagctatcgacatgaccagccagaagctgtattccctgacagatcagaccgtcgactatgtgaaaaatatgcaggatgatgtgacaatctatgtgttggtaaatcaggacaatcaggataccacattggggcagactttacagagatatgatgatctgtcggatcatatcaccgtggaatatgtggatcccaccgttaacccgatgttctatacccagtacaccaccggcaacatcagcacgaacagcctgatcgtggtcagcgacaagcgcagcaaggtcattgattacaacgatgtctatgagtcttcctatgattttgactattcgacgtacagttataacaccacgaccaccggttatgatggcgaaggacagatcaccagtgcgttggattatgtgttaaatgacaatatgcccaaggtatatatgacaacaggacataacgaactgagtttaagtaacacttttacatccgcactgaacaaggaaaatgtggattatgagaccgtgaatctgatggatctggatgctatccctgacgatgcggcctgtctgttcatcaacggcgccaccagtgatttctcttccgatgacaaggataaggtgatcgattatctggataatggcggtaaggtcatcctggtgaccggttataccgatgaggagacacccaatatagatgctatcttaagctacatgaatctgagtattgccaaaggactggtagtggagaatgattccaacggctattacagaagtccttattatatcctgccgacacagagctctgacagctatacctcaggcacctatggaaaatacttgttcctgccgtattctcagggcatcatcgttccggaggaagtaagtaccgacgagacagccaccggcgatattacctacgatgtattcctgagcacctccgacagctcttttgcaaaacaggatgtcaacaatacacaggatttttcacagggtgaaaatgatgtgaatggtcccttcgcattaggtgttgaagcagtaaagactttggataatggggatgcgacactggtcgtgtacggttgcgagcagctgttcacggatgatgcaaattctgtcgtcagcggcgcgaacctgaccctgttcaccaatacattcagtggaatggcagatcatgagacctcggtatccattccggtaaaaagctatgaggtctctaatttggtagtggattccgcacagattctgttgttggggctgctggttactgtgattcttcccgtcggctgtatgatcgccggattcgtgatctggttccgcagacggaagaaataattgtgaaaggcgtgagttatagatatgaaaaagaaacaaagacagatgatcggaatgctgctggcactggtggtgctggcggcagcattcctgggcatccgccagtataataaaaatgcatcgtccgcgacttccaccaccgaggatacacaggagacggtgctggatgtgaactccgatgatattaccagcttccgctatgtatatgagggagagacctatgcctttgaaaaagaggatgaaacatggtactatgcggacgatcattccctgaatctgaaccaggatcggatcaaggcgatgatcctgaaggtggcaccgttaaaggcagatcaggtgattgaaaatgtgacggatatgtcgcagtacggactggcagatccggagcgtaccattcagtatgagactgcagatcgcagcgtgatcattaatgtcggtaatctgaattccatgaccagccagtattacattgcatttccctctgaaatgaaagtgtatgtcgtggccaccaacgtggtgaccggattcaactatacactggaggatctggtggaggagactacggaggagacagaaagcaccgaggcggcagaaactactgaagcagaaatcacggaaacagcagcgacggaagcaaattaggaatgctccccacgaatgacaatgatgtcatttaaccttaatatcgtatctttttgaggcagaatggacaggtcctcccgcagaatgaggaagatcgtgacctgttctgcctcttccatttcttccacggatttgccggcgaagcgtttatctacaaagatctcggcgatctcatgaatatctgcctctttaatattagagagactgcttttgcgctggtactgttccacgaaaccggcactgatgataccggtggggatagccacggcaccgacaccgagataggcgatacagattgccatgatccggccaagcgtggtgatgggatagatgtcaccgtagcctacggtgagcagcgttgacatgctccaccagatgccgctgaaggcattgcggaatacttccggctgggagtcatgctccacactgtacatgcacagactgctggcgagcatcaggatcagtacgataaatacggaggaaatgatctgattgcgtttttcatacaataccgtagtgatgacattgaaggaatcataccgggcattcaggcggaacagatggaagatccttgccacccgcagcatccggaagatgaccatgcctgacaggaagaaaaagggtaaaattgtcagcagatcaatgatcccatcgaaggagatcagaaaccgcagtcgggagcgaaactcgctcttatcaggatatagatagtccgcagtccagatccgcagaatatattccacacagaagatcagaatagtgataacctcgatcacgtgaaatgccggaaataaaaaagcaagctcatcaaaggtttgcagaaaagtcaccagaatatttgcacagataacgatagcaataaaaatatcaaagagccggctcagacggttacttttgtcaccgatctggatgatgttaaatacttttttcttcatgttgaatcctcaatgttttctggggtagcgccagtgaatgcttgtgattccatcatacggaggtggaagaggaaagtcaagaaatgcggtgacagaatccgtcaactttcttaaaaacagtcatatattatagtaaatccaaatacaatgaaaggatacaaaaatatatggctagatttacgaaccaggcacagcttcgctatggaaaatgagattacaaactccaatatagcagtgggtgagatcacggaggtattgtctgcaaccaagacagcagtgcgtgatacctacgggcagaatgaaaatgtgacgtatgtgatcagtattgtgaattcaggcactactgcatttaacggaattacagtaacagataatctgggagagtatttgtttaataccagagaactgacacctctgacgtatattccgggaaccgtaaaatactatgcaaacggaattttacaggcaacaccggctgtaacggcaggacctcctctgacaatcacaggaattaccgtgcctgcgggaggtaatgtgacacttacctatgaggcagaggtgaactcttatgcgccgctggcagcagaggcctccattacgaatacagcgacgattgccggggcaggggtcactcctgttactgtgaacgagacagtaaatgcggcaagcggaccgcttcttacgatcacaaagtccgtcagccccgtacctgtgacagagaatggaacattgacatatacgttcctgatacagaatctgggtaatacggcagcggatgcagctaccggtgtcgtgatcacggatacctttaatcccgtattggagaatctgactgtgaattttaatggaactgcatgggcagagggaaccaactatacgtatgatacgactaccggactatttaccggaaccgcaggaggtattacggtacccgcagcgacttacacccaggatcccgttacgggagcgtgggggatcaatcccggcgtcagcacgctggtgatctccggaaccgtataagggctgacttgcttatggacggctggcgccgtataaatctaaaataaaaagtcactgggaggacataaatgccctcccagtgactttttattttatccttgcatggcttgtagcttagccaaagtatctcttaagcagaccctcaaatgccttgccatgtcttgcctcatcacgagccatctcatgaacggtatcatggattgcatccaggttcagagccttggctctcttagccagatcaaacttacctgcggtagcaccgttctcggcatctactctcatctccaggttcttcttggtggaatcggttacgacttcacctaacagctcagcgaattttgctgcgtgctcagcttcttcgtaagcagccttctcccagtacagaccgatctcgggataaccttctctgtgagctactcttgccattgccagatacataccaacctcagagcattcaccctggaagttcgcacgcagatcagcaatgatatcctcgggagcaccctttgctacacctactacatgctcagcagcccaggtcttgccttcctcctgcttggtgaacttggaagcgggagcgtgacagatagggcactctgcgggagccgcatcaccttcataaacataaccacatacctgacatacatactttgccataattttttctccttttctcaaatgaaatgttttgttttagttttctctttttgcgtgtgctttatcagcacaaatatattatggaacgaagtctgttttcattcagaaaactaggactccgtagcaaccctggtgcaggcgggacaagtgccatagaaataagtgacatgtccccggatccggccgtcaaatctctctccggctgtctccatgatggaatcaatactatccatgtccagatcaatgacgcttccgcattccgtacacacgaaatgataatgttcggaagtatcggcatcaaaatggtcaacaccgtcaccgacccggagtcgtaaaatctctcccatgtccgacaacagagtcagattacggtagacggtaccgagacttaagttcggatcctgctgcttcagattagaatagatcacatcagcggtaggatgatccttgcgtcccatgagaaaggatttgatcatttcccgttgtctgcttcgtttcagtgccatgataagctccttcctcaataatagtaatgattactgtttcttataagcttattatacatgctgcgagaataatgtcaacagaaaaatgaaaaaattttgtttatatttttttaatgatattcttgcttcctttatacacaggaggtgggaatcatgctataatgagcgcaagtaaagtataaaacacgcgcaaacttgtgctacacagtgtactaaagtcacggaaagtttgcaggttgctgaaaggcaagagtaatatgaaatttaaaaccagacttcgtgtaacatttataagtattatattacttccgctgttgctgacgatcatggcatttgtgatgattgccatttacctgatgaattattctcagggtctcagcctgacggatattgattattccatgatgtcggagaatttcagggaattcaccaacaccacggatcaggcgtattatgtgctgctggaccaggtgaaggaagacagcagcaggctggaagataaagaatatctggatcatatcaatgaggaggtatcgcggaagtctacttacattattgtaagaaaaggtgataagatgtattatgccggcaatgaagatgccgcacagaagatttttgaaaaactgcctgcctacggtgaagagaatctgtcggatgacagcggatatttctacaatgaactggagaagtatgtaaaacagattgatttcactttccgggatggaacacagggcagcgtcttcattgtaacgaaggtcaattcgctgatctcgagacatctgctgatcgatatgtttgtggctatcatagtgatcctgatcttcaccagcctgatgctgacccaatggatccacaagggcgtatttgaacccatcaatgaattgaacgtggcaatgcgcaagatcaaggagggcaactttgattatgttctggagacagatgccaagggtgagatcggtgatctctaccgcaattatgaggacatgcgtttacggctgaaggaatccacggaagagaacacccagcatgagaagcagaacaaagagctggtcagcaatatttcccatgatctgaagacccctatcacagccattaagggttatgtggaaggaatcatggacggtgtggcagatacgccggagaagatggataaatacatcaagaccatctacaataaagccattgatatggatcgtctgatcaacgagctgaccacttattccggaattgataataaccgtatcccgtacaatttccaccggatcaatgtagcagactacttcggagactgtgtggaagaggtgggcctggatctggagcagcggggtatcaagctgaactattcgaacctggtatctcccgataccgtggtcatcgcggatccggagcagatgaagaaggtcatcaataatattatcagtaacagcgtaaaatatatggataagcccaatgggcacattgatatccgtattctcgacgaagtggatgctatccgggtagagatcgaggacaacggcaagggaatcgcgcagaaggatctgcagaagatctttgagcggttctaccgcacggatgcttcccgcaattccgcccagggcggcagtggcatcggactttctattgtgaagaagatcatcgaggatcacggcggctatgtatgggcaacagccaaagagggtgaaggcacctgtatgcattttgtcctgagaaaatacattgaactgcagccgggtggaaccaaggaatcaataaggaatcaataaggaatgaaacagaaatagcatgataaccgatgatgcagggacattctgtaaatggaggataaataatgagtaagattttaattattgaagatgaagtagcaattgcagatcttgagaaggattatttggagctcagtgatttcaaggtagatatctgcaataccggagatgagggactgaagaccgctctgacaggcgattatgatctgatcattttggacctgatgctgcccggcatggacggcttcgaagtatgtaagaagatccgcgaggagaaaaatattcccattcttatggtatcagcgaagaaggacgacattgataagatccgtggcttagggttgggtgcggatgactatatgaccaaacctttcagccccagtgaactggtagcccgcgtgaaggcgcacatggcccgttatgagagactggtgggaaccaaccagaagcagcagaatgatatcgtggagatccgcggtatccgtatagataagactgcaagacgtgtctatgtggacggtgtggagaagacgtttacgaccaaagagtttgatctgctgacgttcctggcggagcatccgaaccatgtatttaccaaagaagaattgttccgtgagatctgggatatggattctatcggtgatatcgctacggttaccgtgcatatcaagaagatccgtgagaagatcgaaaaagatactgcaaagcctcagtatatcgagaccatctggggtgtgggctaccgatttaaagtataaaagaagaaaaataagatcagaagagaactcctatgatggatacagcaacaaactgtctccaataggagttttttatctaaaagtgtgttataatcatagcattgcggattgcacccgtgaaatttgattagcgattccactgatgagataaagcattggcggaatggagtgtgttatgaacagtaaaaaaataatacagttgtctacgacacagaagatcatgcttagctttctgtgtgccatattagtgggtagcttcctgctggcattacccatcagttcagctaccggagaagcggttccttatatagatgctttatttacggctaccacatccatctgtgtgaccggtctggtgacggttcccacatattccacctggagcgtctggggacagatcgtgatcctgtttctgatccagttaggaggtctgggagtcattacggtcatgtacggtgtgatgatgggattgcacagacgactgggactgggtaaccggtggatgctgcaggatgtatttaatctgaataatatctccggaatcgtgaaattcctccgcaaggttctcataggtactctggtggtggagggatgcggagctcttttgtacatgacagtatttgtgccgggatacggactcagaggcatatggatttcgatttttaatgctgtatctgccttctgcaacgcaggaatggatattatggcggaagacagtctgtgcggctatgtatttcagcccatggtcaatttggtcacgatgttgctgatcatattgggaggcttaggctatatcgtctggtgggatgtactgcgggttttgaaaaatatccggagccagaagctcaaatgtttcagactgctgacgcttcacagtaaaatagcactcacggtgacaggaatacttattgtagtgggagcggcggcattttatatttttgaatacaataatcctctgacgatgcaggattacacggtgccgcaacggatctgggcatccctgttccaggcagtaactacgcgaaccgcaggttttgccacgattccacaagaggatctgaccaatacctctgcgatcatttcggtgcttttgatgctgatcggcggctctccggtgggaaccgcaggaggaatgaagacagttacgatcgcagtgctgctggtatctatgtttgccaccataggtaataaggaggatgcagagctttttgggagaaatattccgaagcaggcggtgaataaatcggtagcagttgtaggtatgttttttatcattgcgacgttgtctgcgattcttttatctgcagtgacagaggcggatgtgatagatattgtgtatgaaacagtcagtgccacagctactgtgggattaagcaggaacctgacttccatgctgaatctttggggaaaactgattattatcgtgaccatgtatctgggaagagtcggccccatatctctggtagtggcattcagcacgcagaaaaagaacaaaaatattgtgaagaacccgacagaagagatcagcgtcggataaagcagatcgaagcaacaggaaggaagagactatgggaatcaatcagacctatgcagtatttggacttggaagatatggaagaagtgtggcgaaggagttagcagagaacggcgcagaggtggtggcggtagacaacagagaggcagttgtcaatgcggcaatctcagagattccatactgtaaatgtgcagatgttacagatccggaagcgttgagacagatcggtattgcgaatattgatgtggtcatcgtgactatggcaaatcatctggaagccagtgttatggcaaccatgctgtgtaaagaactgggcgtaaagaccgttatcgccaaatgcgccactgagataaactgcaagatccttacgaaagtaggagcagaccgtgtagtattccccgagagtgagtcagggatccacctggccaaaaatctgttaagctccggtttcatggacattatcgaattgtcccaggatgtgtctatggtggaaatggaagtcaaacagcagtggatcggcaagaatctgatcgagctgaatctgcggaaaaaatattccgtgaatgtggttgccatcattcaggggaaaaatgtgaatacgaatatcgacccggagatgcctctgacacaggatatgcggctgatcgttattgccaaccgggcaaaattaaataaactgaaatagaatagctgcgagctataaaaaagtgaaacatctgacggtgcatttgagcacaagacagaatgtttcactcttttttttatacggtgacagccgtctggaaagctgtaaacaggtgatcagttatctgcccggaaagtattctcattaaaggcaccctgctgcttagccacgatagtggtacatatggcatcaccggtgatattgacagcggtacgcagcatatccaggatacggtcgatacccatgatcagtgcaatgccttcggtaggcagtcccacggaggtcagtaccatggacaaggtgaccagaccgacactggggacaccggcagtaccgatggaggcgatcgtagcggtggcaatgacagtagcaatggcagccggggtcagaggaatgccgtaagcctgtgcgatgaatactacggcgacaccctgcatgatggatgtaccgtccatgttaatggtggcacccagaggaatcgtaaaggacgaaatctgtttggagacaccgatttttttatacagagtgtcgatagacagagggatcgtcgcattactggtggaagtggagaaggcaaaggtcataaccgggaagaactttttaataaacttaaaaggattcaagcgggtgaacacaaacagcatgacctgatataccacgaaacactgtactgccagtgccagaatgacacttcccatatatttcagcataggcacaaaagcgtcgaagccgatacctgcgaaggtcttggcaatcaggcagaagacaccgacaggggctgctttcatgactgcaatcgtcatttccatcataatgtcattgaactgactgaaaaagttcgccacagtggagacccggttgcccatggcagccagaagaatgccgacaaataaagcaaagaagatgatcggcagcatatctccggcggacagagaggtaaaaatatttttcggaataatattcaacaacgtctccgcaaaatctacctgggtggtcgcgacttcggtggcatcctccggcaacgcaatatttaaaccgatgccgggattgatcagactggcaatgcccagtgccacgcagatcgccaaagcagtggtgcacagatagaacaggatcgttttcacacccacagttcccaacgttttcgtgtcaccgatggccatggcaccgcagaccagggagcagaataccagaggaaccaccagcatctgcatcaggcggataaaaccgttgcccagtacatagagaataccgttgatcagaatcgtatctctaaagtacccttccggcatataataatggatcagcacaccacctaccgcaccggttaaaagggcgataaagattttggtggacagaccgagttttttcttttctttttcgtgtttttccactattccagtcctccggtttctttcatgtaggaagccagtgtatctctccagccactgggttcttcgatgccggtgagacgcagcatcatattatccagtacggaatatttctccggggtgccgtcttttactgtgacggtaagccggtcctcttttccggcaagacgcaggatctctttcgcgaattccaggcgtgtgcaggaaccgccgctgcatacggcgtgatagataccgtaatggtcgttgtcgatgaaaaattttaccacgcgtgcaagctctgcagcggaggtaggtaccgcacggtcgttgtttagcaattccattgtggatacccgagggtccgcggctgcttcgagtacttcattcaaaaagtctttgccgatgccatagatccaggaacttcggataatgacatagcgggtcatcagctggatgacgaatttctctccggcatatttggattttgcaaacagtcccacgggatttacatcatcgaactcattatagggtgtgtcggatgcgctggaaaatacatcatccgtagagatctgtatgagttttgcctgaatgctctccgcagattgcgccagatttctcgcacctacggcgtttaccttgtaagccatatctgtctccgactgcgctgcaccggcggaaggatgatatcctgcacagttgatgacgacatcgggacgattgcggtgcatgaacagggaaactgcatgttcatccgtgatatccagctcgtccttatcggtttcgtataattcatattccatcatgtctaacaacctgatcaacgcctgccccatgtgaccgagggaaccgacgatccatatttttttcattgtgatataacctcctgcaatttgtgtgtaactgagaacagtataacaagtatatcataggaaagattccccggaaaagagaaaattaaaaagagagagaaactccataaaaatggatattaacagggagaaaaggatttgctatactaaccacagagagcagaatccgaaggaaaagctcaggatatatttgacagacagaatctggaaaggcagggagtttatatggcaaaattacgtctgggtgcattggaagccggcggtacaaaaatggtctgcgctattggggatgagaatggtacaatttatgaacaggtatcgattcctacaactacgcctaaggagacgattcctaagatgatcgcctattttagggacaaagggattgacgcattgggaattgcctgttttgggcccattgagctggacagagattccgaaaaatacggttatatcacaaccacgccaaagctggcctggaggaactgcgatattgttgggcagatgcaggaggcacttcattgccctgtgggattcgatacggatgtgaatggttccgtccttggcgaagtgaccttcggacaggcacaagggaaaaagtgtgtcatgtatctgaccatcggtaccggtgttggcggtggtatttatagtaacggagagctgcatcacggaatgctacatccggagaccggacatgtgctgatcacgaagcggaccgcagatacttatgccggaagatgtccttatcataagaattgtctggaaggtctggcggcaggccctgccatcgaagaacgctggggcaggaaagcagtggacctggcagattgcccggaagtatgggagctggaggcagattacattgctcaggcactgaccggctatgtcatgacggtatcaccggaaatgatcattttaggcggcggtgtcatgcaccaggagcagttgttcccgcttatccgcaagaagcttaaggaatacatcaatggctatatcgtaacggatgaacttgcagacatggagcattatgtggtgccggcatctctccacgatgatcagggcatcatgggatgcctggagcttgcaagaagagctcttgaaaacgatcattgatagggcagctgtttacgatattgtaacggagacatctgatatgtcctgtgaaagcagcggataaaatgactcacgttggggaagccggactgcagggcaacctctgtaaccggcagagaggtgctctctaacagatggcaggcatgggtcagcctcagatgcatcaggtattgcgtcagagtcagatgaaaatgctgcttaaaatagcgggacaaatatttctcggataaatgaaattgctctgccagggtttccaaccgaagggggtccgtgtagttatactgcagataagtcagtatctcacgctgcattggatcgttccttttggagcccatcgggttaatggttccgcaggcagcgattttttgcagaagtgacaacaataaaatacgtaatcggaaatgcccgctcaaagtatttggaagctgtctgacagacaggatctcacggatgagagaaatgatgtcaggacagcttttttcatgggaaagattatgatgcaaaagtaattcatggttacgcaagggaaggagaaactccgtttccaacagatcatccgtctgaaaggaaataaattccagtgggaacagcagggtatgatagtctacgcccggaattgcggaacccataaaatgaagctcgccgggattcacaaagaatacggagccgccggctgcttcgtattcttctccttcaatgatgatcttaagagagccggagcggacatatatgatctcgacctccggatgccagtggacaggaatctgaaaaaaagcaggcatatcatgcaggtgataacagctgaaaggaaattcttttgttccgtgaatgcgttcttctcttaattcggggtacataggcaggcctttctgtgaagtggatcgggggatattatggtcagattactataaaagtagaaataagtcaattttctgtggtaaaaatgcaagttttaggagagataaagtagtaatatgtaaaaattgaagagactattcggaatagtattctgaataactgtaaaatgaaaatgcaaatttataggaaccgcagaaaggatataaaacatacgatggaaggacataataagtcattatttcaattatttgtaccactgtgtctggagacgatcttttacatgttgtccggaatggtggataccttaatgctttcttctgtgggagatcaggcagtcggagcagtcggaacagcaaatacttatatcggtgtgttcattattatgtattcggtagtttctatgggaatgctggctgtgatgacacagaatatcggtgcgggcagaccggggatcgcctgtcaggcaaagactctgggattatggtttaatgggatcctgggtgttgtaatgtctgtgtttttgtttttctgttctgatgggattctgtatgtggtaggtattgcaccggcattgaaggagcctgccgtacaatacctgcggatcgtaggaggcggaagtatactgaacgcaatgattcccatactggcaggatatctgcgtgcatttggatatacgaaacagcctctgatcgcaactgtgacaggtaatattttgaactttatattaaatgccgtgtttctgtttcgattccacctcggcgtgcagggggtcgcatccgcaacagtgatctccaaagtagtgaatctgatattgatagtgatctttgtacggcggctgatccctgcaaaaaaatattcggagagggtaaattccggagagattttgcggaagatcatccggatcggattaccttccgctttggagaatattatttataatatagcgatgacactggtgatccgttttctgaaccagatggatacagaaggaatcaatgtggcagcccgctcctatacggcacagatcacaaatttatccttctgtgtgggaagtgcgcttgcccaggcgaatgctattatgaccggatggtacatgggtgcgggaaaatatgaaatatgtgataagcagactaaaaaatctgcggcgatcggagcggtactggcgatgggaacagaatttctgtttgcagtcagtgccccggtcctgatctcttttttcacgcaggataagagtatggtagaactagtgcagaagctgatgtttattgacattgccctggaagccggacgagtaacaaatctggtatatgggaatgctctgaaaaccagtggagatgctgtatttccggtgatcctcggagctgttttcatgtttttgtgtgcagcgggaggaacgtatctgttggggatacagctgcatctggcagtagtgggtgcttatatcggtctgacagcagatgaatgcagccgtgcggtcggcatgatgttgcgctggcggagcggagcatggaagaaaaaaggattgatcgaagattgatcgaagtgcaataataagacggtataccggctggcttttgcccggatgggcattctcttgcttttcgtagcttgtcatagcatagcgcattttttataattaaaatattgacaatgtgaaaaaatgtgttatagttctaaatgcaaatgcaactcatttgcatttagaataaatatatgattaagtattcatttgataaagaaagtatggaaaggtaagagttatgtcggaagttattttagatactttaatagatagtataaagctggtgccgtttttgttcctgacctatttggctatggaatatctggagcataaggctggcgagaagaccacacatatggtgcgtaaagcaggtaaaatgggaccgttgatcggtggcgtggcaggtgtgctgcctcagtgtgggttctcggcagcagcatccaacttatatgcaggcagagtgatcaccctgggaacactgatagccatttatctgtccacttctgatgagatgctgccgatcctgatttcggagaaaatggatatccgctttgtactgggcgtgctgggagcgaaagcagccattggtgccatagccgggtttgtgatcgatctgttggtccgtgagaggaagatacatcctcatgaccatgttcatgggcatggggaaaatgaccatgaagaggaagagcacattcatgaaatctgtgagcatgagaactgccattgtgaagaggatggcatttttctatctgcggtaaagcatacgcttcacattacctttttcattatagtcattggatttgttctgaacacagcactgcattttgtgggagaagatgttctggccggcctgatcctgaaccgtcccgtactgggacctgtgctggcaggattggtgggactgatccccaactgtgcagcatctgtgaccataacgcaattgtatatcagtggtgtgatcagccttggagccatgatgtccggattgctggtaggagcgggagtaggactgctggtgttgttccgcgtgaacccggataaaaaggaaaatctgaaaatcatgggaattttatatgtgattggtgttttgacaggaattgtgataaactggctgtaggcacaagcagtgtttcgaggtggaaagcactgcgccctcgagatcgcgatataaaaggacagatatctatggaagaacataaatgtgaacacaatgatatttcttatcccaagggattaaaatggaccaaacagagaaaatgcgtgtatcaggtgctggaggaagcgaccgagcccctcagcgccgtacagatttacaatcgtattgagagagatcacgaaggcagcgattatgctgtatccacgatctaccggattctggcaacatttgaagaacatggaatggtagagaagacaacgttcatgggagacggtaccgtagtatacgaattgaaccgcggggaacatacccattatgcggtctgcctggaatgtcataagaggattccgctgcccagctgcccctttgcacatgtgcatttagagcaggataccggagatttcactgtcaccggacacaaattagagctgtacggctactgcaaaaagtgccaggaagcccgtaaaaaacagtaatttcacttattgtacaaataaatcgaaaaaaatatttaaatttttttcaaaaagtacttgcattcttgaaaaccatgtgataatatatgtcttgtcgttgcgggagacgcaacaacgacacagaaaatgcaccgctagctcagttggtagagcacctgactcttaatcagggtgtccagggttcgagcccctggcggtgcactcaagaggactgtttttggagacttaggagctccggggacggttctttttttgtccccagaaactcactagacaccctgacctcttgttaatggtgtctagtagccacgctggaagaatatcggatccagctgatacaccggagcaccgagcagcttcatttgtgcagccatggcgacataggttttcgttgcagcataatcataatgccccaggaacacacgtaaaaattccaggttaccgccgccgatcaggtaggagatcgcaaacgtgtgacggagcagatgcgcatgaagccgatctataccggtgctgatcttcagatcctgaaagatcatcttcaccgtgttagatgtaagcggacactccgaatcccgaagctgacggagcatatatccggaagtaataccggtgcgctggtcatactcctgcaatgcgctgatcagaaagtccggaaccaatacaaaccggcttttgttttccttagaattgacgatgtgcaggatgttccgctccggatccagatgatgtacctgcagatgacacacttcctgtcggcgcaggccgcagtcaagcaacaggtgaaagatacaataattccgcagcccctgctctgtgccccgatcgaaaagcgcatcgatctttaccacatcctcaacgaataatggcagctcagccacggcatcatccttcggcagcttcacaccctttaaataatccggactaaagttattctcatatgtccagtgcagaaacgcctttacagatctgcaatagctccggatagaagagttcttgatcttcctggtacgcagttccaggataaaatccatgtagacagatccagtaagtgcatcaaagctgctcacggcaggatctacccgataatgactttccaggaaccggaaaaacagatccagatcatccgtatacttaagtatagtatccgtgctgcaataagtactccggttgtttatgtatacgtcacggagctgttggatggtcaagtgaatttcccccttgcaaatctaagttgtttatactatcataatcgtaaagagtgccgtcactttcatccagcagacggaagcggtgcttttcagaagatacgaagactccggaaagttcatcctcattaaactgccggagttttttctgtttatatctctgcgcttccatgatgtcgttatcattcatccggagaagtgcttcaaagcagtcctgcagaggactgtcctcattgatcccacgcatatagatgccgagggtcaccgctgacccgatcacacgctttttcatggattcaacggagagctttcggttatagtttcttaccagcttcacctcatccggtgtcattttcatgtcaatacagcgtgtgctgcggagagctttccaaaaaccacagtacggtctccggtacttcttggaatccccggttttctctaccatcttaaaaacccgttctgtcagatagtcaatgatcagcttccggttatccagatagtcatagatccgcttacattctcccttgttccggtgatccttgaacgggatcagatcatagctcttggaatgtctgcgcatggtctgatattccacatttaccacgtagttgagttttggtgtaagtttatcagccagccggatcagagcatcctcttctatggtcagtgtaccatccaggatctgccgcacataatttgtataatacggatcctgaccgtgctccagaaagaactccagtcttgcagtataccggtagaaccagttctttttctgatagcagcgttcatagacccatttgtcatacttagagatcaatccgttcatttcccagatctgaaagaaccacggcttgtaattctgttcgatcacttccctggtcttctgatagatcctgacgaataccttatcagaacgcttccccagtgccacatagtcgatctcatagtcttcggagccgaccttgtttgtgacataggttgcattcttgaacctgtccacacgcatcttgtaaaagttttccggtgagaagaaggtctccgggtctttcagatagttggagtgccagcagtaatccacacggttctcctggacgaaatcgatttccagaccgaagtatgcagctatgttcttgacatattcataactgttctcaaaggcatcctttacacccatgatccagagcatgtagctacggatctgcaccacgcactcacaggtaacagactccccaccgtctgccgcttttggaaccaccggcgccaggaagatatcaaagtactccggataacttaaacaggtcgtatagaaccgggagaaggtgaccggcttgagatagagattctttccgagtttcggcagatataactccggctggtcttcatttccgttcagatacgaatactgcagcttgaagaacttgcgcattttctcgacctgcggatccttggatttcagccggaagtcgttccgaaacttcacgctataatagaatgtatcgatgttatgcaggaatttcttgtgtgtgtatccaaaccactcatactgatcctccaggggcatatcatgatacagaatgttatcgttattttgtcttttgtcgagcatattcgaccccctaaaacttaatttgtcggacaaaaacacggtttttgcgatttttccccaaaagccgtttcggggaaaaaagttttccaccatttttgttagaatacgagcacgtttcaccgtgtcggacaatggtttttgagaccacgtattacagggcgtggcgccagcgcctgcgccggcttcgcggggccccttaaaccccgctcatccgtctcatgcgctgcacctcttttttgttcgctttttcgtcaattaactcaaaatgattgtaggaatcatagagttcatagacggatttcttcgcccaaaagaaattggaatccacggtctgcttcatgggataccactttttgatacagacaaacatattcccccggctcaggaatccgagcacagcaccaatctttccggcgttggagatcttccggtgcacaaaatcgtattcgatcagcccccggatctgcctgtccagcatccggtcaaactgtgcgagcaggatcacgtcatagccataatgccggtgctgggagaagaaggacagccaagcacgccgatcaggggaagcgtattccctggagttaaagagcagctgcgcctcatctatgtagatcttaacctctccttcccggagcctgcggccgagatgctttgataaccggcgtgagaaccgaagcagcttgtccggatccaggcgatggttcgggacataaagatatacgcctttacatttctttaccgcttttgtgttaaagtaaaagttaccgatcaccacggaatccttgcgctgcagccggagagcaatctccctggcagcatggcagctcttgccggatccgggagtcccggagtacaaagatatcataataattcccccttattgactactcgatcagcttcacccagcgggcaatgatcgagtaaatataatagacaccaatggcgagcagccaggcagagccgatggcaaccatttcagagacaggaacaaaccagttaatataaccaaggtaaggaagcttgctgaatttctcgattgtgtcagcaaagggagaagtcgggaaagccttcatcagtagatccaaaaagccattgagtaacgcctgcatatctgccataaaatcaccatcctatcatttttttcgttgcagccatgagcataatcacaaagcagccaagctcccccagccggaagatctccatcaccggatccatccaagcaagatctaactccagaaccatatctattcccagggagtccagtttgatcgggatcttaaagcagggagccaccggatcagcagacagcgcctggataaaatgtataaagtcgaaagggatacagaaagggaaaatcagccggagatctctcttgtaagattccccctctccgtcagtgccgggatccggagaaggatcaggctctggttcaggttccggtgctggctccggcaaggctgcagtcagggcagcaactagagcattcttataagcttctgtattttctgccggatcaagtcccggttccggtagagctgcggccgccgtagacaatgcagcgttaatcccagggagccgccccggagcaaactcatagccggtgagaggctgctgccgctctgctgtcgatgttgcaagatccgggaagtcataagcttcaccattcagaagaccagttaaatcacctgtttgaaaaaaagcaagagcatgttcttttgaatcaaacataggaatatttatattagcatggccgttttccgaatatcgaaattcataagaagaccaatcattttcagataaaaagctacctgttggtgaataattaatataatggtaggagacacgcatcggaacaagcccattatttgaatcataagaaaaaaacataaaactatatgcatcattctgctgaattaacacatacggacaaaccattttacaattgtaagatgaaaaagttgaataggaatcaccaataaaatagctactacctacaataagataattcccatcagcatcttgatccaatttccctgaaaagcctaagtctatataattatttacatctatgccatctattttcccggcatacaaatctgcaataattccagccatagcagaaagaagcgtacttgaaaccaatacatcttggatatatgtaaaaggatccttatacccagtatccggcaccggagtgctatccggatcagaggacggagtaggagtcggatccggctcattgccacctgtcccggagattacccggtactttgcaaacgtttcagaagtcggcagcttcaaagcattgcttccaagcatagaatcagcctgatctaaagcttctttgatagttatccgagaaccgtcctccatggttatgtatgaatcataaaaaggcggttcagccatgctttcaacagatgcaataaaagcatcataaagcgaggatccggattcgtaatcatccagtccgtccttgatgccggaagatatagcaacagtttccagcagattatagagcatcatagtcagctccacggcaaattcttcactaactgcgacagatgcagccttaacttttagcgtatttccacccagcacgctgccgatcacaatgaccatggcgagcaacaacgctgatattcttttctgcatagttatcccccctccgaaaaattcttatctaacaaagcatgaaagccatcatcccgaacatccggaggttcacaacaggcatccatgccatcagcaggatctttaaaatttctcttgcagcagagaataacatccggatcgtaaaagatacattcgtattccctgcagtgtttctcatcaaaataagttaccatttccacctttacctttcttgtcctacaaattcccggaaatcaccggcgtgctgcagcgattttgtccgacaaagtttgtcctacaaaagtcacactgcagagtcaaacctgcagcaattttgtccgacagcaccaaaaaagggcgggaagcttcagctcctcacccttcccggttagagactattcagtttttaagcactcttcagagacttcagccatctgataccatatctgacagcaacaccggcaccgataatggtgacagcagcgggtaccgcaatacccagaaccttgaacatgtcagcctgaacgctggtaacagcagcctgcatgatagcggcaacatcgaaagatgcagctgcaccagtttcagcaagagcagtaacagttaataaaggcatattattttcctccttctatgagctggaatatgaagaaacatacatatcccattaatatagctacgcattcgcagacggcgccgatgatcatacactgcgatgcaatagacacgtaagtaaaaatatccatcatttcctcccattccacaggcccagcatgataagcatcccggcaatgatgccaaggcatatagatatcatcagcgtgttctcctggatcttgacggtctgatcctgggagactgcaagctgttctgccagggtatcagcctgttctgacagatattgattcgtctgcaggagatcctcatggatcatctgcagagcttcggaatagtccggtgcatctgcggagaagacaacagtgtagggactgttgccttccggagaatctaccgcagcaccttcaccggtatcgctgccggttatcacttccgcattgccaccggatacggtgacaggaaggtagaccgtgtcagcttctgtatgtaaaggggaatcctccccgggggaggcggtcacaacctcgtccattatttagcagcctttccgggctccttagcttccggagcggtctccggctggatcatgccctggactacaaagccgggaagaaccttcggcttgatctccaaatgggagataaaggcaacatcacgcaggcggttgacaggtttaccatcggcgcctacgatcatctcgaaagtaccttcataaagcccaggagctactacgatcttgttacgcaacacagagtcaacagaacactttgcacgctgtacgcctaccggcttggtaggatcatactgaacctcagatgcaagaacttcaccgtcttcaccccagaacatgtaatgcactgagcatccggagagcttgtcgcctgtttcgtccttcatgtcgtactggttagcgaataagatcacgatttttgctttgtttgttaaggttacattagccattttgattttcctccattttcagaaaagggttagtgttaataagatattgttttctatcattttcatagcggtagcgctgtcggtaccagctcatgactttattgtaatcactgccggtctgcttacagagcagcttgatcgtaagcggtgtataattatgacgttcccggagccagtccagaaaagattgcttgttttcatcccaaaacgaagaatcggtgagacactccggagtatcaggtacggttgattgtgacatagggatcgtcctttctggttatttgtgtttttcgacttgtttccaataggtgtcacgcagatccagaagttcagccgcatccgaagaagtacgaacgattactttaccctcagacttagatctggcatacataaaataaacaattcgactgggatcagacacagaacgatcagcttccacatggatagtccggggatcaataaaaatccaccgctctatctctccacaaacaacttgatcaactttaataaacatcagcattcctttctgttccgggtctgcggctgtccgggtgcccctccggggggcgggtcgcgccccgctggcgaccagggaccagtccctggacccgttgccactgcgtgacaggcgcagggaaacagcagcaagggcggctcctgttcccctggcggggaagtgtcgggggagcgggtctgtaaagcggctttcgcggcatatcctcaccgcaagagcggcggttccggtattccacgttccgcttgacagacagacgccggggttacgtgaagggcagggcgttaaggtcttcaagggcacggtgtaggtgatccagtgaccgggcgacggtatagatctgactgtcctgttcctggatcttcttccggttggctgccatgagtttttcatagtaagccaattcttccgctctggtctcgtcaccggagcggtattcttccaggatccggcagagcttgtctgtccaggtcgtgcccttctggctgtttacatactcgtccaggtctgccggaagacggatcgacttcttgatcagatcatccggcactgctgtcacctcctagaatatcctcgaaagagagctgaccgccacaggctgctttgcgcttttcctctgcctgatccatatatgtatcatacagatccagaatctcctccgcattcacagaagtgcggatcagtaaacgaccctgatctgtagtaccgaccagctcataataaagtatgctgggatccgaccgcagacgatccacttctacacgtaaagtatttgcatctaccgaaacaatgcggttagtccgataataatttacttgaacatcaatgagcatcaaattacctccttcttacccggatcgactccacacagggcttatcatcaccggtcttttaatatgcgcgcgtttgtgctacaatttaaggtatatatactttagtaggataaaatctgtcctacaagtacagtatactagtcacgtgactagctgtcaataagaaactagtcaattttctattatatttttgagggatatttgatggacatagttaagagaataaaacaaaaatgtgctgaaaaaggtactacaatgggaaccttggaaaaagaactcggatttgctaatggatcaataaggcgatgggatgaacgagtaccaggagcagacagagtattgatactcgcaaatagactagagatatctgtagattggctgcttactgggaaagaatccgggaacctgactccagaagaacagcagcttatagattactaccgcaaagcagatgatcgaggaaagcgtagtattttacgaacagcggagagtgagagcacggagctagagtcatcagcttccaagcttggataaaacaccatagataaaagggggatcactatgaatgatgcaatagcaatgatgttttcaattttaattgtcatgtttgggtacctggtattcaagatcttgacggatcagtcccaatcaacgcccaccaccaccagaaaacggagcaagaagagagggacaggaaagccggttatcaaaaataactggaatatgcgaccactggacacaaaagatcctgcagacaaagatctgcggtatgaggactttgtagaatcatcctggaaagaaatagaaaaataattgtccgacaaacacacatgcagcatagccggatccacgccatcataaattattttgtccgacaaatttctctttacaacttcgggaacccgtgttatattgaacttagccaaagagagactaatgtctaacttcaagacgcagaaaaccccgggatgctaccccggggctttttgttgctaggctgactgttgctattcatcaccgtccagccatttgcatatgtagtagccgactacacttgctatgacggagataataaaagagactaataactccaagacgctcacctccttcctgctggaaagagtcaacagcaagcctattatatcacacggttcccgtagcgtaaaccgctaaaaaacgacttaaaatatcccttggaagccttttctcttaatcagggtgtccagggttcgagcccctggcggtgcactcgagagaatcgtttttggagacataggagctccggggacggttctttttttgcatagatatgctgtgaggagattttatatgactgcgatatttgatacacatgcgcattatgatgatgatgcattcaacgaagacagagaacagcttctggcggatctgccggggcagggcattgcccgggtggtggatgtgggtgcgagcctggcatcctgccggaaagtgttagagctgatggagcagtacgattacatatacggagccatcggagtacatcccagcgagaccgcggaactgacggaggaatcttattcctggctgaaggaacagtgccaaaaggagaaatgcctggcggtgggagagattggactggattattactggccggagccggaccacgagacacagaaaaagtggttcctgcggcaactggaactggcgcgtgagatcaaaaagcctgttatcattcactcccgggatgcagcgaaggataccgtggatctcatgacggaggcgcacgcagaagagatcggcggtgtaattcactgctattcctatacgaaggagacggcgaagattttcctggatatgggattctactttggaatcggcggcgtgctgacttttaaaaatgcaaagaagctgaaggaagcggtagaatatatccctatggaccgcatcgtgctggagacggactgcccatatctggcgccggaaccgaaccgcggcaaacgcaatagttccctgaacattccctatgtgatcgctgccatggcgcagatcaaggggatcacagaggaagaagtgcgcaaggcggcatgggacaattccctgaaattgtatcgaatggataaataaccgggtaaaaagaaatggaagcaagcaaaacaaaactattttcaaaagatgatctgaaaaaactgatcattcctttattatttgaacaggcactggcaatcactgtgggcatggcagataccgtcatgatatcctctgcgggagaagcggcggtctccggcgtatccttgatcgacatgttcaataatctgatcatcagtgtgctggcggcactggctaccggcggtgccgtggtgacctcccagtttctcggagccgggaaaaaagaggacgcatgcaaatctgcaaaacagttgatcgtgtcatcggtatgcattacgatcggtatatcgattttggtcatggtgttctgtaatggcatcatttccctgtttttcggtaaaattgaagcggacgtatttcataatgctgtgatctatatgatgatctctgcactgtccttcccgttccttgccctgtacaattcctgtgcggcgctgttccgctccatgggaaattcccagatcacgctgaaggtctccgtggtggaaaatatcattaacatcggcggtaatgctttgggtgtttatgtactgggactgggcgtggcaggtgtggcgattccttccctgatctcccgtgcagtggcaggattcatcctatatcgtttgctgaaaaacccgtccaacgaagtgcatttattaaaagaaagcttccacatcgactggccggtgatccataagattttttacataggtatccccagcgggattgaaaatggtattttccagctgggacgtgtcattgtggtaagcattatcgcgggtttcggaactgtgcagattgctgccaacggtgtggcgaacagcttggacagcatgggttgtattgtgggacaggctatgaatctggcaatgatcacggtaatcggccgttgtgtcggcgccggagattccggtcaggtgcggtattatacgaaaaaattattgaagattacctacttgtgtacctttatggtaaacagcgtcatcctgctgtgtctgtcgtggatcctgaaatgctatggattaagtccggagaccacgcagttatcctatattctggtcatgatccacaacggtatggcgatgtttttgtggccggcgtcttttgttctgccgaatatgcttcgtgcctgcaatgacgtacggtttaccatggtgctgtctattttttccatgttcgtgttccgtatcggattcagctatatcatcggtgtgaacatgggttacggagccatcggtgtctggatcgccatggtactggactggatcttccgtgtgatctgttttgtgagcagatatttgtccggacattggctgaagacagccagactacaggataacagatagcaacagttcatctcgtaaacatatgcggtcacaaaatcatgctcgcatgattttgtgtgcccggatatattcacggatgaactgttatgaggtataatgtgggaaaaagagagagaggtatgcaatatgcaggtagtattggaaaatgaagctttaaaagtaaccatcaacagctttggtgcagagcttgcaagcattcgggggaaagcaacagataccgagtatctgtggaatgcggatgcaaaattctggaagagaactgccccggtactgttcccctttgtaggaagtctgaaaaataaggaatatcattatgaaggaaagacctattccatgggtcagcacggctttgccagagatatggagtttgccgtggatgtacagacggcgacagaagtatggttttccctgcgatccaatgaagaaacaaaagcaaaatttccgctggagtttatcctgaagattggttatgaattggaaggaaaagatctgagggtcatctggcaggtcgagaatccggatacgaaaacactgtacttttccatcggaggacaccccgcatttatgtgccccgtggatggaaaaggaaagcagtcggaatattattttaagtttgatacggacaaagatctgacttacggattggtggcagatgacggacaaggactcatgggacagcaaaaggatgtattaccggtgaaaaacggctatgcgcagatcacggagcacttatttgaccgggatgccctgatcgtggagaatcgtcaggcttctgcagtgagcctgtgtactccggacaaaaagccgtatgttaccttaagctttgatgctccgttattcggtctgtggtctcccgcaggcaagggagcaccgtttatctgcatcgagccctggtatggcagatgcgacaagacgacctttgacggcagtttagagcagcgggagtacagtaatactctgcaggcaggcgaggtattccgcaaggagtacactatcacaatagaataattacgagaaatgcgaaaaagcttctgaaaaaagcttcggacacagaaaaagattgtgcccggagcttttcttatgttgatattcaatataaatttattgaatatcaataaaattatattgacattcgtatcatagagtgatatgttaaggctaccaagaaggaaagaggtattcattatggagaagagagagttgccggaaaaggagctgcgggagaaaaagttatctttggcgaagggtacaaagtacctgctggatttcatgttctatgcgggaatcctggtgacgataagtctgccgtttagtctcaaatacataggaaagtatctggaggctgtggaggaacattaccttccggcagtgatcatattcgccattctgggcgtgctggcgttattgttgatcaatgaactgcgcaagatgtttggcacggtgcttgcggagaactgctttgtaccggaaaatgtggcgagccttaggagaatgggagacttaagctttttcatcgcggccatgagcgctgtgagatgtgtggtgtacctgactattgccatgctggtgatcattctggtatttatcattgcaggcatgttcagcaaggtgctggcgatggtatttgaagaagctgtgcgctacaaggaagaaaacgacttaacaatctaaaaattcagtcactcaaaattagaaaggcatctattatgggaatcattgtaaatctggatgtaatgatggcaaagcggaagatcagtctgacggaactggcgaatcaggtggatctgacacaggcaaatttatccatcctgaaaaataataaagcaaaagccatccgtttctctacactggaatccatctgtgaggtgctgcattgtcagcccggagacattctggagtatgtagaagacacaaaagaagaggaaaccaaataaaacctgagagggggagatcataatgcaggaaaatacagtagtacaggaaacaaattcaataaatcaggaacagatttccgggcagaatgtagtccgggtagtggaaaagacagagactgtggagacaaagcgcttgcaggagcactataattttttcggtccggtgacttttctctatgccgtgttctatgcattttgtatgttccggaatggctcggggatcaccttccctttttttctcgcaggcactttactgtattttgtcttctcgctgtcaaaactagagattaccttgaaaaaagggagcgccttttacatgatcagcattctgctgctgggggtatccaccttctgcaccgacggatgggcgatcataggtctgaacaagctggcggtgtttctattagtgatgtgtctgctgctgaatcaatattttgatacgaaaaagtggaatcttgggaaatatgtgggaagcatctgtcaattggtggttatgagcttcggggaactggggaagcctttttccgatggcaaagcctattttcgtgaaaaaggaaaagtaaataaaaaggtatggtacgggttgctgggagtagtgatcgcactgccgattctgctcattgctgccggactgttaagctctgccgatgcggtattccgtaagatgacaacggatttcatgaactggatccgtccggacaatatattcaacgtagtcatccgggtaacgtttctgttctttacttcctatgcactgacttcctacctgtgtaagcgaagcatcccggaagaagtgaaggatcgcagaaagggtgagccggtactggcaattacgattatgtcactgctgtcactattgtatctgctgttttccggtattcagatcttcggattgttcttaggaaaaatgcagctgccggagggctatacttacgcacagtatgcaagagagggctttttccagctgctggctgtcagcattctgaacctgatcctggtattggtgtgcctcagcttttttagggagagtaaggtactgaaagtgattatgacgattatgtcattatgtacttttatcatgatcgcgtccagcgtaatgcgaatgatcatttacatccggtattattatctgactttcctgcggatcttcgtattgtggatgctggcggtattattcgtcatgtttatcggagtgctgatcaatatttacagggaaagcttcccactgttccgctatggtgtcgtgatggtgaccgtgctgtatcttgcattgtccttcagccatcccgactatattatagccagagtgaatattgccaatgcacccggcgcggacggtacgggctgggaagaatccgtggcgcaggattacggagacgattttttcgccggaccgtttttccggggatcggaatacggagacttctcttatctgagtgatctcagtgcggatgcggcaccggtcattattccttatatggagagccttgggtatgatttcggcgcctatgaactggagagccctacggatattatgagtgaagatacgcaggctcagtggtgggggagttatcagccgaaaggattcggatattattacctgaaccataataagaagcgtctggatcagacatctctgcggacatttaatatttccagatatatggcacggaaacagatagaggcaagaatcgatggaaaataaagaaatgaatacggaaaaaataaagttttataaaaagcatccggtgttgcttgcatggctgatttctatatttatcggactgggctatgcgctttttacgatcatagcctctgttattcattatgagcaaagagattatgtatgggagatcattaaggcttttacagaaatgtttacctgggcaattttaatgggagcggtactggtatttcctgtggtgctgacgatcagcgaaggaatctgcctgatcagtgaagcatgggaacgtccggtgaagggagcctggctgtttgaccagcatgtattttggctgggcggattctatgaactttgttatttggggttgattatggatgtgacatccgctgactggcagacgcagttaagcaattccaataaacatacaccgatttacagtggttccatggttacttttatagtactcttgctgctggcatttatagggtatgagattctgcagagcattccgcttcggaagctgccgccccttgtgacagtcctgtcgatttccgcaatgtacctgggactgctggagctgatcctgttcacagtacagatattcaagccgacgattttgcttgatggatatttgctattatttccactgtgctgtgtgctgctagtggtgcgactgcttctgaagaaaatacgggagtggaatgcactgatgcagaatgcggaggcggaacactttgggacggggaagatttatcagaatcccatgctgcgttggtgtgacagcatattgcggaaggctgcatggtggccgatgctgggactggtattgatgttcccgctgttgggaatcctgatcgcaatcctcatgctgtttgggcaggcaccggattctgtgattaaagcattcacggagaccagcgactggaatctgtctctcaggcaggcaccgcagaatgtcatgtatgatgaacattatctctgcacggtagctgccggcggtcatgaaaaggtcgtaaagcccatccgtctggggaggcggcatgggcatgaagtcattgtaaatcgtcagctgtgcattgcgaacgcttttgaacaggtgttggaagaacggactcccggcttacaccgggcgctgcgtcatttttatgatacttacgggttccctgtggcgagactgatccacagccggtacacggcggatctggtgtattttatcatgaaacctttagaatggatcttcctgtgtgtgctgtacctgacggacgcgcatcccgagaaccgcattgctgtgcagtataccgggaagacggcggcgcaggtggaagagttgtatttgtaaaaatagtggcgtacgatgcaactatgatgcaatggtatgttaaattctttactgtaatggacgggggaagcgttcggttacaataaatacataaggagagataccaaatgaggggcaaattaatagttatcacaggagttatggcactggggttgtctgcctgcggagcacaggggagtgatccggtgggagggagtagtagttcagaggttatcggatccgcagaggctgcggtaacggaagagagcacttcagagactggtgaatccatggaagcgacagtatccacggagactgtttccgacactacggcatccacgacaggtccttcttacgaagatgaggacgcatggcttccctgggaagactacggggaatgttccaacactgtgaaagacttctacaatgacgatgagaaaaagacctattactacgaaatggatgagttctttttttccgatgagaaatatgccaaagtgaatgattatctgcagcagatgtatgagaattacagaacccagtatgaggaggaaggggagaatcacaccggagcgtatgagttagtggatgaaactctttccgagggacagcgatacgatgataattatctggtattcaatggcattactttagcggatgacgagtatgtcagcctgcattttaatgacacggtttattatgcaggagcagcgcatccattatcctattacatacccgtgacgatttccattgccaccggcgaagaagtcaccccggaagaagttttggggaagacttgggacgagatccgggcagcaggctctattgaagaagaaaacgaagaaaattttaatgccgattacggcttttacatcacagagaaggaactgtgctatctctatcgcacttatttctttgcagaagagattcggatttcccggtaaaagaaccggattgaactgacagggcagaagaggtatacttattttcagaaacggatggaggtgccgggatggaaaagtttaccccttcagagctttgcgcagacattaagatctatgattataagaaaaaagtaaaatatgatgagaaatccctggtgatttttgagaaaacagggaaaatgataacagccggaaaagagtgcgaaggcatgctttacactcttccggctaattctattggcttttctccgatcgtgttgggaagagtcagcgactatacctgtgcggaaaaaatgttaaagcagatgctgtgtaggtatcttggcaagtcttcttttacgggatacggtgaagggcttatttttattcacgagaagctaaacgaagtggaaatgaaagcctattttgatctcctgtatcaggcgggagccaaaaatgtggtctatgcagatgaaagcgtgaaaggaatccctgagggaaccccctgggaggatgtgatctggggaatgaagaacacttacaaaaatcttcgttttgccgtggagattacgaaggaacagcccatggattatttcagatattcgctggcggagctggcagagaactgtaagcggtggggactggaagaggaaatgtcaaaattgtatatttaaggaaataggctaagggtaaatgaatttatttatccttagcctaaattattagctttgctgatagtaattatgccggtaaagatgatcgtctacctgctgcgccaggtgattcatttcttcttgtgcatcagcacccatggcaatattataaaacgcataggaaaactgcttactgaagaaaggatatgcgggggtctgcggtctggtaaaagaggtattccgtaattgtgaaaataaaatattgctgttgccggaaccagcctgaaagctgtccattacgtcataaatctcttttaaaacaggaatacccgttaactgactgatcttcaactggttctgcagactgaaaacataacggataaattcacaacattccctgggatattgtgtctgtctggacatgcataatccccagcttccgtggggagaagctgcttttataccatggggaagaggaattatgccgatattgctattccttttctgtgattgaaaataagcactgggcagggaaagactcatggcaaagttttcaggaaaatcggcactgagatcctccacgtgggtataatgatatttatgaaataattcgcccagccaattcatagcagcgacggaagccggagagttaatatatccagaggttgccgtcagcgtatcgttaaaaaagctgccgttgttctgcacgataaatggcaatccggcgtagctgttccattctccggattttggagaaagaccgcgtccggagtccataagcaaaggatagggaaaagaagttttggtctgtattgtatggcagacattcagaaactcatcccagctccaggcatcttccgcagaagtcggaatgcggataccaagggaatggaacaactttttgttatacagaatacataaagtggattccgtataacccagatgatatagttttccctgataggttccctgtgtcacaatgggagacagaaaagaggataggaaagacgaatccatatatccatcaaacggcagcagagaattcatatatgcccaataggggacatcaggaccgtccagggacagaatatccggtgcatttccactggtaaagctttgcaacagcgagtcacgcagaggagccttatcgttgatgagaaaagtcggtgttacaaaaaaaccggaagatgtcagattaaactgttcgatcagagagatccaaaaatgtttctcattatcttccataggacataaataaatagataggtttattttatctttggagcggtctgctacaaaagtaccttttccttgctgccgtataatatatccttcagattccagacatttcagggcttgtgtaatagtgcttttacttacatttaaagtacgcattaattcattatcggaagggatgagatcgccgggacgataatatccgctttcgattttctggacaaattcattttttataagcatgtattttggtgttctggtgttcataaaatcccccatattttgaaaagtgattgacaatatatttttgttatgctaatatcatagcataagttattcgaacaaacaagattaaataaaaaaactctctgcaaaagcagagagttaaaaaataaaacaagttattcgaacaaccgaacaactaaaaggaggagaagatgaaaaagacattttcaaaagagaaattatttgacagaacaccgcgggtctttaagcgggatgcaacggaagttcgttttctgttgggcggaatcggaacaggtaatttttctgtaaattcaagaggaaagttcctggactgggaaatttttaactggccttccaagaatacgaaatttcccctttccttttttgcaattcgtacggaaaacaaagaactggaaaaacctatatcgaaaattctggaatcgagaatggttccgccatataccagctcacacggatatcttcaggctgaattagtaaatctgccaagaatggaagattcggaactgatttgtgaatatccttttgcaagggtgaatttcaaagattccgaattgcccgtaaaagtgtcaatggaagcatatacaccgtttattcctttaaatacagatgattccagtattccctgcgcaattatccgatacacggtgaaaaatattgcagactgtccgaccaaagtaagcctggtaggtacgcttcccaatgcatccgggtttgagggatatgatgttattgaaaacctgaagctggctgacagcgtgaaaaatgaatatcgggaatttgatgatgtgaagggcttgtattattcacccgaacatttgaaagaggatcatttacggtatggaaatatggcgattctgaccagtggatccaatgtaacctataaaacacagtggtttgacggcgaatgggtggatggaatacaggatttctgggatgactttaccagtgatggacttttggaaaaagagaccgtatctgacagtgtgggatgtgaatttgcacaatttcataatttcagtttcctgaaaagaagagaaaagatcggatccatcggagcctgggaagaacttcagccgggagaagaaagaaccttcgaatttaccattacatggtatttccctaacagggtaaaggcatggatcgaatttgatgaggactacgagaaattccagcgcggtgaatacggaacagtaagaaattactatgcaacaaaattcacagatgcatgggatgtagcaaaatatgtataccataataaggaacgactggaatcagacagcagaaaatttgccgatgcgatgttccataagactacattaccttattatgtgattgatgctctgactgcaaacattacgaatcttcgaagtaatttatgtttccggctggaagacggaacctttgccggatttgaaggaatacgtgactacataggctgcggttacggtagtgtgcctcatgtatggaattatgcacagacggttgcttttctgttcccggatcttgaaaaaactatgcgtaatgtagaatttttgagagaaacagatgagacaggatgcatgtctacacgaatgttttccgtatttgatcaggaacggtatgcaatggttccggcctgtgatggagaacttggaagtgttgttcgtgtctaccgggatttcaagaatcttggggatgtggaatttttgaagaccatttggcccaaagtagtgttggcaatggaatatgccctgaaacaatgggatctggatggagatgatgtactggatggtcagcagaatacaacctatgatattgaattctacggaccgaatcccatgacggacagtattttcctggcagcattgaaatgctgtgaagagatggctgagatcgtaggagacgaagaacatcaccagctatacgcagatgcttatgaaaaaggagctgcaagagccgaccaactgatgtttgacggggaatattatattcaggtacagaaggagattgataaatataaatatcaattcggaaaaggctgcctgtcagatcagcttctcggacagttcctggcatatatggccggaatcggggaaattttaccgaaagagcatgtaaaatctgctatggaatccgtattcaagtataattacaaaacggatttttatcatacagacagtgtgcacagagcatatgcgatcaatgaagagcatggaatggtagtagctacctggccgaaaggcggcaggcctaaattcccgttatcctatgccggagaggtgtggacaggagtagagtatgaagtagccgttaatctgatttattcaggttgtgtagaggaaggtctgacggtggtaaagtcaattcgggatcgttatgacggatacaagaggaatccgttcagcgagatcgagtccggtcatcattattgcagagcaatggcaagctggggagtgctgaatgcattattgggactgcaaagcgatatgtatcgcggaaccttgtcattccatcctgcaatagaaggtgaaatgtccagcttcttcatctgtggaaaagcatggggtatctacagtcagaaggaagagaatgggaaaatgtgcaaacatattgacatcctatatgggacgttagatgatattcatgtacaagaataaggagggtacaattatgatgaaaaagtattggagaaaaatgatggcactgacttgtgcggccgctatgctgtttacaatggcaggatgcggaaatgcagaaggaactacagacggcgcagagacggcgcagagctctacgaccgcagatggttccggacagattacgatcaggtttgcagagcatgttgcggatattcaggcacaggagccgcatctgcagaagattatcgctgcctttgaagaaagccatccggggattaaaattgatattacgggcaaagaagtgtccgagcataatacacagatgactttactggcaggagaaaataagcttccggatgtattttggctggagcaggcaaccgcaaaggagtttgcacagaatgggtatttatatgatctgacggatgcattggatcagtatggtatcaatgacagccttcttcccggactggtgcatgcatgtaccgttgatggcaaagatgtgggaatgcccagtgaagttatgatggtaggattttattataacaaagatctcttccagcaggcaggaatcgaagaagtgcctgttacctatgaagagttcctggatgcggtagataagctgaatgcagccggaatcacaccgctgaccgtgggggcgcaggataattacagtatctgggcatttgagacaatgctggcaagatatggattctttgaaaagcttgacggtctgaaggatggaagcatttcctggaataacgaagactttattcactattttgaaaaagtagaagaaatgcgtgaaaaaggaacttttacaaaggacatttccaatattggatattttgaagcaaaagagcagttcctgggtggaaatgcagcaatgttcaattccggagcatgggatatcggtgattttgagggaagtgatatggcttctaaaatcggatttttctggggacctaccttttccgacagccagtatgagcagcagatcggaatcaaggcatccggcggtgtttatgtagtatcttcaaaggcagcagaagatcctgtattgttagatgcaattatgcagttctggcagttctattacggcgaagagggaaccaggatcattgccgaggataccgcggcattaccatgctctacatataatggacagattgatgagagccaacatcctgtactttccacgatgatcacagcattaaatgatgattggaaagcagtaacggagccgtttaattcactttcgtccaatgtggcatatggatattttgatgctacctttggtgttatgaccggcgtttacacaccggaagaagcagctgattatgtagaaaatttacagagtgccgaaagataaaatcaaaagagcggtatgaaattaagtaataccgctcttttctatagaatggaaagggagaaagctatgtattggttgagtacaaagaaagcaaaaatcattatgctgcttccgactcttatgatttatgcagtatttattattgttcctgtgtttatcgcatgttactatagctttacggattacagtggtcttggaaaagcatcctttgtgggaataaaaaactatgttgctatgttccatgataagctatttctgatcgcattgaaaaatacatttttagtattgttattcagtgtgatattcctgatcgttggatcttttatggcagcattattgatgaacaagaattttcacggaaacgcattttttaaaatggtgatttttgctccctatgtaatagcacctattatcataggaattatctggggatatatcctgaatcctaattatgggctggtaaatagtgtattgcgtaaaataggactggatatgcttgctattgaatggatcggtggaactaaatggtctccattgtcattggcgatcgtattcacatggcaggtactgggtttccatggaactatttttttatccggaatcaaagcaataccgggagatatttacgaagcctgtgatattgatggagccaatttgttacaacgcttgttttatgtgacaattcctatgctgaaagagacctttattattaatattgttctggtggtaacaggcgtatttaaaatatatgaactggtatatcagatgacaggcggaggacctactcatcagtcggagctgcttacctcatatatgtattttacagtatttacatccagaaggtatggatatggaatggcaattgcggttgcaattctgttactttcaattctgggctcgttttcctatattaagatcacaacgaggaagcaaaggagttaaacatgagaaacaagagaatatcgataaaaaaagtcattttttacatatgtctgctgggattgattattcttttggtcatgcccatactgtgggctatgttgctttcattaaagacaaataatgagattgtcaacagtccgctttctttgccgcagacaataaactttgaaaattatcagcgtgcgatcgatactattgatttttccaaaatgtattttaacacgattttactagtagtaatatctacttttttcagtattttatttacttttatgagttcgtttgcaattgccagaatggtttttcggaaccataaggcatcggaaacattgtattttttcctgctgatcgggattggcatccctatttatgtactactgtttccggtatatcggattgattcattgatgggaattcttggaacccgtttgggactgatcctgccgtatgttgcagtgaacatctcgttcaataccttgctgtttaccggatttttgagagatatccccggagaattggaagaagcagcaattatcgacggctgcaatctatttaagctgtgtaccaaagtggtgattccggttatgaaacccacgttcgtgacgatcattatttttaatgcagtttatatttacaatgagttcccgtttgcatcaacctttattcaggataatgccttaaacaccgtgtcattagtgacatctatgtttaaagggcaatattccatggattacagtgggatcattgcagcgagtctgatgatcatgcttcctgaattggtattttatgtcattttgcagaagtatattataagtggtatgactgcaggagcagtgaaaggataagaaaatgagagatatcgtaaggccatccctacattttacaccacagaaaggctggatcaatgatcctaatggcttggtgttttttaaaggacaatatcatttattttatcagtataatccgtaccatgataactgggacagtatgcactgggggcatgcggtaagccgggacctgatacactgggaagaactggaaccggcactggtccccgacatgccctatgataacgataaaaacggcggatgtttttccggatcggttgttgtacatgatgatcagctatttttattttatacaggaagaacggaagatgaaaccggtatttttgagacgcaaaatctggcagtgtcgaaggatgggatacatttcgtaaaggcagaagaaaacccgctgataaaagaagtcccggaaaagggaggaagagattttcgagatcccaaggtgttttttgcacaagggaaatggagaatgatctgtggaggatccaccggaagaattgaacatccggacagctgcggaagaatttatctgttctcttctaccgatctgtaccattgggcgtatagcggaattttgtacgaagcagagcccggtgagggcagaatgtttgaatgtccggatgccttctgccttgatgatgtctggtttttgacaacttcgccgatgtatgaaaaagacagtgtaacgacgctgtatctgtccggacaggtggattttgacaaatgtgaattccataaagagataagcggaactttggatcttggaactcattattatgcagcacagacatatccggtattgcatggggaaatacggtctgttgcctggctgggcggctggctgtggatgccctggatccgggatttcggtccggaggaggggtatcgtggaatactggatgtatcacgagtgtggtatttagatgataacaggcgcttgtgcgcaaaagtggctgataaagtgaaagctgagatgaagctcttcagcagaacattggaaaaacattggaccggtgaaaacataccaccgcaaagtgagccggttatggtagaactgaagggaaagctgccgggagatggagagttgttgtgtattgatctatatgatacagatagacatacagtgacaatatgctttgattcttcaaataaagaaatgaccgtgaattataaccgggcagacagagcttccagatatggtatacggactgtgccctgtgaaatgatggaaaaagaaacagatattgatatcctcatagacggaaatacatttacattattgtgggagcatggtttatatcgctatacaggaaaattatacccacaaggaaatataggcgtagatataaaatataggacaaaacggcattatgatattacctctctgggagagatattgattgattttaccgggaaaaaagagagtgaaagacaaacattgtcttatacacaaaatccgggaggtgcacctgctaatgttgtggttgcggcacaacggctgggtgcccaaacagcatttatcggaaaaataggagaagacttcttgggtgatttcttaaaggaaaccttggataaatgcggtgtttcaaccgaaggattaataagtgatgcagactattttacaacacttgcttttgttaaactggcagataacggagaacgaaattttgcgtttgccagaaaacccggagcagatatcggtctgaaggctgaggaaatacggaaagatatcatctgccaaagccgtattcttcatgtaggctctttgtcgttaacagatgaactatccagaaatgcagagtttattgcattaaaagctgcgaaaaataatggaacgattatttcttatgatccgaattacagagccagtttatgggattcacaggaagaagcctgtaaatggatgagaagtattttagaatatgcagatatcgttaaagtatcagaagaagagattgagctattaacaggttatacggatgttcggaaagcagcagagagcataacagagtatggcgcaaaaatagtactcattactttaggcgaaaaaggatcgtttgtatatctgcaggatcagcaggaagcatatgtttcaggttattccagcaaagttgtggataccaccggtgccggagattcttttatgggaggctttttatataagatttgtgaatccggtaagcgtatagaagaatattctttacaggaaatgatagaatgtgtccgctttggaaatgcggtggcttccctatgtgttgagagagaaggagcaatacctgcgatgcctgtaatggaagaagtaattaagaggatcaatagctaacataatccgatcaatggacagtaagaaggagcaactctgcagtaccgggagatgctcctttttgatataatttattgtccaggatatgcttgcttttcacataaatcattgtcataataggtgtgttataaagagattggagagatatagaaatgttattggatgttttaggattattgtcagcctgttcgtatgctttggactgtgtggaggcagagctggtacatgtgtctgacaaacatgcgaagcgtgtggcatacatgagtgtctgcatggcagagcagctggggatcaacggtgagagcctgcaggatctggcagcatgtgccctgcttcatgataatgcactgacacagtatattcaggaagaattacataaggatgttgcaaatgttccgcaagcttcacaggtaggaattcactgtaccctgggtgaaaaaaatatacagagacttcccttccatacggatgtgaagaatgtaattctgtatcaccatgaaaatgccaatgggagtggaccgtttggaaaaacatgggaagaggttccacttttttcccgcatcattcatttaagcgatctgctggaccgggcatacggtgcaaagggatttacggaggatactttcaataaagcttgtggatatcttcacaaaaatgaaggaaccgttgtggacaaggaatgtgtggatgctttcttacaggcgtttcccctgccgcattttctgacactgggagaggatagctttgagaaaaagctgtgggagaaaatcccccgcatcaaacaggagctaagctttgcgcagatcgaggagctggcaagcttttttgcacagatcgtcgattacaaatctccattcaccagcacccattccatcggtgtagcagaggatgcggaacggttgagccgctatatgggatttgatgaagaaaccgtggagaaaatgtaccttgcgggcgctttgcacgatatcggaaaagtagcggtaggaaatgagatactggagaaaccgggaagactcacggaagatgaatttgccgtgatgaagcatcacgcggcatatacctattatattctgtctgacattgatgattttgacgagatccgtgactgggcggcatttcaccacgaacggctggacggaaccggttatccatttggcaagactgccgcagagctgaacacacaggagcgcatgatggcatgcatagatatctatcaggcactgaccgaaagccgtccctacaagaagggtatgccccatgaaaaagcctgcgagatcctgtgggatatggcgaagaagggctggctggatgaagcgattgtgaagcaggtcgaggattgcttccggggataaaagatgtgagggcgattattgcaggattaatatgatgcagatatagggaaggtataaagatatggatagctttatagaagctttatatggacgatcggaagaaactattccggaggaatatgattggtttgcaccattgctgggtgattgggaatttgattataaagataaatttatagatggtgatcgtagtaggccgcagcgccagttaaaaggagagtggatcttcagacgggtattgaacgggataggtattgaagatatgttcatatgtccttccagagcgacgagggagacttctccacagccggatggtgagtatggtgtcggacttagaatatataattcaaagacccattgctatgatatggtatatgcatgcaagagtaaatttacaaatttgtgttttaccatggaaaatggaatattgacgggaactgttctggaaaatcccaatcgaaaatggcgatttgtggaaagaaatgaaaatacatttcattggcagaatattatcatccaggagaatggtgacattactgtaaattgtgaggttttcgggaaaagaaaaagcgaggaagcgtaaaacatgaacgttatagacattatgaagcgccctgcggcctatgccagtggctatgaaaatatcccgggagaggaacagaaccgggcaaaacagctttgctgggaatataaccggacagctccgaaggaacagcagaagcggcgggaaatcttacaggagcttttgggaacctgtcatccgatgacaggcattgaaccagattttcactgcgattacggatttaatattcatacccacgggcttacagtcatcaattataactgtgtcattctggatacctcacccgtcaatatcggtgcgggtgcatttatcgcgcccggcgtctgtctggcctgctccggacatgcggttgacccgggacagcgcagtcagggaatcggtacttctgcacccatcacgctggaagaaaatgtatggatcggaacaaatgccacggtctgcggtggtgtaaccatcggcgcgggttctgtgatcggcgccggaagtgtggttacccatgatattccggcgggagtgattgcagcaggcgttccctgccgggtgatccgtcccattacggagaaagataagatccggccggaggacattcttttctaaaaaagatgacgatagccccactcttgtgttactatggtggaaaataatacaaaggagtggggagaatatgtttacaaaaaggagttgggaatccttttattccggtcttattatggtgggactggtatttatggtgttcccggttatttatttctgcggtgcgacaaaggagaagcagatcctgccgccgcttatcatgtttctgctgggtctggtgatctttgtgattagtgttcacttttctgtcaaataccacaaggagaaaacgaaatacaccaagtataagatcgacaagtctctgacctacacattcaccttaacttacggggataaggtggagaccgtcacggatttttcccagatcgaatatgccatcaagtggctggcgaaataccggacgggccatgtggagatcacagtcacgcctactatgggaagcctgaaaaagttctacatctgctacaccgacaaagatccgtacattcacatgctgatcgagcaggagagagaagacggcgtgggatattgggaagaacggggagattcttacaagattcccattatgacactcgagcggctctatgtgaaacataagatgatttcgtttgattacctgaaccgcagggagactggtgtggatgcaagggagggactgctcttatgatgcagcgctggcgggaaaaattaaaatacatagaggctggtctgatcgttacctcacttatcatgtttgtagtatccttatttgtggattatgaaaataccggattagaggctgcgatacttatcatcggaacggcggtaatttctgttatagcagagaaaatcaataaaaaagaaatcgagaaaatgaaatgccaggaagaggaagaactgaaagatattgtctgagaataaatcctgtttcccaaaggaagaatgattgacacggaggttagcgagtgctaaccttaggaagagattttgaaaactttgggagtgacaatatatggatctggcattctggctggcgattgcagcagcgatcctgtgcgttgctgtcgccatttacggtgaaagtaaaaaggataaaaaatagggaaaagaatgacacttcagcaattaaagtatgtaataacggtagcagagaccggcaccatcacggaagcagccaacaggctatatgtttcacagcctagtttaaccaacgcgatccacgagttggaaaaggaaatgaatattgttattttcaaccggaccaacaaggggatcacgctttccaaagagggagatgactttttgggatatgcgagacaggtgctggagcaggcggcgatccttgaggataaatacaagggaaatcccgggggcaaaaaacagttctgcgtatccacccagcattattcctttgccgtcaacgcattcgtggacctgatcaaacagtacgggcaggaagaatacgatttcagcctgcgggagacacagacctatgagatcatagaagatgtggcgcgtctgcgcagcgagatcggaatcctgtttttgaatgatttcaatgaagcggtactcagcaagctgttgaaatcccatgatctggaattccaccagttgtttgttgccagtccccatgtatttatcagcagaaaacatccgctggcgggtaacagcataattacgaacgaagaactggaagaatacccgtacctgtcttttgaacagggagagcacaattccttttatttttcagaggaaatcttctctgattttgaacgcaggaaaaatatccgtgtgcgggatagagcgacactgttcaatctgctgatcggcctgaacggttacaccgtgtgcagcggcgtgatcgataaaaaattaaacggaaaagatattatcgccgtgccactggcagatgagagtgacatgcggatcggttatatcacacacagaaaaggaatgctcagcagactgggtactacctacctggaagcactgcagaagtatttaggatgaatgggttgcccatagctttaaactatggacaacccttatttttacgtattttgcggatttcatcatttctcttataatgaggacaattcaaaaaacgacaaagaaatggagagaatgacaatgagcaatttacagacaccttttcgctatgatttcgtaggaagttttttaagaccggagaagttgaagaaagcaagaagacagttcaatgaaggaaagatcgatgctgcggcactgaagaaagtggaagatgaagccatcacagagcttgtgagcaagatcaaagagctgggctatcatgtgatcacagacggtgaattccgcagagccacctggcatctggatttcatgtggggattcgacggcatcggccatacccctaccaagacgggacttccgttccacggcgaggcggccatggtggatgatacctatattgtaggcaagatcggactgaccggggagcatccttttgtagatcatttccggtttgtaaaagcattagaggatgaaaataccgtagcaaagcagaccataccttctcccgcccagtttctggcacagtttaccatgccctttaaccgaggctgcacagagaagcattatccgaatgagcaggaactggtaaatgacatcgtggcggcctacggaaaagtgatcgatgatctctatgcggcaggatgccggaacttacagctggatgactgcacctggggcatgttcgcagacaagatcggtcataccctatacggaaccaccagagagggaattgtggagttccagaaagcccacaaggatattaacgataaggtgatcgccaatgcaccgaaggatatgatcatcaacacccatgtatgccgcggtaatttccattccacctacgcaagcgagggtgcctatgattccgtagcggatatcctgttcggcgaagagaatgtgaatgcctatttcctggagtttgatgatgagagatccggcggtttcgcacctttggccaaggtatccggggagaaaaaggtcgttctgggactgatcactaccaagtctcccgtactggaggacaaacagcttgtcattgacagaatccatgatgcggcaaaatacattccactggaaagattatacttaagcccccagtgcggatttgcttcctgcgagatcggcaacaagctgaccgaagaagagcagtgggcgaaactccggctggtgaaagaagtagcagagaaagtctggggaaaataaagaaaaacagacaggggcatgtaatatgtccctgtttgcttgaagtaaaaatcagtgtaaacacattgtttggagcggtagtatgtatttggtttattctgaacgaagcactttttatattggaaaatattaatagaatgggtgttaaaattcctgcatttttgcacaaagtgattttgatttgcagaaaaaagtagatgataatattttaaagtaagcactattaagaatagtcttatattggtgtaaaatggggatgattactaacttaaaatgggtataaacagagttgattaaggaagtatacccatgaatgaaacgtatgatgattttttgtatagattaagagaacaaagaaagcaattaggattatcgcaagagcaaatggcacaaagagttcataaaacacaaagtaactatagcaaagtagaacttggattgcagagattaagttacgaagaactaaaatatttgtcagagtcaggtatagatatttattatatatttactggttttcgcggaagcggaaagtatacagattttttagaggaaaaaacgtattcggaaatatgtagttatttaggaattatttattctgttttatccttaaatgataataatagagaaaaaatttctaaagcatcagatgaaatgatgtatattccattaattataccaaagaaaaaagtataaatgcttttctgacattacatcggttatctggatatcaacaaaaggttatggcagataaaataggggtagatgtcaaaaaattaagggagttggaaaaagatcgttgccttccagacagtgaaatattgtggaaaacataccacgaatttggaatttcgcctatgtatatattaaaagataaagagggaacaattcgtgaagtagacgctcttctagaaatatcagaaggggaatgtacggaaaagttactaacaattgtgagttctttagcagagggcaataaagaatgaaaaaaatacttattgtagaggacagcgtgcagattctagcgcagcttagctacattgctcgagaaataaatagctctaataagatatatgcattcgagaaattagaggaagcatatcggtgtgcgttggaaaatgacattgatttgtttgttgtagatattattttagaaaaagaaaagcccggagacatatctgggcttcagtatgttgaaaatattaggaaaatagaccggtataaatttattccggttatttttgtgacatcgttagaggatgctaaattacatacatatacaacaaaatcatatgatgagttggtatttgcacaaagggagtattatggaaaaattaaagaagaaaacaaatatgtgaagcttttatatttgggagatagtattgtggcgggatatttatatgaaaagttttgtgatgtggaaagaaaaaatgggcatgtagaatatgatattagagggcaattttctattagtgaagttccagactatcatttgatggaaatattgggaatattaattgataattctgtggaggcccaggatgaaagaccacagctaaaatttttctttgaagaaagagataatacacttatatttaaaatcttgaatccttatccgtacataaaatatgaagagatgaatacatggtttgatttggaacacagcagtaaaggtgcaaaacacggattggggttatactatgtgaaacaaatatgccagaaatatagagccaatatcatctgcagaaatgttgagtgccaaggtaaaaattggatagagatgaacttagaaattgagaaagcgaataggtaacagcgacctattcgctttctgttttacagagaagtctcatcaatagagggatacgggtattctccaaatagaacaatgctgggaagggaagtatcccaaatccatgagagtgcagcaattgagcataacaagttatatatcatttatacgacctcctttcgcaagtattttcgccgcaagtagttgaagcgaatgtaatataatcatccagctaccggctaccatataccggttttgagggattatatataaaatcaatgaaaacagaaagataatagaacaagttacatttcgacagaaatataactgcttctttggaaaattaatacgatatttagaaagaacgggcccaataaggtaacatatgcagaaacatatggataaaagaaaaatctgcatgtaaagaggtaatgtaatattaggaaaaataaaaacaagactgctcatatataatacagaagcaagtaggcaactccaataagaatagaaatggaaacctccggaaaaacttcttaaaaggcacataacgattaactgaaatagaaataataatatttcattttgaaacaatattcccattataagcattttacttaattcagatcccacacttttaaatacgaacacaatttgttctacttgataattactcatattatatttctgttttatgtttgttttgaaatttttcactcttggtctcctgtcatacatgtaatcagaatactgatttagatggacatttacgaatatttggcctgaataagatatattttacttaaacatagtaaaacttgatttttgaggtgaaaaatgggatttagatgaagaaaatccccaattgagttaaaagaagtgtattgcctagtgggatatgtataataaatatctattacaaaagaaaaaatatgatgggagccaagacaaatggaaagggaaaaaataggatacaggataagagaattacgagaaatgcataactatacccgggaggaaatagccgaaatggtagaaatatctccaaagtttctgtatgaaatagaatctggaaaaaagggattttcttcagaaatattatgtaaaattgcaaggaaatttactgtaagttgtgattatattatgtatggtgaagaacaaagtttaaaaattagtgaaaaaatgtattgcatattgaaacaagtggaaactaaacagataatcaaaatacagtctattttaaaattattgattgaaatatgtgatgcaatataatatgaaaaataaatgagacattttatgcatttgaaatttggcagtattttattatgcgaataatgtatcgacggagatgctatgcgtttttacaagtgctaattttctaaagtgtgggaggatattttaggtgttcttattatacaagaaacatacatgactagtctgctacatgcatcactgtcatagcaatgctagtatatatagaggatgcaggaaaaaaagcaagcaaagatgtttgaaaaagttggcaattagcgagtaactgggaagaatttgacaaaactaagtggggaagtagattatgaaaaaacgatttgagtaagtacatagcaggggatggcttattcattcttgaattatatgtaatattagtaggaactatagatccttttaaataaagaatgaaaacaatataatttatatgtaactaatgtttataaagaagtaaaaaaggaggaagtacatgaaacgaattattttattagtggtaacagctataatgatattgaattgtagcatgtctgtgtgtgcagaagagaacatcacagaagaaagtgtagtacaaaattatgaaatgaagactagagctgttgcaacggacataaaaactattacgttagaacaagtgggacggccgacaattccagaaacaccatttaaagaagatttagtaaaggatgcagaggtgatttaccggataagatataaagttactgctaagactgttaacaatcaggtagtaacgaatagagttattgaaagtattacttatacagggccggtgaaagggtcaaaaattaccaatataaatagtcagggaatcggatatatcgacattgacgtaagaggggcgcataatattactctatattgtcgcttgaaatcatcaggtgttaaatcaaatacagtaagtttaagtgtgccaatacaagcaaaatatgataaagctttttattgtactggatattatacatcgctggaaagcgattggagtggggagaaagttgcagtggacagcttgggcaatgatgcttataaaaaagcttttttagaagatacaaagatgaatggatcgggcaaggctgagaatggcaaatatcttcattatgatagtacaaagaagacgtttagttatgttaatccagttacagttactggaacaactccaacagcggggagaacaattgctgttgattcctattatgttccgagaaaaccaataaatggagtatggaagagagcaacggtatcaattgcgaatattggtacaaggactgctgaagatggaggtggagccataaatggatatcatatagatgtatatttaggactaggaaatgcatcaaagctaggttggacaagcacaaatcgtgttgttacattattgtcaataaaataggaagcaatataaattgattgcggcatctatcatgatgccgtaattaatttatatttaaaaagtagacataattttaattaatgtttaaaattaatatatatttaagggttaaggagaacacataatgaaggaaaaatttcgaatgagaatttttaaagcaatggtattgctaatatgtacagtagccccattgctgttagtgggatgtggtggaaataacaaagaggatgaagctacaataaaagattggaagaaagaaactaatatcatttatgatttaaatgcaggagaacttaatcggattaaagcaaatgatggtaatgtggtattttctattgttgataataatacggaatatttttattacacatcctgtgaattagagtaccaaccatttgaattgcttcaggtagatatgaccaatgtggatatattggattattgtgttgatactaatggggaaatattttacttggaattggaagcacaggagggccaagaaaaaatatttttaaaaaaaattggactggatgggaatacccagatattggattgtctaaacgattttcatagaggtgaaaaagatgattgctaccaatggagagtgattttgaagccggatggacatctattggtatattccttttacggagcaattttatttgattctataggaaacagggagtgcgaggagaactgggagaaaaaagaaacgtttgagttgacatatgtggacagtgatactgtatttgtaaaggggaatgataattatgaactttctttttatacaattaatttgaaaacaaaagagaaagtaaagtgtgttaatatgccagagctaatgaacaattttattctcaaatgcgaagatgatggtatctgcgtttgtacgacatccggtttatattgttataacattaataaacagagtggaaagtacatgattcagtggtcagactatggagtaattggggataatatttgctatctttataaagaaaacgatagaattcattgtgttttatatgaagagaatgtattgtcggatattgcatttgaagaggatgcgtctgaaaaaattcaaacggagattgtgttgggctgcatagaagaaacaacacaattacatgaagcagtagctaattttaataatagaaatgatgaaataacaattgtaatacataattattataaagaagacaaaacggaggcgattaatcgcctatataatgatgtcctgataggaaagggaccggatattatcaatttttcagcagaggatattgacgaaagagaacttggaagaaagggactgttagaaaatcttattccatatttggagaaaagtgatgtgattggaaaagctgatatagttgattcggcatatcaggcgttattgacgaatgatgacttatatatgttaccaacgaactttgtattatatacaattataacgaaagataaatggtgtagtaataaagaaacgtttacattggacgaagcattgaaagctgctcaaaactgtgaagaaaaaggattgatttcacaagatgattttctatggggaggggcaacaagtggaggatattcgtgcgaagcggacgataaaagattggaacaatatatagagattgcaaaaaaattaccgcaacaggagagctatcaacctgatggactattgaggagggaaggagaaattccttttgaacttttgagcatagcaaacgtacaacaatatttgtacgaaaaatctgtatggggcgaggatgcggtgtttacaggatttccagaagcagatggaaatggaatgatatttcatcttattaactgtttgggtattagcaaccaaagcgctcataaagaagaggcgtggaaatttttagaaagttattttactgaggagggtcaaaaaacaattgcaccaaattggaatttttcaatattacaagaaacgttagaacaacaacttgttgacgcctgtaaacaagaatattatcagacaccagatgggaaaacagagaaaattcctattttgacatatgaaattgatggcaaaagtgaaaatgtttatgcagcacaagatggagacataaaagaatttaaggaaataatagataatgtcaaaattgtgcaacgaaaagattcgccaataataggaattgtgcaggcggaagcactatattactttgatgggcaaaaaagtatgaaagaaacaatagatactatgaagaatagaatagaaatatatgaaaaagaaaatagttattaacttgtctttatcaaacaaaacctcagaataaaatgttctgaggttttgttgtttcgcatgctaagagatagctttctaaaatcgaagaaatactataatcgcaataggaaaaggcaaaacaacagcgtatagaaaatcggttgtatcacaaaaaacggtaagctataatataaataggtatggtagagataaggtagtatgtacaatattaatgtaagaaaagaatagaagaaatagagacaacacttactacaggaaacggatataaatatagaaagtggagacgaataaatgcaaaaaacagcttattaccatcttcccggtctgtttgaattctatgaactataccggatatttctgccattattccgggaacaccgggaatatttttacgactggtgcgacattggttccatctacggagcaccgccggactgtatctggggtggcggccgcatctcactggaggatcacgatgcaggagaagtgctgacgttgctacaggaatatggcatttcagcccgtctgaccttcagtaattcccttctttgcgaggaacatctttcggacagaaaatgcaatgaactctgtgttctgttcgcggaaaatgcaactccggagaacggcgcgatcgtccactcggagctgctgttacagtatttgaaaagtcattatccggagctttatccggtatcctccactacgaaagtcctgacggatttggaagcgttaaaaaaggagatcgacagagacgattttcgctatgttgtaccggatttccgcctgaacaaggcttatgagaaattaaatacgctgacagaatcacagaaagacaaagtggagtttttgtgcaatgagtgctgctattttggctgcaaggacaggaaggaatgctacgaagccgtcagtcgcaggaatctgggagaggagtcggattttagctgtacttcgccgggggcggaggagggctatcgtttctccaaagccatgaaaaatccgggatttatcagcgtgggagatattcagaagatctatctgccgatgggattttccaattataagatcgaaggccggggactgggcagtgcactggttctggaatttttactgtactatatgacgaagccggagtaccagctgcaggtcagagaagaaatctatctggataatatgctggatctgttttgactattcataaccgtgattttgtaccggcaacatatgctgctggtgtcatatgatacttctttttgaataactggataaaatggctttcattgcagaagcagagcgtatagctgacggcgttgatcgtcatccctcgggtaagcatacgttttgcttcttccattttttgatccagaatatattggtggaggggaactccagtctcctttttgaaggcctgcgatagataatcccttgatacatgaagacttttggcgatatcttctattttaagacggctgtgaagatggatatgtatcagatgaacacattgattgatcaaaggactgtaacattgaggaatggatttctcctttacttttgtgaccagttcgattgctttttcacataaataatcaatacactcttccatggtctgaagagaatcaatcttctgaatatagaaatcgcttaactgataagcttcactttcatccagtccgcccagaatagcataatgaatcgctacggcaatggtggatactgcccagtagtgtattttccgggaaggattgtcggacatatgcccgatgatcagaccggattgccgatacagattcagggcatttttcactcctgtcaggtcaccgcattttatcgattggaacaataaaatttccgaagcaaagggagtatgtgtttttccggtctcccgcgcttcgtatataaaattcccggaagcatctaaaaattcgtatccaatctgcgcttttttcttagtcattgcgtatcccttctttctataataattttaacataatataacataaaaatgatatagcaaaaagaaaagagatgctaagtttttcttagaggaaatcgaagaaaaggaggtattttatgaggaaaagtctggaagaaatgtgcaggctcgtgacgggttacggagcgtggcatatcggagatattcaggtgtcggacggaccgcacggcgtccgcgcccaggaggatggagcgaagaacaacgacagctatgaagctacctgttttccgacggcgagcagcgtagcgtgctcctggaatccgaatctgatcggacaaatggcggaaagcattgcgcaggaggcaaaggagcttggcgtttccgtggtgttgggacccggaataaatatcaaacgatcccctctctgcggaaggaattttgaatactattcagaggatcctttcctgacaggagaattagcgacggcctatattagtgcaatgcaggagcagggtgtgggcacttcgctgaagcattttgcgggaaataatcaggagactcacagaatgacctccaattccatgattgatgacagagcattgcatgaaatctatctgtcggcatttgagaaagcggtgaaaaaagcaaaaccggcgacagtcatggcaagctataattacataaatggtcttcctgcatgtgaaaattcccacctgctgaccgagattctcagagaaaaatggggttatgagggtctggtaatgagtgactggggagcctgcgtggatctgccggcctgtgtggcggcgggaatggatgtggagatgccggacagctgcggtaaccattatgcgcagattctggaggctatacaatcaggaaaactgccgcaggagactctggaaactgctataaaaagaatagaaagagtaaacacagattatgccgggaatattttgccggaaaaacgcagaaaagaggtcctggcagagaccagagaacgacatcatgatttggcaaaaagaattgaggaggaaagcgctgttcttcttaaaaatgaagagtttctcccattgtcaaaagaaataaaggaaattctgatcataggggatatggcatcaacgccccggatccagggaggcggcagcagccatatccatacagagagagttatttcctttgtggaggcatttgaaaaaagagatataaaagtatgttatgccaaaggatataaaaattctacttttcataggagccacagactggagaaggaagcctgcaaaaaggtagaggatgcgaaaaaaagacagataccggtgctgtttttcggtgggctcacggagatggcagaaggagaaggctatgacagggaaagttatgaactgccgttaaatcagagcattttactggaacagctgctgaaagtaaatgaagacatcggttttgtatctataagtggggccccttacaatatggaattgccatcaaaatgtaaagcgttgttacagatgtaccttggcggagaagcagttgcggaagcctgtgccgggatcgttctgggggacaccagtccctccggcaaactggcagagagcattccttatagggaaacggatgtgccgagctatggatattttggtaggcagggcgagcagaaaaaccatttggatgatgtagaatatcgggaaagtatttttgtgggatatcgatattacgataccttccggattcctgtgcgttactgctttgggtatgggttaagctacacgaattttgcgtatacggatctgaaagtccatcgggatgtaaagcagaattgccggattacttttacagtggaaaataccggagataccgccggatgtgagattgcccaggtatatgtgaagaacccggaaacgggagatttcagggcgagaagggaactgcgaagctttcggaagatacatttgcagcccggagagaaaaaagaagtagagatcatgctggataccggagctttttcggtataccaggattcagaattccgggtgatcggtggggagtacgagattcaggtaggtgcatcgctgcaggatatccggctgtcggaaagtatctgtgtggagggagtgaaactacaatgcccgttgacgatccatacatcgataccgttgtcggaagaagattttgatgctgtctatacctaccagcgtacctgtttttcgcatacgaaaccgggtgagttcacaacgaaaaattcgttgcggcagatgcagccgtattcagccccggcaagaaagtggagccgtataggaatgctggctgcgcgagtgctttatttttccaaaccgttcaatgacccggaagtgaggatgatgtcagaagggattcttgaaggaaatattgacagcgtatgtaatcagagtggcggcatgataaaacacagtacgattcagagaattgtggattccgcgaacaggagggcaaaaaatgagggataagttagatgcaagaacgaaatggagctattgtatcggagcaacgggaagagatgcagcatatgctctggtaagcatgtatctgatcctatatgtgcaatataccatgaatcttacaagtgcgcagtttgccatgatcagcggggcaatgatcctatgtatggtctgggatgcgataaatgatctgctcatgggaattattatagaaaatacgcattttaaaatgggaaaatttaagccgtggatattagctggttcgcttacaaatgcgattgttattgtgtgtttatttactatccgaccgagtgggtggggatttgtcgcattttacagtctcttctaccttctgtggggaatgacttacaccatgaatgacattgcctattggggagtgctgccctccttaagttcagatcccggaacgagagattctctggtaacgattatgagcatttttgtatgtatcggacagttttccgtggcgggagtagttcctgttgtgatcgcaggaaatgcggtgaaagcatacagaatcgtagcggttgtggtagcactctgcctgattgcatttcagatgctgaccgcctttggaatcaaggaaaatgacagagaagaacaaaaagataaactgtcattaaaggacatgtatcttatttttatgagaaatgatcaattggtggcagcgggaattgcttctatcttttttaacattacctgcaatattcttattatttttggcgtgaactttttttatatagaatacggatattcggaaagcggtaatctggtattttattttacggtgatgtatggtctgggaatgctgatctcccaggcgagctatgcgactctggcaaaacattttacgagacagaaaatgcttaatgtgtgttttgcagcattattgattggatatgcctgttttatgggatttggttacgtgcttccgaaaaatgtagttttattgaatgcgataggttttgttatctttttctttcaggggctgatgaatcttgtgattatcgtgatgattaacaatacgatcgaatatgatgaggcgagattccatgaaagacacgattcggtaatatctgcggtgcgttcttttagtgtgaaactggcaggcggaatcaatcaggggttatctacactagtattgatcgtgagcggaatttatgccaagagccgaagcatcagtgccctggagatagaagtgaaccgcggcgagatatccagtgaagcggcactggcagaggcgaatcgctatatcggagaaattacgactgcgcagggaatcctgttccgtgttggaatggtactcattccgctcatagcgctggcgatatcctatatgattatccgaaaaaagtaccatattgatgaagcagagtatgccaaattagtggagaaaaccagaacctaattaataaattgagagttacgagccatgcaaagtcaaaacgaaaacagcgatctgggagcttgctcacaagtcgctgtttttgctttttaactttatactgtgcgtccaacggacacactcgacagccgtcaattcataaatgtggaacgtcctatgcgacacatttatgaattgagtgcatggctcgtaacgtagggctgcccgccccggactcggatgctagctacaactgtgggagcagtccttttctgctgggttatgaaaaacatcccgattatttaagcagagcatttgataatacatgtgcggaagttaaaaacaaggatttagtatgtacaaaaaagtaggaaatacatgcgaataattcaaaagtcataattaggtatgtataacaagtcagaaaatacatgccttaaagcaaaaaatgatgatccggcatgtatgataaccgggaaaacacatgcgcaataggctaaaacggaaaataggtatgtaaatcgctttaggaaacacatgtataaaatttgaaaacaagaattaagtatgtaaatgactttggaggaatatacaaaccagtaacacgagatagacttagagctttttcataggattttcaaaacacagaacgtccacggtggacggaatgtccttccgaagatgtttgccgcggttcattgctcgcgtaatttccactacaatttccccagtttgattttgacatacgtatagtgactatgatacactgaataagaaaaaagtgggacagtctgctttgatgaaataagggacttaggacaagaaaaggttaagggagcgaaataccttggataagagtgaatataaattaagagcggaagaaatcaaagacctgatcagccggggagaatatgcacaggcggctgaaattgccgacacgattgactggcgtcgtgtaaaaagtgtcatgatgttgtgtacgatcagcgacctctataagatcaatcgcagatatgaggatgccagagatatgttgcttttagcatacgagcgtcgtcccggcggaaggaccatctgctattctctgtgcgagctttccattaaaatggaagaatatgtgcaggcaatagaatattataaggaatttgtacaggtggcgcccaaggatccgggaaggtacattttgcagtataaattgtatgaggcgcaggatgtgagtctggaagaacgaattgctgttctggaggaactcaagaagagagactatagggaaaaatgggcatatgaactggcctatttgtatcatagagtcggactggcagccagatgcgtagaggaatgtgatgaactgatcctctggtttggtgagggaaaatacgttattaaggcaatggaactgaaaatgctccatcagccgttgacaccggagcagcaggaaaaatacgatcatcggttcgacgcgcccggaagctatatcccgtcgcagaactctgtgcaggataacgagtatagcgggaatgaaagttatgagcaaggttacgccaaggacggaagctatgatcaagagcagggttatgcacaggacggcagttatgaccagggtcagggttatgcgcaggacggcagctatgaccagagccagggttatgcacaggacggtagctatgatcaggatcagagttatgcacaggatagcagctatgatcagaaccagagctacgtacaggattccggttatgatcaggtgaccggagatacacagatatatgatcaggtgcaacccgcacaacaggagacaccgacacagccggtacaggatgatttcgatattcatgtgaagaccatggatgtggggcagtataataccatcaatctgcaggcagaacttgcagcgggacttcgtgaagtcctcggtgaggagccaaaaggagatactgcaaaagcgacatcggactccattacccgttctatcgtagcacctatgatggattccgatacagaatctctggattatccggagattgcagaggtcagtgaggatgatctggagccggagaccgagcagatcgaaggttccgaggtattctttggtgagaccggagagatcggtgacctgtctcaggttccggaggtagagaccgaggaaatcctgccggaggaacccgcatctcttaagaaacaggatgttgtgccggaattatcgaaagcagaagtggagccggaagcgactacaccggtggaacctcccaaggagctggcgaatgtgctggcacaggaatccgacggacagatcagcctggtaatgcccgaggcggaaagcattgagaagcagattaccggtcagatcaatattgaagacattctggcagagtgggagcgtaaaaagaaagaaaacctcgaaaagagagaagaagaagtccgccagcatgtactacagcagaccggtgccatgttcacggaatttgaacaggcggtaagagatggcctgttagaaaaactggaaaaagaaaaagcggcggatgctgatacggttacggatacagatgaagttgaagagctggaagagattgcggatgtaaacgatgaaacagaaaaagctcctgcggaagtttctgaagaagagccagaaccagaacctgctgatacggatatcgttgacactgaagaggtagaagaacttgaagaggaacctgccgtagcggaatatgaagaagaatccgcaacagaggaaccggaagctgtcgtcgatatggaagtgacgcaggagccggctgcagaaatcccagaagtgccggaggaaaccacagcagagatcgaagaagcatcggaagaaaccacagcagagaccgaggaagcatcggaggaatccgtagcagaggctgaagaggagccggaagaagcggtagaagaagtccatgaggatgagcagccacagaccccggagcctcccgtagtggagagagacaaggcaaaagtccgtgcgcttaccagagaagagcgcgagctgtatgctccctttattcagagtaagtccgcaagagaacagttagtcaaagccattgataatatcagcctggctgcctataccggcaatgtgatcatcaccggtgaagaaggcatggataccttatctcttgcgaaaaatatgatccgggagattcaggctaccgacagcaatttctccggaaaagttgccaaaatctccggccatgcgctgaacaaaaaagatgcagccgagaccctgaacagactgcagaacggtgcacttatcatctgtaaggcatcggaaatgaatagtaaaacagtggacacgatgtataaagcgctgcagcaggagaatcagggtattgtcattatattggaagataccaggaaagagatagatcgttttctggaaaagtatgagaaattgcaggaaagcttcacttcccgcatggatgtcgaagcactcagcaatgatacactggtagcgttcggaaggcagtatgcacgggagagggaatattccatcgatgaactgggtgttctggcactgcataccagaatcgaggatatgcagacgatagatcatgtagttaccgtggtggatgtaaaagaaatcgtggatgaagcaatcgctcatgcgaataaaaagacattaaaacatttctttgatgttctgtttgccaagagatatgacgatgaggatatgatcatcctcactgagaaagattttgtataactattcagagccatgtaaacattgacgaatgggcgtcgaatgcttgcattcgtaagaacatttatcaatgtttatagggcgaagtaaccacatgagcaaaaggaaagcattgaaaatgcgattttgcgaatggggttctgaatagttaaaaatatatagcgggaggcgcagctatgacgaaggagaaggtatttatttccgaagcagatcagtatctttttgcccagggaacgcactatgatatttataaaaaactgggtgcgcatctgtcgacggaagatggtgtgcagggagtctatttcggggtatgggcaccaaatgcagcacaggtgaatgtcatcggaacattcaatgaatggaacgaggaatcgcatcccatgcagaagctgggagagggcggtatctgggggctgttcgttcccggcgtggaagaaggaacaatgtataagttcctgatctatgcgagggatggcagaaagctgtacaaagccgatccttttgccaattatgcggaataccgaccgggcacagcgtccatcgttacggatatcacgggattcgactggaaggattccaagtggatggaagcccgggataaaaaagatatgaacaaggaacccatggcaatctatgagtgccatatcggttctttcatgaagcatcccaataacggcactgcggaaggattttataattatcgtgagttcgccgaccggatcgtggaatatctgaaagagatgaaatacacccatgtagagcttatgggaatcgcagaacatccgtatgatggctcctggggatatcaggtgaccggatactatgcgcctacttcccgttacggaacgcctaaggattttatgtatctggtcaatgaactgcataaggcaggtgtcggagtcattttggattgggtaccggcacattttgcaaccgatgcacacggacttgcagaatttgatggacagtgcatctttgaacatcccgatccccgtttgggagagcatcctgaatggggaacgaagatatttaattatggcaaaaatgaagtgaagaacttcctggtagccaatgctctgttctggctgagagagttccatgtagacggtatccgtgtagatgcagtagcctccatgctgtatctggattacggtaaaaaagacggacaatggctgccgaataaatttggcggtaataagaacctggaagccattgagttcttccatcatctgaattcagtgatccgcggaacttatccgggatttttgacaattgccgaggaatctaccgcatggcctaatgttaccagtggtatcggggaggaaggcttaggattttccttcaagtggaatatgggctggatgcatgatttctgcgagtatatgaagctggatccgctgtaccggaaaggcgatcattacgccatgacctttgctatgagctataacgacagcgagaattatattctgccattatctcatgatgaagtggtacatctgaagtgctccatggtgaataaaatgcccggatatccggcagataaatatgccaatcttcgtgtggggtatagctacatgttcgggcattccggcaagaaattattatttatgggacaggatttcggacaggagcgagagtggagcgaagagcgtgagcttgactggtatctgttaggtgagaagctgaatcagggcgtacatacttatgtaaaggagctgttaaagctgtatcgtaaataccctgctctgtacgagattgacaataactgggacggctttgaatggatgaacgcggatgatgcggaacacagcacttactcctttgtccggaaatgttccagtggcaagaataatctgctgtttgtacttaacatgaccccgatgaaatgggagaactatactgttcccgtgcctaagaagaaaaaatataagcttctgctgaacagtgatgaggaacggttcggcggctggggcaacgagattcccacagagattatggcggagaaaaagccttatcattataaggattactccatcagctttgatctgccaccctatggcgctgcggtatttctgttctaggtcaggttaagaaatcatataaaacaaccgaaataaaagatgagtgtgaccaaaagtgcactcatcttttttcataactattcagagacatgtaaatatcactaagacctctttgaatgcttgcattcgtaagaggatttaaaggacgacaggcgtgaagataacatttcagaatcagacgatcaatgaaacagacaatagaacagaaagtaaccggacagagaaaaacagctggggcaaagacaagacatggcgcagtaaaaagagcgtaaatgtgaatttcggggcagtatacgagagtgggcaggccgcagtgcccatgtcttctttagaaaaggaagagaacaacaaaggaaaatctctgatggagttacagcaggatgccgggagtgctaatgtggcgctacagcaggactatatgacattgctgtcgcataccatgtcacatgaggactatgcgaaggcctgtgaggacgggtttgatcccagagaattagatcaggatacagcggtcaccattgtggataagatcaaggcagagctggtgcgttctggtcagcagattgcaggatatacggatgatatcgacatggataccctggcagcagcggtcggaagtgatactttagcccgaagcatcgaagaacagttccggtctgcggatcttcctttgacgcaggaaaatataaatgaactgaaaagtgcctgggatatggcagcttccctgagggaaccggaggaaggaactgtcagctacctggtggataatggactggaaccggagatctggaacctctatgtggcagagaacagcggtgccaaagtgcagaataatgacattccgcaggaactgcaggagcagatggacaaggtaattgcggatgcgggattgacggtaaacgatgagaacagacagaaggcacagtggctggtaagtgcaggacttccgctgactacggatacgctgcagcagcttgtggaactggacggtatttcctatcctgtcacggaggaaacttttgcgcgggcagcagcagcgacaattgcagaggggaaatccccgatgtatgcgaacctgggcagacaggatacgatttatgaaaaagcagataaaatgctgcaggactggttctcagatgcaaagtgggacgccacggcagagaatctggcagcaagaaaacaactggaagagattcgccttcgcatgacggcagaagtgaacgtaaagcttttgcagagtgatttttctattgatacagcccccatggagcagctgatcgaagcgctgcgaaaggcggaggcagaggttgccggaaaatattttcccggtgagtctcaggcagtgacgaaatatgagacttatacccaggcagtgaaggtggcttctgaattgccgggattgcctgctggagtactgggaccctatagcttggaacagaatgctgccacagagacagtttctgacttccataaggaaggcgctgcaatgcagaaagcctatgaggaagcgggcgaacgttatgagactctgatgacggcaccgagaagcgacctgggagacagcatccggaaagcattttctaatgtagatgatatcctgacagatatgtcattagaaaaaacatcggaaaatcagcgggctgtccggattctggcatataacagtatggaaattacgcctgaaaatattgagaaggtcaaggaagctgacagacaggtcagtgcagtagtggacagactgacaccgaaaaatgtgttacagatgatccgggatggtgtaaatcctctggagaagacctttgacgaactggaatcctatttttcacagaaccccgaaagctatgaggaagaagtggaggactacagccgtttcctatatcagttggaacggaaaaaggatgttacagaagaggaacgaaaagcgtatattggaatttatcgaatggtgcatcaggtcgagagagaggatggcgcagcggtaggcgcggtagtaaataccggtgcagatttacaattttccactctgctgacggcagccaggagcagaagggcttctcatatggactggaaagtgtcggaggataccgggctgacacaggagattcatttgtccgagaataatatatctgaacagattcggatgggtatggcaaaagaggttctgacagaggtgtcagatgatggcgaaagcagagcagcgtatgaccgggaaggactgcagcagatgcgtgaggcgggaaatacggcaccggaagccgcagaactactgcaaaggggagaagttcccatcagcgcatcgaatcttttgacggcccaggcacttatggatgatccggcggagatgtttggcaatctgcgcagatacagagaaaagtatcggcaggaaaaagaaatgctgcagacagcaggcagcgaagtgcctgccgggacagaaacttccgaactgtgggaacagctggatcagcagaattttgcagaggattatcggaccatgcttcagaatacggcagaagatgtggagaccatgagtctggaacaggcggatgaacatctggatgtaaaacagctgcagctggtacacaagcagctgcgccttgcggagagccttcaggcgaagcaggaatattttctcccgatgtacctgggcgggcagctggcgggagtccatcttaccttacagcagagagccggaactgccggtgctgtggagatccgggtgaatgtcggagatatggagttggaggcacatttacaggtaaagggagacaccatcgatggctatctcgtaggaaatacaccggaagaggttacgaaattagagaagacctccgatatattccttgaacggattcagacagatacttctgcagactggaaagcggaaaagcttcccatcgtcagctcccgggatatgacaaggatggcagccggagagacaaaaaatgcagataccatagagagtcggatcgatacggaacagttgtaccgtctggcaaaaggattcctgcaggctgtcgcagacagcagcggaaagtaaggagtaacacatgagaatcaattacaacgtatcggcaatgttatccaacaatgccttatccacaaatgacgatctgctgtccaaatcattggagagactttcttccggactgaagatcaatcacgccaaggacaaccctgccggattggcaatgtccaagcgtatgaatgctcagatcgagggactgtccgtggccaatcagaatgccagtgacggcgtatctattatagagattgcggacggagccatgacagagatcagtgagatgctgcagcgtatcaatgagctttccgtcaaggctgccaacggcactatgacagatgatgaccgcgcaaccatacaggatgaagtagcgcagctgaaggaagagatcacccgtatctcggataccacggaattcaacggtcagaagctgctgaacggagaatttgatctcaagggatacaccgataagcaggagattaaagtaaattattgctctccggatgtaccggtaaaagaatataccatacagtctatgaaatttaagaaagatgcagagggaaattttgaagtagacggagatattaaattcggagacggatttaaagaagtagaacccttaaagacggatatgaaggataatcttctgacgatcaccggcacgaacggctttgaaatgcgtctggatgtatcggaagcaaaagagggagattcctatgatggcatgaagatcgatgctaccggtatcggagcaatgcgtctgcagatcggagccaacgaaggacaggtactggaggttaatattcccgcggttactctgcagaacatgggaattgaagatattgatgtgaatacgcaggaaggggcaaaggatgctatctcaagagttgatggtgccatcaaatatgtatcctccgtccgcggcagactgggagcatttcagaaccgtctggagtcttccattaacagcctggatgttaccagtgagaacatgactgcggcatattcccgtattatggatgtggatatggcggaggaaatgacctcttacactacctatcagattctggcacaggccgggacctccatgctggcccaggcaaacgagagaccgtcccaggtgttacagctgttgcagtaatggattccgatgaagtgaggattcaaaatgacaaaagaatgtaaacaacaatttaccttgcggatcacacaggccaatgccacacagctggtggtcattctctacgaaatgacattacagtatcttgcagatgctgagcaggcagcagaagatgcgcagtttctggaagcggttcgcaagaccaggggatgtatcaatgaacttttgaattctcttcacagagaatacagtccggcggcagagctttccaggctgtatctgtattgtatccgcagactggcggcgtgcgaagcaaaagccgacagaacggcactgcaggacatccggaaggtaatagcaccgctctgtgatgcttacagacagattcaggatcagaatccgtccggtcctgtgatgaataattcgcagaccgtgtatgcgggactgacttacggaagaaatcagttaaccgaaaacatggctgaccagggctcgaatcggggaatgctggtataaagttttttcctgccgcacaggctgggaagcggcgagttcggtgaggtgctgataccgtttctgcaaagcattaatttcatagatataactgtcgatcagatcactttcgattgcattatcgaaacccgcataggcgatatccagagcctggcgggtttttcttatggattcttttaaatccaacggtgcgagatcttcttcgatcatttcggaatttgtatttacctgactaaaaaagattttcatgtaaaaatccatcctttctgctaacagtataggaagcagaaagggaaaatatacctgcctaacataaaactggaagacatttttgcgaaaaatgggaatagattataacaaacagcggaaagatcgggaggacaacaatggagcatccggagaatctattgtggattattggggcagcagtcctgctctttgccataagttttttgggaaaaaaggcggagtggtttttaaaccttgtattgcggagtgtttttggagtgatctttatgtatttcataaattgggggatagagattctgggatttacagtagcagtgggaatcaatgcagctacagttctgacagtgggtattttgggatttccgggaatcctggtattatacggcctggcagtttatcatatgctttgacagatgaaaatgccgtaaaatcaaggagttgcgggattttggaaggccgtatgagaaaggtgattgttaaaatgtgccaaagattatttttttacggaaaaacacttgtcagacgaaaaaacaacgtctataatccatcttacaaccaatcgcgatggttgtatcaaatatcttataagatctgaaagaattcttttatgggatagagtcatcccacattaccacttgtaaatcgaaggaaaggagagtgagaatgcaacgaacacagtaataaagggtgtattatgttttctattaagtattgcctgcggatatgattacagaagccgcagaatccccaacggcctgatcctgagctgcctgatcgccggagcggcattccgatggtgggaacaggggatttatggaattatggaatatttttgcaatgttttactgacgacagtggcattctatctgtttttttatattggtgccatgggagccggtgacgtgaagctccttggtgtctgcgcaggatatttttccggtgaaaaagttctctgttttctatttttcgcgctgctattcgcagcagtttttgcactttgcaaaatgtacctggcacgtaatctgtgggacagattgtgttatctgggtgaatatgtgtgggatgttgtccgctgtggacgctggaaggcgtattttgcagaggagagagcacatccggcaagtggaatctgtatggccggtcccgttttttgcagtgtgctgttatacataggaggagtttattgatggaacagaaggaagcggttatggttctgttcgaccgtgaagaagagtatgcgagacttctttcggagtttttgaggaggcagaaggaactgccatgggagatccatacatacacaaagatggaggaactgctggaacgggagaaaaatgggaaggtgacaatgctggtagtggcggaatcttcctgcatggatacgctgagtacattggagccggcatgccaggcgattcttaatgaaagcgggacacttcgctttcaccagtttccgaatatcaataagtaccaggaagctgacaaggtgtggaaggaattgctggaattgtatgtggagacggtgggaacacaattgccgtttttgtgtgcagagtataagacaaaatttataggtatctattccccggtacatcgatgtctgcaaagttcttttgcactgacgctgggccaattgttgtcagaaaaacatcccactttgtatctcaattttgaacactatattgggatctcagaactccttccggagagacagagcagagaccttgcagatctgctgtattttctgacaggagatgcgggaaaattttctttacggatgcagacggtcatccagcacaaaggcggtctggattacattcccccgatgcgcaacggtcagaacctgttggaaatcccgccggaagagtggagaaacctcttccaacgggtcgaagaactcggaaaatatgaatatgtcatactggatctgagcgaaagtatacagggattgtttgaggtactgcagatatgcaccaaagtatttacgctgaccaaagaagataaaatgtcacgaatgaaactggatcaatatgagcaattgcttgctttgtgcgaaaaagacacggtaaaaggcaaaacccgtaaacttgctttacccttttttcaaaagcttcccacagaaatggagcaatttaccagaggagaattggcggagtatgtgaggaaagaaatagcaatgctggaaaattagaacagggagagaaaaaatggattacttggaacagagaagaaagcttcgacaaatggtgcaggagagactggattacggaagagactacacggatgaagaggtagaggatacgattgatgaagttctcatggaacaggaaaatctggaattgtgttctgtggaattacggagacgattgcgtaaggaattgtttgattccctgagacggctggatattctgcagatttttgtggatgacagctctgttacggagattatgatcaatggactggatcatatttttgtagagagggacggacagctgcaggaactggatcgggctttcgattccatggaaaagctacaggatgtgattcaacagatcgtggccggatgtaacagagtggtaaatgaggcatcaccaattgttgatgcgcgattaagcaatggcgcccgtgtgaacattgtgatgagtcccattgcattgaatggacccatcattaccataagacgttttccggataaaccgatcaccatgcaaaaactgatcgcgatggaaactatatctccggaagctgcggattttttgaagacactggtaaaggcgggatataacattttcgtcagtggaggaaccggtagcgggaagacgacctttttgaatgtattatccggattcattccgccggaacagcggatcatcaccatcgaagacagcgcggaactgcaacttcagggaattcccaatctggtgcgcctggagacacggaatggcaatgcggaaggatgcagagagatcggaatccgggaacttatccgctcatctctgcggatgcggcccgacaggatcattgtaggcgaagtgagaggcgcggaagctattgatatgctgcaatgcatgaataccgggcatgacggcagtatgtctacggggcatgcaaacagtgcagcagatatgttgtcgagactggagaatatggtactcatgggaatggatctgccgcttccggcgatccgcaaccagatagcatccggcgtggatattattgtgcacctggggagaattcgggataaaagcagaaaggtgttggaaattacagaagtagtgggttgtgagaacggcgaaatccgtctgaatccattgtactgctttgaagaactgggggagagcagcgaaggtaatgtagtcggtaaattacagaaaaagggaggcttgcttcatgaagggaaacttaaagcggccggactttcgtgaattgatgaatcctttgctgcgcacaacagccggaattctctttttttcctggttcttctatcgttcggtgtttgctgtcattctctttattttcccgggaatcctttatttccggaaatgtgtcagaaaacagagggagaaaaaacgatgggaactgaccgtgcagttcaaggaatgtcttcttgcggttgctaattcactcagaaccggatacgccgtggaaaatgctttcttggagagcagagaagatattcgtctgctttttggcgaacgatccgtaatgtatggtgaactggaactgatccgcagaggaatgatcgtaaatatcacattggaggaactgataggagatctggcagaacgcagtggatgtgaagagattcaacagttttcgacgatactctccgtggcgaaaaggggaggaggcaatgtatcgcagatcatacgaaataccgcagaactgatcagcgataaagtggagacgacacaggagatgatgacattgctgcagggaagacgcctggaacagagagtgatggaagtgatgccttttgcaatctcattctatataggtgtcacatatccgggttattttgtatcgctgtatcataacataaccggatatatcataatgacagtatgccttgcaatctatttgtgcgcctatatcgtaggagagaagatcatggaacggattggtgaaagtctctaaagggagaatactatggaacaaaaaaagggtgtagtggagatctgctatcaggtagtgctcataatatacaagaaaatgcacctgtggaaaataccggttccgggaagagacagggtaaagacagatctgagccgtttatatcccggagaaaatcaggaggagcgcattacagagtattatgtaaggaagttaacaatgtccctcatgatatttttcgtgggaattcttctgatattgtttgttgtacttggaaaaagtgaaggaaattctataaaaaacggttggatgaagagggcagattccggaagcggaagcaaggactatgttattatcggaaaagtagaggatggaagtcaatattcctttgcacttacagtacaacccagaaaataccgtcaggaggaattgcaaaaattgtttgatgctttccgggaggagctgccgggcctgatctgcggaggcaatgaatcattggactgtgtcagggaagatctgcaattgcaggaggaatatgatgattacccttttacggttacatggaagagcgactgcatggatgttatcagtccggaggggaaagtatatcctcaggagcaggacagtacggtgcgcttgaaagcggaacttgcttacgacgaataccaatgggagacagaaacgtcggttaccgtaaaaaatcagagtgatgcaatcgacaaaagtgaaaaagctgttctggaaataatgctggaaaatgcacagacatcagatccggagcaggaagcttttatgctgcctgagtcaattgacggtaaaaaggtatcgtggagacagagaaatctgacggagcttcaattactgttgggaacgttagtgacgattgtggcagtcttcttttttaaagatcgggatattcatgagcttgtagagaaaaagaagcaggaagaaaaaaggaagtacccggaaatactgcaaaaaataacattatatctggaagcaggactgacggtacgggcagcagtgaataagatagcggaagattatgaacagacacggaagaaaggagcaaaggaacaggcagcatacgaagaattattgattgcagtccgtgagatccgtatgggtgtgtcggagggcgcggcatatgaaaaatttggaaaaaggacaggagttcgggaatatatccgattgagtactttccttacgcaaaatgtaaaaaaaggaagcaccatgcttttacagcaattgcgcgaagaggcaaaagaagcagaagaaatgagaatgcgcaatgccagaaaattatgtgaggaggcatctacaaaattattgttaccaatgataatgctactcttggtggttatgattttaattatgtttcccgcgttttccaatgtgggagtttagaaaaggagaaaaatatgaatcatttaaaaacgtttcgacaatttataaaagaagaggatggaatgggaactgtagaggtgattctgatcatcgtgggaatatttaccccctaattcacgctatatattatgtagatacagtggaaatagagaaacagtataaacaggagtgtgtatgaagtacagtgatgattgcaaggtgtatagaatcagatattataatgtatggttctatttatttgcgaaaacagagatggatgagtataagattaatatattaggcgagcgtataggtatgggagattcgatgatgatgaaggatattcattgctggtgcaccagacaaaatataaggtatagaacaaagttcaagtatcgaaaagattatccaatattagccaacatctggaatctgtactcgtattgtcgctttaggtgtgatcttaaaaggtaagtctggacaaccttgtggataaatcataaggagaaaaagatttaaggggataactggtatttatatatttagaagcaggtgagccaatcatgttttatttactagaacatggttggctttttggcgttaaaaagttcaaagaaaaggggagtgtgataattgaagaaaatggatgaaaaaaagctaaaagaagattcgggctttccttatggatggaataagggagatacctgtgtgatgatcacaaacaaaacaaaaaaaagtacctgcgaatatacggtagagagttatgacgggaggtattttggagtacgaagtcatactggactttatcatcgagtttcaccgtggagaatgtttcgtacaagggaggaggcggttgaaacattatcagaatcaaaagaacaaggatatggaggaatgacattagggtagaagaaattgagatattgaggaggtaggagacaatgattcgatttatgagtgatacacgttatgctggactggaaaaggaaatgcagcatataccaggatttcgtccaagaaggagcggaatggttatcagtcacctttctggttgtctggaaaatcagagaagcccgtgtgaacgccgtgttaccgattgtgtcccgttttatgagcttctggaggtgttggcagaggaagtggctgtcagcacctttgtaagccgcgtgtgccgtctgacagggagaagaaatccgtgcttttttcaaaatggtcatagagaacggtttttggctatgggagagaagtgtaacagagccattgaagaagcagcgacctgttctgcggtctatcttctttccgcagatcgatttttgtgtagcagagctttagcggcaattgaccaggaggggattcatttttccaaaatccatatccatggtgttgatttggatggctacgttttgtttcatatggcaagggatctgtatcagggaagcagtcatattcgtttatcagaacttacagatccagagctggtgagcgaccgagcatttgaatggattatgacggcctgtgtgattcgcaggcatggaagcagagttttacgagaggaggaaagaagtattgacaggagtaaaatcggacagcatcagtgaaaaaacaacggagcgttctgtacttcggtttttcagtcctctgatagctaccatgtatgcaaaagatgactggggaaacttggaggaatacggcgaggaggtatttccagctgagttgtgcagctatgagacggagatcctgaaacggattgcagaggaaaatcttgaggaagaaggagatagggggctggcggtctatctggatgatccaaagttagaagagaaaatttacagtatgaagcctaccgtggaagtctggcggggggaactatggggagttctggaagtagaaagtcttaaccagctttctgaaagggagattgaagcagtaaaggagtactgggaaggtcaggaaagtgatgggtggggagaaggctttgaacagcggggaatcaaaattccagagggagaactgtatgtcagcttttggaacagtggagatgaattctttctgaccacagaagaaggtttgaaaggagaagagcaggaaccagtcgttcagaaaggagggattgtttttggagcattatgatggagaattttatacccttcgattgttcagtcccatagaaggagagatatattctctgaatagtacagaggaaggtactcatctgaccgcttatgagatggaaaactattcgtcttttatacgcgaccatatggaagatgtaggattattgggaaaaagaaatcagaaattgatgacatactttaataatgaaataaggctgcataagccggttagcctgtcactggatctggaagcttatgggggaagattatggagtgtactgcaggcagactcacaggataaactgacacatgaggaggttcagagtttagcagaaacatgggagatgattgctgctggaggctttatcagagaaatgcaagagacaaggatcctggtaccagatggagaacttacggtttttcttggaaatgagggactggattactttgtatgtccggaagaggttttgaaagggacggcgcatacattaaaaccagccctggatgttgccatttattcagaagcatatttcctagagcggagttatcaaggggcgaagctgaggcttccagcagaacccgcttttttgaaggatgcaaagatgagagcctttattcatgaaaatgagccttaccagattgaacttctgggggaatggccatcttttcttacaagtgtattggaaaaggcaaaagctgttactttggaagaagtcaatgtattagcctgtctggttgctcatatggattccattcagctggaaacttatgaagcagccattcagatgcgtcaggaaaaaaatacggatgctccagttgggataaaagatttactcaatctttgttataacctaaagtgctttgaattccgtcctggtattataaatgacaggatgttgggagaattctgcttagaagaagatagattggactggatccatatttttgaagtggatgtaagaaaattactggatccgcaaagagtggggatggatcagcgtaaggaggaaataggcatatttacctcaaaaggttatgtatttgagaatgctctttcctatcaagatatttatgatggaattcaccttcccgatattgacggagtggctggagggattttttctcttcgtctggtcggatctcaatatccggaagaacagggaacctggctggagcttccaactacagatttgggatttcagtgggtgctgaacagattaaatgagagaacttttgatgattgtatcattgcggagagcatcagcacagtgcaaggattatccgttaagcagatagatgacattgagacgctgaatgaactggcaagacggattcaggaatttactgatgatagaacgctttgcaaattcgaggcagctttggagctagagcaatgcgatagcctggaacaggctcttcacattgcggaaaatctggattgttattcctatgatccacagatgtattccatggctgcgtatacaaggtatctgtttcgtgaattggagattaatattgatgatccagcatttgctacatttgattttcaaggatatggggaacgtcagcttgggctgttggaaagtgtgcagacagcctatggaatgattacccgcaatgaagattttctaatacaggcacagcagaacacagagcagggaatgaaaatgcagtaaggaaagagctggaattgtgttgtgatcgagtggtggaaattaataagaatgagtgcgaaggagagtagaaaatgacctatgaggagtttttacagttaacagaaaagaatttaaaacgattttttccggaatcttttcaggagagaaaagtggaaatcagagagattttaaaaaataacaacatcaaattacagggagtatatctgtcaggtagcccaagctacacctccgtcccgcttttatatctggaatcctattatcaggagcttgagaacggaaagaagcttgaagatgtgtggcagaacatcgctcgggattatcagaagtgtcaggaaacggcaataaccatagatggcatttccagtaaagaatgggattatgaaaccataaagaaggggttgaccgtctatgtccgaaatgcacaggaaaatgttgattttcttgcagattgtcctcatgaaatacgtgaggatctggcactggtttatggatttcatgtgttggtggacggagaaaaggacggaagtgccattatcaattatgacaggctgaagtggctgggagtcagcgaggagcaattaaagcaggatgcctgggaaaacatgaagcagagcaatcctccttgttttttggatttacaggatatgctggcaaaaatgtattttgacgaaccgggagatgtcaaggccggtagtttggaacatttagaggatgtggatcccaatgcaatgatgtatgttctgacgaattcaaatcaggtcaatggggcggtttatatgtgtgatgaagaagtaatgtctcttattgcagaaaagctgggatcagatttaatcgtgattccgtcatcgattcatgaaacgattattctaaaagaaacagagaatatgagcgtaagagaattgaatgcgatggtagaggcagtaaatgcggaagccgtgaatccacaggaaaggctggggaattttgtttaccgatttgatagggaggcccaaagactggaaaaagcagtagaacaggcagaggagctggattttgaacctgggatgtcaccggtatttgcgtaggactcagttatatgtttcatgagtattgtggatgttaggagggatgcagaatcaacagttttatttcatgggttggcggaaagaaagcactccgcagcctgatttacacaatgtttccggcaaactttgatcgttacattgaagtgtttggcggaggtggttgggtactgtttggaaaaccaccagatgaccggtgtatggaggtttataatgactataactcaaatctggcaaacctgttttattgtgttaagaaccgcacgggggcattccttaaggaactcggatttcttccgttaaacagtagggatgaatttacagtaatccgtaaatttattgaaaagcaggaaccggatacccgatttttaattgaggagttggaacttgcagagaagtatttgctgccgccggattatgaggaagtgaaaaaaatcctgctggaaaatgcagaggtaactgatgtaaaacgggcggctgcattttttaaattgatccggtacagctatggaagtggttgtacatcctatagttgccgtccgtttgatgtgcggaactgctttgacaccatttggcaggcatcccgcaggctggcagataccgtaatagaaaataaagactttgaggcactgattcggcagtatgaccgggatagtgcctttttttattgcgatccgccctattatgagacggaaggtcattatgcagtggtattccgaaaagaggatcacaaacggctccgagacactctgacagggagcagggggaagtggatggtcagctacaatgactgcgatttcatccgggaactgtatgcaggatattttattacagccgttacgcgcatcaataacctggctcagaggtatgaggaaggttgtgagtttccagaggtcattattaccaattatgatcctggtgagagggagcggttaaaaccaagacagctggatctatttggaatgtggggagatggagaaacggatcattacgaaatccgggaagaaatctgtccggaaagagaggtgctatgagaacagaaaacaagagaaaaacaatggtgcaaaaaaaggaaaacggtgtcctttctgtgcctagtgaactgttactgacggctgggattccgcttgattgtgatttgatgatagaaacagtccccggagtgattctgattggtattgaggctccggtacagacggtttgcaaaccctatctgaaggtgttcgatgagctggggattgaacccaatgaagtggaggcattgatgggaaaggagaaaaggaccagatgagtaaaccgatgtatcgtttagtggatggaaagggacgtgtcttgattccaaaatctatgagggaagcggcaaagctggagtatggggatattgtttgtctgggaatggcgggtggaaaaattacagtccggaaggtagaggttatcgaggtgggagatcagtctccggaggcagtggaggcatatgtccgtactgcatttcagtttatgccagatagcctccgactggatctgatcggagaactgagtagactgctgcagaaaaaggaggggtaagatcatgcaggaattcacagaaaaggattgtatgcagacagaaaaggaggtatctatccagaaccgggtggtggttcttccctcaaaggtattaccagagcattacacggggcagctttttttctgtacgaatatccagaaaacagaaaatcccagacattccattgcccatttggtttctttatctactggggaggcatggcactgctggaacagggatgtggttggtgtgctgcgaccagaactgttgggggaaaaggaacggctccagctctcccagatccgtccatttggggcgctggatttacatggacattccccagaatattctggatacagttttctgccggatggacgctatgcgtcaggggtatggctggcaaatccagaggaagtatggagctatgtaatgatgcagaaggactaccagtatcggattttgatctgcgacagggatgattttgccgtactggaaatgttagagggaaggatgatctttcctgatgtgcagagtctggaacagtttcaacaggcacagaaggacggggggatggagatgatttagaaatgagggaagggaaatgaagcagattcagattgaaaatggagtgatccggtattatgggaaccgggtaggtcgtgtgacggaaggatgtgcagtagtggatcccatgtttcagaatgaagcattagaaagcttcctgcgtaagcagaggaatatccaaaaaattcagtggcaggacgggatctacgaccggttggcaaatagtcaggaagatatggaatcggcaaaggggttaaaagatgtacgcatctggcaactgagaggagatgtggatgtgcatatgaagttccttgcactttcccagatggagcagcaatatggctcccccaagccggatttttatatcaaagtctatgaaggggcatctgacaccaatgacctggaagaactctatgataaattccggtatcatccgccgtccggttatacaggtcatgggctatccattagtgatgtgctggaactctatgatgaaacagggagttcctttttttatgtggatcgctatgactttaagagaattgattttacagagtcgcaaccggcggaggaattcatacacaccatgcagttttagcaggcagttttggctgcctgtttgactgaaatagatccagaaaggaacggtttatgagcagaaaaaaacaaaggaggaagaatcagtatgccagatttagacgttcggattacatctatgtatccaccaggagtacagggcgggatcagagcctatgcatccgccacaatcgccgggtgttttgccgtccggggaatcaaaatcgtcgagggaggtaaggatgggctttttatgtctatgcccagccggaaaacacaggatggatacaaggatatctgttttcctgtgacggaggaattccgcaacgagctgaaacaagcggtattgggagcgtatggagaggcactgtccatggcacaggcatctaccttacagacagcaccccctcaaaatccagggcagaacatggtctgatttaaggggtacagagaacaaaaacagaaaatcaatggaggagatcaaatgaagaatattaaaagacagctggtaaattatcgaaatgcaatggttatgcatatgtggaacgtaaaaaacaagcttcaggatacatctggtgagggatatgtggacacagccattaagatcctgatcgcagttgtgctgggagcactgcttctggcaggtctttatgcactgtttaatgataccgtacttcctacactggtacgcagggtgcaggaaatgtttgactatagcggttgatatggagatcaggatatcgctgcttcaggcagtacaggcagtgctttttttctcgctgcttattgcggtttctgcctgggatcttcggtaccggattattccggaccgattccaggcagggattgccctgctttcctttctgaactttgcacccagacagctgtttggagctttaggggcagtgccatacctcatagttgcattattttgcaagagggaaggtggaattggcggcggtgatatcaagctggcaggagcaaccggcttggtactgggacttcctgcaagtctgactgcttcctgtttaggactgacaggatttgtgatgtatggttgtatggtctgcctgtggaatcggttcaagggaaaacgagataaagaagcatttcctgtgggaccgtttctggcaggaggagcggcagccgtttattgtatgagattaggaggatggatgatatgaagaagaaattatggatcatggtttgtgttgcagtgccgcttacaatgattgcggccatcatataccacaacagaaaataggtagacagcagtcagtggaacactggttaaaaaggaaccaaaataaggaaaagagttggaggagatgaaatgcgatttttgaaaaacaggactgtacttggtgtgctttgcatcgtgctgtctttgatcatctgctttgcagttacaccattgtttaataaggctatgagtgaaaagacggaaattgtacgtgtagtaaaaccaatttcagtgggagaagaaattacttctgacatggtaaagaccatagaggttggcagttataacctgccagatgatgtagtaaaacattcggatactgtggttggggcatttgcatctgcagatttggcgccaggagattacatcctgacatccaagattgcagaagagccggcggcagaaaatgcctatctctatcatctgacaggagaaaagcaggcaatctctgttacggttaaggcatttgccaatggattgtccggaaagctaaagagcggcgatattgtgtcagttatagctccagattatagaaagcagggaaaaacggtaattcctgcggagcttcagtatgtggaggtcattgctgtgactgcaaacagcggatatgacgcaaatacgggagaagaactggaagatggagcggatcgtgagctgcctggaaccgttaccttgctggtaacgccagagcagtcaatgattctggcagagctggaggcagatggaaaactgcatttgtctttggtgtatcgtggggatgaaaagagtgcagggcagtttttggaagcgcaaaaccagatattaacggaactgtatcctccagaagatatggaaggagaagcggaagaaaacgaggcgccggatcactctgataaggagccagaggaaaccaaagcagaggagcaggaggagtacgaacagggcgaaacagaggaaagcgaggtggagtaagccttgaattttctgaaaaacagtattttcagcaggggagccggggacagctctcctgactgggaaccggaaaatgagaatcaaatgctggcagtctggggaagtcctggatctggtaaaaccacgacagcagtgaagctggcggcgcgtcttgccatgcagaagaaggatgtggctctccttctgtgtgatatgaatacaccgatgcttccctgtatctgtcctcctggagacctggaagaggagcattctctggggagtgttctggcagcaacccatgtgtcggaatcgttggtacgccataactgtattactcataaaaaaatacgccatctaacgatccttggaatgaggaagggggaaaatgaatacacatatccaccttacgagcggacacaggcagaggaattactgcagtgtttgagaaagatcgctccctatatcatcgttgattgtggaagctgtattgccaatgacattctttcggccattgccttgatggaggcggatgcagtgctgcggctggtaaactgtgatctgaaatccatcagttatctttccagtcagcttccgcttcttaaggacagtcagtgggatgcagaaaagcagtataaagtggccagcaatgtatatcccaatgaggccagcgaacacattgaacgggtgctcggcaatgtggcattccagatccctcattccgaggaagtaaaggcacaggttctggaaggaaaccttctgaaagaactggtgctaaaggacagtaaggggtttagaaaaaccatggaagcaatcacaaaggaggtgttcggatgttaggggaaagacgcagcaaagccgcgttttctgcgggtttgcccgaagctgttcgggaagaaacacgacaggattctggacattttacggaggagatcatggaaacggaggcttctttggatggcttggatggaggggaggggatagaagaaaacttccaaaatgatagcctgtcggaacaggcttgtgaaggacagatgcatggaaaggaggatatctggtcagaagaggaggacatagaggctcctttgtgtactcaaaaaacgggaggtcgttctctccgtacccatgacctgttttttgcatcggaggatgaagggcgtgactttcagtccgtgctgcaggagatacaggcgtatctttccaaagaatacagtaatctggtaaccggagatggaaacgaagaaataaaagcacagatccgccgatttgccgggaagtatattcgggataaccgtatacaagtaccgggaaaaaccacggatgagctgattgatgcgatttattcagaaatggcagagttcggttttctcacaaagtacatctacggggaaggaatcgaggagatcgatgtaaatgcctgggatgatgtggaggtccagtattctggtggagtgacagaaaaattgaaagagcattttgaaagccccgaacatgccatcaatgtcattcggcgtatgttgcatgtgtctggaatggtgctggatgatgcgagtccaagcgttctgggacatttaagtaaaaatatccgtattgctgtactgaagacacctcttgttgatgaggatgtcggggtggcagcctcgatccgaattgtgaatccccagagcatgaagaaacaggactttataaagggaggaacggcaaccagtcagatgctggattttttatcggagtgcatccggtatggaatctctgtgtgtgtggcgggagccacaagctccggaaaaaccaccctgttaggctggcttctgaccacaattccggacggtaagcgtatttacagtattgagaatggttcaagggagctggcgctggtacgcagaaaggatgggagggtagtcaattccgtgattcataccttgacccgtgacagcgagaatgagaggcagagagtagatcagattgcactccttgatatggcgctacgctttaatccggacattattgtggtaggagaaatgcgtggaccagaagcgaatgcggcacaggaggctgccagaaccggtgttgcggttgtgacaaccatccattccatgagttgtgaggcaacttaccgccgcatggtttccctgtgtaaacgtgctgtggatatgagtgatgagactttgatgggatttgtaacggaagcctatccgatcatcgctttctgcaaacagctggaaaacaaggaacgccgtttaatggaaatcatggagtgtgagattctggcagatggaaccagacgataccgtccgctgtttcaatatcagattacggaaaacagggtggaggatggaaagtttgtaattgtggggcaccatagacaaatcaacccaatctcggacagtctggcaagacggctgatggagaatggtatgccgcaggaaacgctggcaggacttttgaatgtaaaaaaggatagaggggaggagaatgaatgacggcgattcagctattggcgtgtgcgggaatgatcgtgggtgtatttttactgctgggaatgaagccagtggagtttacggacagcctgtttggatttctattgaatccaaaacgaagtctgcgggaagacatcagggaatcatcaggaagaaaaaaatcagggattttgcgcagggaactggaggaagcacagaacatccttcaaatgacgggcagggggaaccggttttccatcatctgcgcagttgctctggcactgttttgcgctgggggatccattgctattttgttgggaaattttttccttgctccggtgatggcagtgggttttttatttctaccattctggtatgtgaaactgactgccaatcattataaaagggatgtgtctgcagaactggaaacggcgctttcggtcattaccacagcatatctgaggacagaagatattgtgacggcggtggaggagaatatagcatatttaaatcctccagtgtccagagtatttcaggattttcttatccagattaaaatggtaaatccggatgttcaggccgcccttcggattttgcggggaaggattgataatgaggtgtttcgggagtggtgcgatgcggtcagtgactgccagcatgaccggagtttaaagactacactgccgcccatcgtatcaaagctgtcagatatgcggaatgtgaacgcagaactggaatacatgattgcagaaccaagaaaagagtttatgatcatggttgtgtttgtagtaggcaatattcctcttatgtatctgctgaatcaggactggtatgatgtactgatgcatacggtactgggacagtgtattctggctgccactgcggcggctatttttatatccgctggctttgtagtgaaactgacccgtcccattgaatacaggaggtagctatggaaggcttgttatttttattcgggctgtttttagctctgggacttttctttttaactgcgtctgttctaaagttacctaccatgggtgcggcgaaggccatgctgggtacggtaaaacaggagcggaaagcggcaaagacattggaaacttattttatgatcctagcagtgcgactgtctggtttcatccggatggatgcatataagagaagcaggatgcagaatgtgttaaaagccagtggaatgaatatgaccccggaagtgtatcaggcgtatgctctggtaaagtcaggcgcagtacttttgggggcgattccctgcatgttcctttttccgctactggttcctgtcgtggttgtgctggccttacttctttactttaaggaaaatcagaaagcggatgaaaccttaaaggcaaagcgggaagagatagagggggagcttccgagaatggtggcgactatggaacaggaactgaaagcaagccgtaatgtgatcggtatgttggagcggttcaaggggaatgcgggaccagcgctgactggagagttagatattcttctggcggatatgcgttcctccaattatgaagcggcgctgacacgattcgaggcaagactgaactcgcccatgctgtccgatgtagtacgtggattgattggtgtccttcgaggggatgacagcacagtgtattttcagatgctggctcatgattttaagcagatcgaactgcagagattaaaagcacaggcacagaaaatccctcctaagatccgtgttttttcctttgtcatgctggtatgttttctgctgacttatttggcgattatctgctatgtggcattggagagccttggaggaatgttttagacaggaaggaggagaggatgaggagtcatcgtttatggagagcgctgtcagaaagacggggcgaaggatatgtggatgtgatcgtgctggttttgtgtgcggtcatggtgcttgcccttgccatgcgtgtgcttccggtttttattcagaaacagcagctggatacctttgctacagaactggtgcgtgaagcagaggtaagcgggcgcgtaggtgcagagacaagccgccgtgccgctgtgctgtcggaaaaaacagggcttcatccggacattttgtggtccagtcatggaagaatccagttaaatgaagaggttaccgttaccctgacgatggatacaaatatcggtctgtttggcgagtttgcttcttttccggttacgcttcgcgcacaggcagctggaaaatcagaagtttactggaaatgaggtggagggattgcggaaacggatgaaagagatactgagagacagtcgagcctcctcatttcccatgaccatcgggattgttctttcgctgattattctgatgtgtgggattagtgagtatttccggcttcaagtcattgcggcaggtgtgcgggaagccgtggaggatgctgtcatttccacagtcaatgataattatgcaggtgtgtatcatggagtcagggagggatattctggcagctatgttccatttggagagggaagctgggaagaagatctgaatgaaggggacatttatgattatctggatgaaaccatagggacccaattgtctggtggcaggcatgtaaagtatgcggatactggaactgcaatggagtttgccatagatagcctgcaagtgacgcttcggaatgcacctctggccccatcggatccagcccatgcgcagcggtttgaggcagatgccattgttagactggaggttccagttcggtttggcggccggattcttccatccatgtggatcacattgaaggtacaggctggatatacagaggtgttctagggaatgacctggactttgagaggattgtatagtatgttgtgcataacaaaacagaaaacaggataaaggaggagcagaatcatgaaactgacagagaagatgaaaaagaatctggcaattttgggcggcgtgctcataggaatcggcctgatcgctgccattggaatgcagtttggtccgaaaccgtccggtgaagatgttctgccaggaacaggggagacggaaacggaattgattgtagatcctggagattttgaaaagaaggaagaggaaagtaaagtagtatccagagaagaagagagccttgtgattcatccaggaatcggagaaaatcaggaaacagacactcaggcggtggacagccggtcgccacagactgatcagacaacgcagagtatccaaccaaaaccaactaaaccagaaccgccaagcaaggcgatcctgacagatccaacacaaaaaccagatggtacaaagcaggatacccctccggttcccgtggatcatgaagcggtagaaaaaccgtccgaaccggtagcagatccggaacagccgcaggcaggagatacttccgggaaccagatctatgttccaggattcggctgggtagaaaaccatggaggaggaggctctggaactgcagcagaagatatgtatgaaaacgggaataagattggcattatggattaagacagaaagaagaagcaccacatcaatgtggtgttttttcttttcccagataccagggaaggaaacaaggcttcctgtggttggaaaggaggatacttgaaacagaagaaatgtgtgtttttcatagtctcaatcttactgtctttgatactctccatccaggtttatgcagtaggggacggaaatcttgatgggggcggcggaagtatgggacaggggaccagtcagaattcatggtcaccgggaaatgaaggggtgcgggttactgtcattcgggcagagagtcatgatccggtaacaagaccgattgacttaacaaacaagcatccgaatattgcctactcctttgggaaagtcagtaaaatgtcttataccagaggaagtgctttgatgattgataccaatccatatgagtatgtaaatccggcacagtctctacccagaatcatcagctcgaaaagtctggggcaggcaaatattgagcagattaaaagttattttacagatgaacaggtggtgcgcagcattgcaggactgactggaatggattttgacacactggtgggaggggagtataggctcttattggagccgatcagttttcttaaatttcaaggaaccctgattgcagttacagcaacagaggcagcgctctatgatgagatgttaagtggtgggcttcgtgctgtccttccaacagtggcatttcagaatctaccactttctatgtttttggaaacaccggatctgggatatccggcttggggaggtcctacatcgggaatccgttccaacagtgaaataaaaagttccctgggacttggcattgtacggtttcgggatgtgccaccagaggaaccggagatcacgacctatgattatgagtataggactaacacggaagtgattacggcagtagaggtaagcggaggacagagtgatccggatcatccggtatccgtaacattttccgtagaaggaagaagctacgaggtgggagaggtatattatccgtccggtgacagtcagctggcttggatccgctggacaacaccggagcagcctcagactatgacgatgaccgtccgtgtgcggggcggaggaggaacaagtaaaggaactcttcacatcaaggttgtggatctggatgaaaatccaccgccagatcccaatgcggatgaccggaatgacgggtttacaagaccttcggttccttccaatgcagaagtaacctttgcatcctggggtgtgtggaggccatggtggagggaatactgggtatggcacagcggggatgaggatgatgacgggtactggtgtgaccatggctggtgggagtttgacctggaccgatactccgcaagcctgactgcagatatgagaattacaaccgatgaaaagtcccctaccgctacgggaaggacgatgaaatccggttatggattccaggaaaaggtaacaactcatgtcagcaccaatcagagttctgcagtgacatctgcgcagaatgcggtgacttattttccggaatttcagtatgagaggttttggaggcttttggaacggatgaatggcggctatgatatgacccatgagtttaagaaaaatggttacagtacctatgagaggagaacgcattttacaccaatttggtatccggatggaagctatacgccatatacatggttgttggattgctggacaccggctgggat

SEQ ID NO: 11288 - DNA, 1408 bp, Unknown
  gut microbiota DNA sequence
gttgcttacggttgctgtcgccgatcctgcagtagctgttgccggcttcggagttgccgttgccttaggtgtcgcagttgctgtcggtttcggcgttgctgtggtctccggtttctttgtcgctacgggcttaggagtcggtgttgccgtctcagtcactaccggcttccccgtctccgtcggcaataaagtgtccacagccgcctgtgtctctgcagtgatatcatgatcccttgtttccgtctcagctattatcacttctgcagtatccttatcctgtgccttcccacatccagtaaaagatgtgactgccagtgccgtcactaatatagcacaaataatcttttttttcattcttcgtcctcccagacatttcagcctttttctatgtttattgtataaatatagtcttcttttttgtgtccaatagtacggactcaattctttgttttatcttttttgatatgattattatatcattttgcagaatatctgtatacattttacggaattttctgtttcgatattttggacaaaaatgccgataaaacaaagaagtacagagtcctctatatattacatgacaattctcgtcaaaatcttacagtccatcttccagtttttcgtccgaggtttttcgtccgatttccatatgcagttgtcaaagatcatcacagcaaatatcgctgtaaagtgggggcagggctcgaacctgccggtcatcagacccgatttctttgtcacacccactgactatctattcgcagatttttacaacacgcagagaaccctgtgccagtgcagcataaaaagctgctacattatcgttatccatgtagatatttactctttgtgccggagtcgtagagtcagatgtactgattaccgcaccggcagagtcaaatacttcctggacaaacacatttccccatacaatggatgctgccgtatctgaagatgcgtctgtccaattatcatctgtgtttgccaaggactgtgaggtatccactttattggcattatcatttacctgatagatgttgattcggtctccggatcgcaggacgcctcccaccacctgatacagatcatcggccttgaatccggccactaccggctgcgtcatatcctttgtgatgtcattaacagcagtaaacatcccagtggtaataatggatccctgatctactgcatatacgctgatcaaatccgttagatcttctggattacttactgcgccggacgggatcaaagatttatctacctctttttgagtgatatagtctgccgtgatcaaagtgcctttgggtaccggctttgttgtcacataaactgtccctttttcatagtctgataatgctgttttttccgcattcagcataactgcatatacaataactgccaccag

SEQ ID NO: 11289 - DNA, 1124 bp, Unknown
  gut microbiota DNA sequence
atttgtgagggtaattatgataaattttttgaatgatataaggaatgcagaaaatccaatatccaataatagaaaacttataaataccatagcgatattgtttctcggaatagctttgggaactttctcaaaatatctggattttcgtcaaactgaacttccaggtgtgcttatggcaataaatggagtcttagatattggtaattttcttgggcgttttgcaatctggatattgattgcactgtgtatttctatttatagcaattctgcaataagagcaagcatcaatgtttttgtattctttgttggtatggttgcaagctactatttgtattcaaactatattgcaggatttttcccaagaagttatgcgatgatttggtttggatttacagctgtttctccattattggcttttgtctgttggtatgcaaaggggaaaagcaaactggcatttatactatcagcgctgattttggcagtattgttcaatatgtgctttgtatatggatgctggtattttaatgcaaaatctgttttggaagtgatagtctttattattggacttattgttttgaggagagacacattgaggagttctgcgctaatgggaacgattagtatagttcttgcggttttacttgatatggttattccatttcattttggataaacaacttcaagtttacagaactgaatcaaaagagctcgaaggagctctttttccttttttataatagtatcattatggtataatagagacattaaaatcggaagttggaggatacacgcatgaaaattgtaatcattaatggaagtgccagaaaaggaaatacgctggcagcaatcaatgcatttataaaaggagcgtcagaaaagaataaaattgaaatcattgaacccgacaaactcaacattgcaccatgcaagggatgtggtgtctgtcaatgctctaagggatgcatcgataaggatgatacaaatcctaccattgataaaattgctgccgcagatatgattctttttgctacaccagtttattggtggggaatgtcagcacaattgaaacttatcattgataagtgctactgccgtggattgcagttaaaaaataaaaaagttgg

SEQ ID NO: 11290 - DNA, 97163 bp, Unknown
  gut microbiota DNA sequence
gcataaccgagtataacttcaatatgctgtccgagaagtaccagaacgagcaaaaggagcttgaaacaaaaataagacagcttcacgaaatgatggaagccgccgtacagaccgcagcggatgctgaaaagtggattgccctaatgaaacagtatgtcaaccctgtggagctgaccgccgaacttctgaacactctaattgaaaaaataaccgtccacgaagctgtcaagggcgaggatggaagccgtgagcaggaagtagaaatctactaccgcttcatcggcaaaatcgactgacctttctttttttacccaacaatatctttaattaagggaaacgggggagacggttccggatattgaaaaatgtgacagacttgcatctttctacggaattaggctggatgctttgatgcactatgatgaaaaagtcgggaataccaaaatggctccgccaccggaaggaaagtttttatggggaacgataaagctgggcaatcgcggacagatcgtaattccgaaagaagcgagagacaagtatggattgcaggagggctcccggctggtggtattgggcaatgaagaaggtattgccctgatacaggcagaaaagtttgaaagtcagttaaaaagtgcgctggaactaagcagaaaaatggttgcggaggattagaatatgaagtgttcaaattgtggaaaagaaatgaggaaaggttatttattcagcagtaaggatggagctttcagcttcgcaaatgaagttcccggagtatttgagaatgcaaaaaatgcagatggttttgtagaaattacaaagctcaaacccagtcacagaacacaaatagaggcagaatgctgcgaagaatgcagaatgctggtgattcattactaaagggaatgccatgagagttgagacagatagaatgtatctttatccgatcagtaaaaaataagaaaaacagcttgcaaaataaaaggcacagtgctactataaccacggaaaaaacaagttggaggtgaatttcatggacagttgcgatgattatgggcgaagtagaaaacacggtgctttttcctgcaagcatggtacagctgtctgtggaaagtgacggtcgtactttgatttgttgtgcatagagattcatgcagaggaagcatcgtgtgatgcttcttttgttttgccctttacgttgcatcgaagaatgagaacgagaaaggagaataagattatgaacaagaaatattccgaactggcagaattattccgtagcgagaaaacggatgaggagatcctggatttcctcttaaattatcataagaacgatattgccgatatgatggcagggatgacagaggaagaacggaagcgactgtatcacctgctgggagcgcagaaggttgcagaaatcttcaaatacattgaggaaccacgtaagtatatccgggaactgtccgtggagagtgctgcgagagtgatctccgagatggattccgatgacgctgtcgacttgttggaagatctggatccggaagagaaagaacagattgtccggatgctggacgaggatgcgagaaaagatgtgaagatgttgctgtcttacgatgaggaagagatcggcagctgcatgacaacgaattacatctgcatcccggaagagctgaccatcaagcaggctatgagcgagctggtgaagcaggcaggagaaaacgacaatatcatgaccatttatgtggtagatgaaaagggggttttcgccggagccatcgatctgaaggatctgatccgtgcaagggaaaatgatcacctggaagacttggtgttgaaatcttatccgtatgtgaccgatcatgagaagatcgatgattgcatggatcggatcctggattatgcggaggactcgattcccgtattgtcagaagataagaggatcctaggtgtcatcacatccgaagacctgatcgaaatggtggacaatgagatgggcgaggactatgcaaagctagcaggtctgaccgcagaagaggatctgaaagagcctacgattcagagtatgaaaaaacgtctgccctggctgatcatcctgttgttcttgggcatgggagtgtcgtcggtggtaggtttattcgaaaatgtggtggcggtattgcctgtcgtgatctgcttccagtcactggtactggacatggctggaaatgtgggaacccagtctctggcagtgaccatccgtgtgttgatggatgaaaatctgacgggaaaacagaagttccagctggtggtcaaggaagtaaagaccggttccttaaatggtgttttgttgggcgtgatgacgcttctgtgcctcggagtgtatgtacatttcttcaaaggttatacctggatgggagcctttggcatctccggctgcgtgggagtctccctcttagtggccatggcgatctccagtgccgtaggtacggtgatccccatgtttttccataagatcaaggtagaccctgcagtggcatccggtcccctgatcaccacggtaaacgatctggtggcagtggtgacttattatggaatggcatggttacttttgatccggtagcaacagaggtgagctctcatggtggctatgctttttaacatagtcacttttagtattgggagatatatgtagcaggaaagactgaatttatgccgcatagatatcaaggtcaggaagctgtattttcggaagaaggtgtcgtcgcaggaataagattgctgtaataagcggtctttccggataacacgtcatcatagaatccttgtttccagtcgatgtagtccacggcctcctgcagctgctgcatggaggttaacagtgcttcttttttccgggagaggatgtcttttctggcgggaatggaggattcgccctccagacataaatgcagatattctttcatttcggcgatggagagaccacagtttctgaggcacccgagactctggatccatttgatatcgtggtcatcgaagacacgataattgcggctgtcccgcttcacgttgggtaccagtccctccttgcagtaaaattttaagttctcataggtcatgccggtcagggcacaggcttctttcatagaatacataaaatggcttcctttttgctcatgtggctacttcgccatataaaactgcttatctgactgaatgcaagcattcgcagaacgcagttttgcatggctctgaaaagttacaaaaaagtattgaccggtagttactaccgtgtgataaaatcataacgtagcatagacgcactgtcaatgcggaaaggattacaacacttatgaatcattcaggaattttgaaaaataagctgttcttgtatctcacagagttcttcgccgggatgtccgtcatggcggtggaactgggagccagcagactgttggcaccgtatttcagttcttcccagatcgtatggaccattgtcatcggcaccatcatgatcgccatggcgctgggcaatatctacggaggtaaaagtgcggacaagtccccgaacccggacaaactctacggcaggatcctgatcgcggccatctggattgccctgatccctgtggtgggcaagtacattatccttggaatctccgcactgctgatctttaccgtcagcaacaatttcctcatcattgcggcgtttgcagcctgcatggtgatcttcgtgttccccttgtttttactgggaactgtgaccccttcgctggtaaaatattccgtggatagtctggatgacagcggacagaccgtgggaactttaggtgcattcaataccgtgggaagcatcatcggaaccttcgtaccgactttcgtgacaatcccggcggtgggaacctccattacatttctgatcttttccggaattctgatcctgctgtctgcgatttactttatctgccagcatacgggaaagaaaaagattgcagcatcggtactgatctttattttatgctgtggtctgggatattcggattcctttgctttctggcagaaggatctgacctacgaaggagagtccatctataattatctgcaggtatcggagacggacagacaggtggtcctgtccaccaacgtgctgttcggtgtccaatccctctatatgaaagaagggggacttaccggcatgtattatgactatgccatggcggcgccccttatggtgccggataaaccggtagaggacatggatgtactgatccttggtatgggaaccggaacctatgcgacccagtgccggaaatatttcggcgatatgaatatcgagggcgtggagatcgacgaaaagatcacggagctgtcgagagaatatttttccctgccggaggatgtgaaggtgaccacctatgacggcagggcttttttgcaggcggtggataccacctatgatgtcatcatggtggatgcctatcaggacatcaccattcctttccagatgtcttccgtggaattctttaccatggtcaaagatcatctgaaggacggtggtgtcatggtagtcaatatgaacatgcacggcaacaaggaaggggatatcaatcagtaccttgccgacaccattgccaacgtatttgacaatgtctattctgtagacgtggcaggttccaccaaccgcgaactgtttgcttcccagcacagtgatatgatagaagtattatccgatcatgtggagaatttgtcagatgcgggactgcagaacatgatgcggcgggtagcggacaacagcgtggcttacgcagccggagattacctcatgaccgatgacaaggcacctgtagaacttcttggcatgcaggtcatcgatcagctgattcaggaagaagtagcgtattacaaggatatttatgaggaacaggggatcagcggattgctggaacacctgtaaatcggcagatttacaaatagagtttgaaataacataaagggtaagaatacgacggtggagtcaacaggcttcaccgttttttcttaaaaaaatataaaaaccattgaccggtagctactaccgactgctagaatcatactataaaatgtaacaatgttgatcgcaggaggaaaacgaccttttcaatagaaggaggtaacagaaatgatgtacaatccccagttggataccttcatttgtgtggtggaagcaggcagtttcagcaaggcagcggacaaattgtatatttcccctccggcagtgatcaagcagatcaattcgctggaaaacaatcttggggtacagctttttgccagaacccacagaggtcttgtggtgacagctgcgggagaatcactttatcaggatgccaaatatatggtaaattacagcaaggaagccatagagagagcgagggaagccgggaatgatgaagatgatgtgatccgggtggggatttcccccatgacaccaccgcaggtatttgtggaactctggcccaggatccaggagcagtatcccaaggtcaagtttaaactggttccctttgagaataccccggagaatgccagagagatccttgcaaatctgggacagaatatagacgtgatcgctggaatctttgatgatgctatgcttgaattgcgtaagtgtaacggtgtagaactgtccagagaacctttttgcgtggcggtagccctgcatcacagacttgccgggaaaaaggtgctgactccggagaacctgaaggaagaacggctccttatgatgcggaaaggctagagctgtcatgtggatgcactcagagcagaactgacagagaaatatccggagatcaccatcgcagattttgatttctacaacgttgatattttcaaccgctgtgagaacagtaatgacatgctgcttgccatcaaaagctgggagagcgtacatccgctcatgaagatccttccggtggaatgggattataagatgccttacggactcctgtatgcgaaggagccgtccgaaaaggtggaaaaattagtaagaacggtggaaggaattacaaaatgaacaaaaatctgaaaatcaggctgtttaccgattccgagatgacgcttgccctgttactgctgatgtcctatcagctggtgggagaaaaagcccatgagtggatcggcatggcaatgtttttgttagtcatagggcaccatgtcctgaacagaagatggacgggaaacattacaaagggaaaatatacggctcacagaatcttgcagaccgtgatcgtggcattgctggccctgacgatgattgggtctatggtgagcggcatactgttgtccaactatattttccggtttgtccggatcgaaggggtggctaacatggcaaggaacatccatattctctgtgcatactggggatttctgctgatggcggtgcatctgggattccattggaacatgatgctcagaattctggaaagagcacttcccatgaagggcatcgctaaaatcctgggactgctgatcgcagtttacggaggctatgctttttacaaaagggagattgtgaactatctgtttttgagaagccattttgtattctttgggccggaggaaagccttggggtatttttacttgattacatagcgatgatgggaatgatcgtgtttattacctattatggttgcagattggcggaaagaataaaagcaaaaaagtaatagaatgagggaaaacggagggaaaatatgatttagattgcgattgttgatgacgaaaaagaagtgacgcaactgttaaatcattttattgaccgatgcatgacagtatattatttactgctctttggaatctattatgcaccgcgttctgtgccgagggagattatcgtagtgcagatagtgtattatacaatagcgttctgcatgacattagcggggatcggcggatataccacgcagcatctggtatattgcatcgtgcggatcacactgtaccttttcccggaaaatattcccggagtgtggagacatgcgcttccttatataatcgttgcctgatcaatgatatattgaagcgggaagtgcagataacagagaaccgcttattgctggagcgggttaaaaatgaaaccggaatgtaccggacgatttcagaaaattatgataaacagaaaaaaagagaacatgagtataaaaaccagcttgcactcattgcagcgttagccagtgaaaacagagtagacgagatcagtcattatctgaagcaatacaatcttgaaatcatgcagcacacagatttcattgatacaaataatgtaattgtgaatgcaattttaaactcaaagtatcaggagacaagggaaaaaggcattgtatttgttgttaaggtaaatgacctgtcaaatctgaaaatcagggatgaggatattgttctgatattgtcaaatttattgaataatgcgatagaagcatgtgagcagtgtgaaaaaccaatcataaaaatgaaatttgtaaaagaagaacatcagattatcttgtctgttgcaaatacattttcaggcaacccggtaatcgtggggaaaagatacataacaacaaaaacgaaggaagcagacagacatgggatcggattggaaaatataaaggaaaccgttggaaaatatgacggttcctgcgtgataaaacatgatgaaaacaattttaaggttgcaattttaatacataatcaggaaaagtagatgcgatttatagttgtatctacttttttatttccaattctgctttaaaatttccaattctgcaatagatatacagaattagacaggaaatgacgaaaaaaagattaatagcttttatggaggataattttatgaatgtaactggagtaggaagcatgacagttccaaggaagagaagaactggtaagaaatgctaacagtgaggggaactataatacactggaggatataagaattatgagaaaaaataaaattgcaggtatggtaacagcacttgttttaacggcagctatgctgaccggatgcggatcagcaactggtaacggtaatgccggtcggggtgtccaggcatcaacaagtgcagcaacacagacaacagaaagcagtgtggcagctacagagtctgctacagcagagactgttgcaacacaggaaaccgcagcagagacacagaccggtgatactactgcagaatcagaatccggcaagatacttgtagcatattattctgcaagcggtaccacaaagcgcgtggcaacagccattgcagatgcggcagactgggtggcttctctgaatctgaatgaataaggaaacgaggaaagcacaacaatgaaagtattgttgatcaatggcagcccccacagagagggatgcacctacaccgcattgtgcgaggtgtccagagcattaaatgataacggagtggatacggacattttctggattggtaataaagcattgagtggctgtattgcctgtaaaaaatgtcagggcacagggaaatgtgtgttcaatgattctgtcaatgaatttctggagatcgccggggattatgacggatttgtattcggaactcccgttcactgggcaggtgccacaggcaccatgacttcttttatggacagagccttttatgcggatctgaatggcggtggcagacgcttccggctgaaaccggcagcgtccgtgatctcagccagaagagcgggaactacggcgacctgggatcagatgaataagtattttggcctcatgcagatgcccatcgtcacttctcagtactggaacatggtaggtacacggggcctgcccggaagacgtgcgccgggatctggagggattgcagaccatgcggaccctggggaacaatatggcatttttcatcaactgcaagaacctgggactgaaaatgggattgagattgcccgacacggaagctcccgtgcatacgaattttataagatcctgattatgaattcagggaaaaaggaatcttgaaaccatacggcggagagattccttttgctgtaataattgcttgtaaaacctcccggattgtgtcaaactgatagttgtgacaggaatggattttgagaaaaagtttccaaaataaggagtaatcatggctgagatattattgggttcccatgtgggaatgtcaggaaaagagatgtttttaggttctgtgaaggaggcggcagagtacggtgccaatgcgctgatggtctacaccggggcaccccagaacacgagacgaaaagagataaaggatctgaatctggaggcagggcttgcctatgcagacaaagcaggcatcaaagaaatcgtgattcatgctccctatatcattaatctggggaatatggaaaagccggagatgtttgattttggtgtggaattcctggccaaagaagtaaaaagagccgccgcctttcacagtaaggtactggtactgcatccgggatcttccttaagtgctggtgtggaagaggctgtggagcagatcgcaaaaggactgaatctggtgcttgatgcggatgacagcaaggtcaggattgcgttggaaactatggcgggcaagggcagtgaggtcggcagatctttcgaggagctacgcttgatctatgacaaagtagaacggaaggacagactgcgggtatgtttcgatacctgccatgtgaacgatgcgggatacgatctggtgaatgactacgagggtgtgctggcgcagtttgaccgtgtgctgggactggatcagatcgcagtgatccatgtgaacgacagcctgaatcccttaggagcccataaggaccgccatgccaatatcggacaaggcaccattggctacgacacgttgcaccggatcgtccatgacgagcggtttgcagaggtaccaaagattttggagacaccatggctctgcgcagagggagaaacgaagaagacgatcccgccgtataagcaagagatcgcatggctgaaagcctgaaaaacagagaaatacgagggtagacaattgaaaaaaaggattatcacagcagtagcggtatttggacttttgggcggaatattatattttgcgtatgcacagacagcggcgcagaacaatgtgaagcatttcacagctttttttgctgtggagggagaagccattgaccagaataatgatatgaaaaaagaaatcgcacgcctgacaggtgcggattgtgaagaattgtggctggtgggacagtccaaggaaagtgccttgaacagttatattgtgagtggggaatatccggattttatttccggagataccagtctttatgaggcaggggcattacttcctttagatgaatactgggagaattatcccaatatcaaaaattacctgacggaagaacagtgggagagattccgcagaccggacggtcatatctattggatcccacagtttggtgtgacccatggcgaagatgtggaggtgacccactcaggtgaagccttctggatccagaccagagtgctgaaatgggcggggtatccggagattcatactgtggatgaatattttgatctcctcgagcgctatgtggcagcgaacccggtaatggaggatggaacaccgaacattccgtttacgattttgtgtgatggctggcggtatttttgtctggaaaatattccgcagtttctggatggttatccaaatgacggaagctgtattgtggatccggatacattacaggtttacgattataacaccacagatactgccaaatggtactttaaaaagctgaatgaggaatatcacaaagatattctcggtgcagaagtatttacagagacctatgaggattatctggcaaaattatccacgggtgcggtctgcggtatgccggatcagtggtggcagttctactattcgattcagaatgcctatgatgaacagggccttagagaacagggctgcgattatgttccacttccgattaccagagaggaaggaatcgccaatcaatggcatgtaacgcgctctgcagagctggacagctctacaggcttatccattacggtatcctgcgaggatattgacggagctttgcagtttgtcagcgatctactggaaccggagatcattaaactgcgattttggggcgaagagggagtcgactatagcgtggatgagaacggattgttctacctgactgaggagcaggcgaagcgatggatgacttcggaggaaaagagaaaacacttttgtttttattcttattttcccagagtagaaggaaagcttcccgatgggatcaacgcattttccctggaatatcagacaacagaattttttaaaaatcagcctaaggacattcaggaatgtttttctgcttacggagtgacaaattatgtggatatgatcggcaataatgaggctcccggggcatggtatcccatgtatagctacacgacatccctatctgccaattctcctgccggacaggtcagggatcggatggatgcggtgaaacacaaatggcttccgcaggtaatcatggcagaagattttgagactgcgtgggagcaatatatggaagcatatgattcctgcaatcctgagatttattatcagatgttgcagcttgaggtggaaaaaagagtaaaaggataagttttttacaaaaaagtataaaaaacaaatagaaaaatacctctcaattcctttaaactaaagaaaaggattgggggtatttttttatgaacgaaaagagaaacggagctttggacagatatccaatagaaaaaaagagagcaggaagaccatctgttacagtgaaagaagacggcgcagtcattttttatctgtatgcaccggcagcaaaaatagtacaggttgccggactgggaggatattttacaaataagaaaatagatctgatgcccgatgggcagggcggattttttgcggaagttcaagattttcactgggggatgcattattatttctggtatgtggacggtgtccggatctgcaatccgtacgccggaatttcttatgggtgttttgctgcgatcaatacttttgaggtgcaggagaagaatgtggatttctattttgcaaaggatattcctcatggtacggtcagcatctgtaaatacgtttcgaaggtgagcagccacctgaaggaatgttatgtctatacaccttatggatatgaagaaggagatgaaagatatccggtattgtacctgcagcatggcgtaggagagaacgagaccggatggatctggcaggggaaggcaaatttaatcatggactgtctgatcgcagagggaaagtgcgagaaaatgatcgtggtcatgagcagtggctatgccttcaaagatggagaaaaacctgtattttaccccgggaattttgagagtgaactgatccacaacattattccttatattgaaaacaatttccgggtgagaaagggaagagattaccgggcgatggcgggactttccctgggatcggcgcagactacggatattgtggcaaaaaatatgaagttattttctgctgccggtgtattttccggagttgctattcatgagatggaacggatctgcgacagcgacgagcagttggatgtggtatttatgtcctgtggcacttatgaagaacaaatcagagaaggaatggggcagatagaacaaaagtttgaaaatgcaggaaagtattgcatttccaaagtatatgagggatatcacgaatggcatgtctggaggaaaagcctgtatgattttgtaccgttattgttccggaaagcgggggcagaaacggatgacattccgggggaaagaacagccagaatcacgagacagagactacagcgacagaccatggaagaacagatactgatgtttgatccggtataccgccagatccgctttgagactgatgaagcagggagacctgcaggaaaatacccggacatccctcacggaatctgcattacggaacagggaacggcagtcgtatgcttcgaggcaccggaggcagtctcggtagaagccgccctggacggaaaagaattcctaaaactcaggaaagatcaggaaagacaaggatactggacaggggaaatccacaacatcaccccgggataccataatgtatatttcagggtaaacggtacagatgtgatgaatccggatgcaccggtgggatactcgagagatagggctgtgaattatctggaaatgccggatccggagtttccactgacagaactggcggatacagtgcacggtcaggtgcatatacattatgattatcttgcggaggaagagaaagtaagtacgatctatgtatatacaccggcatattttgaaagagcggaaaaagagcggagcgtaatgatcttaaaagcactttccacagaaactgcgtcctgtttcctgcaccaggggaaaataccgaacattatggaatactttctggcagcaggaaaagccgtggagaccatattggtgatgacaaatgcggaagagacagcggaacggatgcaaaacattataaagaaatatattccggatggacaaaaagcaaaagcaatcgtcatggaacgaagcgacggagaagattggaattccttccggagacgatttgcagcctgccggatataaaattattacctgcatttcctatattttcccgggtgtttgtgcaaggaaagccggactataatagaactgataaaagttcgggagggatggaaatggcaggaccgacagcaccgaaggatccggaaaaggcaagaccttttttctatatattaaaagacaaagatatttttggagaacggcaaaaggacggaaccggaatccagtttatctatgaaagcgacggacggctgatcaacagtgcacagatcacgggaaatgttacggataaggaagaactgagacttctggagacagtagagggatttggcagactggtacatagtatcggcgtaagcgtggagacggaccggccggaagaaaccgcagaatttgtatttcagatgtatgggaaaaaggacctgtacggaggtggaacgaatcttacaacttctcttaagtgtgacggcatggaacatagaatctatctgtcggattacaggtggacagaggatgatcatgtgccgggacagattaaaattctgtttgcagcgccggagcggatgggaaaagtcagtgtaagactcttcctaaatgacggatacgaagcacctccggaggaagaggatctggttatagatatgcattcggaagaatactgcggcatgatcagccgttctttgttgcagctggggaatccttatcgtatccgtaaggctattgaaaaatctaaggcaggaaaagaggtaacgcttgcctatatcggtggatctatcacgcagggagccggagctataccaatccatacggaatgctatgcatataaatcctttcaactgtttcagaatcgtttttcgacacagaacaatgtcaggtttatcaaagccggagtcggcggaacaccttcagaactgggaatgatccggtttgaccgggatgtgctcagggaaggggaacgaccggatattgtggttattgaatttgcagtaaacgatgagggagatgagacaaagggtgtctgttatgaaagcctggtgcggaaagtgttgaaactgccatggaagccggcagtggttctcctgttttcggtatttgcaaatgattggaatttacaggagcggttaaggccggtgggggatctttatgatcttcccatggtgagcatccgcgatgcggtaactcaacagttttcattaaagtgcggcgagggaagaattttatctaaaaatcagtttttttatgatatctttcatcctaataataccggacataccattatggcagactgtctgcaatatctgtttgaacgttgtgatgcagcagaacctgcaagaattgggacttttgtggaaggaatgacggaggaacagatcctgtcggaaaagctttccggaccggcagtgatcggtgctgattttgaaagaatttttttactggataagaagaaccgttatgtaggagccaaaatccgggcgggtggttttacttccacagatatagaattacagagtgtggaaatggacggaaaccttacacagacaccggaatttccgtataactggatgtatgatggaagcagaccgcagatgccgggatttgaaatggagattacctgcaagtcactgtttcttatatttaaggattccggagaaatggatgtggggaaagccaatgtatttgtaaatgatgtatattgtatgacggcggatccccataagaacaattggctgcattgtaatgctgtattactgttttgggagacagaaagcagatcccataaagtacggattgcagtgacagaggaagaccggaataaaaaatttacaatcttaggatttggatacacaatatagaacagagtgaggaaaacaaaatggttacagcaaagaacccaattttatccggtttctatccggatccatccatatgcagggcaggagaggactattacattgtgaattccagttttgtgtatgcaccgggagttccgattttccacagcagagatctggcgcactgggagcagatcgggaatattcttgacagaccggaacaacttccggtgaagggaagtgaaatatcacaggggatttatgcaccaaccatccggttccatgatggactgttttacatgatcactaccaatgtaagctacggaggcaatttcattgtaacggcaaaagatccagcaggaccgtggtcggatccttattatctcggcgaagatgctccggggatcgatcccagtcttttcttcgatgatgacgggaaatgctattactgtggtacgcgaccgaatccggaaggagtccgctataacggagactgggaaatctgggtgcaggaactggatcttcggcagatgaagcttgtgggagaaagcatggcaatctggaaaggggctgtaaaaggagttatctggccggagggaccgcacctttataagatcgacggttattattatctgatgcatgcagaaggaggaaccggaccggagcacagcatcagcattgccagaagtaaaaagctgttccagtggttcgagggctgcccaagaaacccgatcttcacccacaggaatctggggaaaaactatcctgtgatctacgcaggacacggagatctggtggaggatggacggggaaactggtatgtggtaatgctggcatccagaccctgtgaaggacacagcagcatgggcagagagacttttctggcaaaagtcacatgggaaaatggatggccggtgattgcagaaggcgtcgggcatctggaagatatattggaactgcccacaaaagaataccgttttccagaggaagtaagcagtacttccgatcatatcagtttttgggagaaaacaccggacaaacggctggtaagtgtagaagaaatctgtgaagaaaactattccctgagtcaccggccggggatgctgcggctctatacaaaaaaggaaaaaatatctgaccgcaatcattgttcctatttcggaatccgtcagaaaaattatgcattctatgcagagaccgggatggaatttgaaccgaagcaggaatgtgagactgcgggaatggtgttgtaccagaatcatgaaaatcatttgcgcatggagatccggaaaagggctgaagagaattgttttgttgtgacagcctgcatccatggggaagagagaatccttaccgaaaagccggcaggagaaggcagacaattctttaaaatacgaatgcattgcgacaggcagaaggcacggatatggcttttcagggatggcagggagaggctgattgctgaggatatcagtctgcttccttataccacggaggaagcaggaggatttgtgggatgtacgataggaatgtacgcatctgccaatggacaggacagcagtaactatgctgattttgcctggtttgtgcagaatgccatataaaaacggattgcggatagaacgcagatgtcctataataaagaagagcgggctgtaaaaatgtctgctcttttttacataacagaggagaggatcttatggggaaggtattacatgaactggatctttggatggatgatttcaccatcaaaaaaaagttttatattttctatgttgtctgtgtgttgattcccctgatcgtaacagacagcgttgtatttctgacgactgcaaaatttgacagagagcgcagggagcatgagatgtccaatattgccagtacggtggaatacagtctgagcagcatgataggaaatgccggggagataggcaacagtatttataccaatcgcgattttgaagatttcttatccaaaagatacactaattctgcagaatatgtggcggcatatcagaatttcctgagcgggacgttattggaaaatgcactgggaatgaacagtatgatatttaccctgtatacggataacgacaccattgtaaacggaggaagagtcaatacgctggataagcttaggaatacagagagttatctgcggctgaatgaagaagcgaaaagcaagggactcttttttgtctatgatgacagcagttccaaaatcacaagggaacggcgcatcatttatctacagcggctggatttctatgatgcagagacagaaaagtatttaaaaatcgagtttgattacggcagtatggtgcgcaccattaaaaacatgaactatgataatgaggttctgatttgtgaaggagatcggatccttctttccaatggacaatacggcagctacggcagtgagtttcagcggctggataacgcaacaatgagagaagcctatgaacataccatcagtctgtatggtacggaacttacaatttatgtaaagccggtagagaacagttttcttacaagcatccggaacgaacttcccatcatattgctgctccttgcggtgaatgttatttttcccttctggttcgttcagatattcaaccgttcctttacaaaaaggattacagaactgagcaaggtatttaaatcagtggacagtgatcatcttattccaatgccctgtgaagaaggtaaagatgagatcagcagtatgatacgcaattataatcgcatggtggaacgtaccaatggactgatcgagactgtatataagaataaaatccatgagcaggagatgctggtgggaagaaaaaatgcggagcttctcgcattacacagccagatcaatccccactttttatttaatgtactggaaagcatccggatgcacagcattttgaaaaaagaaaacgagacagccgacatggtggccaaactggcggtgatgcagagacagtatgtggaatggggcaatgattccgtgagtatcttccaggagattgaatttgtgaaagcttatctggcgcttcagaagtatcgttttggagaacggctgaattatgacattgaagtagacagagaatgtgaaaacttcaagatacccaagcttacgattgtaacctttgtggaaaatgcctgtgtgcatggaatcgaaagcaaatccagtccgggatggatatttgtaaggataggccgtcagggagaacggctggagatagaaattgaagataccggaagcggtatggcggaggccaaacttacagagctacagaacaacatgtgcaatgccgacattgagatgctcaagggcggcggaagagtagggattattaacgcctgtgtcagattgaaaatggtaacggaaaacagagtggaattccgtgtagaaggagaagaaggagtgggaaccacggttacgatacggattccctgtttgcaggagggtaaaacagatgctgaaagtattgctggtagatgacgagccgtttattttacagggattgaaacttttagtagattgggagaaggaaggctttcggattgcgggaacagcagcaaatgggatggaagcactggcttttttgaagaaggaaaaggtagatttggttattgccgatattaaaatgcctcagatgacaggactggaactgctggaacaaatccgtaaagagaaaatttcagatgcatattttgttatactgagcggatatgcggaatttagttttgcacaacaggcaatgcagaatgactgcacggattatctgctaaagccggtagacagcgagattctgtgcaaagtactgaataaggtacttgctctgcgcaacagagaggagctggatcatgaaaagaaccggaagctggagcaggcttatctggcaagacatatgattgcattgatccaagggaagtttgatgacctgaatgtcagatatatacatgaacacatgcgatgcggaaccggtgtgcgttatgtggagatccagacggaaggatcgtatgatgatgagggaacgacagatcgagaaatgcggacattacagaggcggctgtatgaatacagcagggaatatctgaaagaagatgcagatctgagtgtgtttgatgtttctgtcaatgaaaaaatctacgatatcggactgattttgtttgattatgttccggaaaaaagtgggatggatgtaaaacggtatctggaacgattccgggaatatcttgcatcaaatttacagacaaatgtggtgatgctggcaggaaaaaaagtgcaggatatcagcagcatagcaaagtcttacggcaatacctgtatgcttcgttcttttcaggggtttcggacaaagaaggatatctatttctatgaggaggaggtccaggtatctccggaaggactgatcctgtgtaagcagagcctggatggcctgctgaaggcaatcgaacagaacaatcatctggaaatccgggaggcggtggctttcttttatgaagaaatgtgtaaacgcggtatttgcggggagacgatgaccctgaatattaattatctgttgtttcagctgatccacttagcctgcgaacaggatgatgacgtgaaccaggaggaaatcttaagggtcatcagtgagagcagctttgagaccggggtaaagcgcggaagtaaggcacatctgaccagatttgcctgcgaatatgcggattatctgtcacagctgcggaagaatgtatccagaggaattctgggtatggtggaaaaagagatccgggaaaattacgcttcaaatattacactgaaaagcctgagtgaaaagtattatgtcaacagtgcttatcttggacagcttttccggaaaaagtacggacaatcctttaaagactacctgaacaattaccggatggagcaggctgcggatgccctgctgcgtaccgataaaaagatcgttcagattgcagaagatgtgggctaccatgatctggactattttacgaaccgttttattcagatcaagggctgcactcccgcaagattccgtaaaaagatgcaacagggagagtaagagaataaaagacaggggaaattacagaaccacctataatttcccctgtcttttgctatagttcctctgattgttagttcctctcaaaaaggtaaaatagatttatcgaaagggaggtagttacaacatgaacaaaaagagacttgtaagcatgttacttgtgtcagcaatgacagcggcactgttcaccggatgtggcagtgacggtaaccagacatccggagatggtacaacgagcgcaggaaccaacagtaccacagaagaagcaggtatcaaagagttcaccgcattttttggggtagcgggatctgagatcaatgacgacaatgaagtgcagcagctgatcgcagagaaggtaggcgccaaagtaaaggagacctggctgaccggacagactgcagatgaagctgtgggtaccatgatcgccggtggtgagtatccggacttcattgagggacagactggaaccacacagctgtatgaggcaggagcattggtagcactggatgattatctggatgattatcctaatatcaagaatctgtttacggatctggagtgggagaagcttcgtcaggaagacggccacatttactggatcccgcagttcagctgcatcaagaacgaagagaaggtatgtgcacataatgatgaagcattttggattcaggcaagagttctgaaatgggcagactatcccgagatccggaccatggatcagtatttcgatctgatcgaagcgtataatgcagcaaatcctactatggaagacggaacagccaatattccttataccattctctgtgatgactggagatacttctgtctggagaacgcacctcagttcttggatggttatcccaatgacggaagctgtatggtagatcctgagacgctgacggtactggattacaacacttccgataccgcagtaaagtattttagaaaattaaatgaagaatacaagaaaggcattgtagaccccgagtcctttacccagtcttatgatgagtatatttccaagctttctacaggacgtgtcctgggtatgatcgatcagtggtgggatttcgcttacacagcaggtgatgccatcaagcaggcaggactggatacacagggatgcgactatattccactgcctataacaattgatgaaagtgtaaaaaaccagtggcataatgccggtggtgcattcaattccggaagcggacttgcaattactgtaagctgtaaggatgttcccggcgcactgaagctgatcaatgatctgctggatcaggacatccataaccttcgtttctggggtgtggaaggtgttgactatgaagtagatgagaacggtgaattctacagaacaccggagcagagaatgcaggcttccgatacagagtataaggtatcccatatgtgctcttattcttatttccctcagtacaacggaaccagtgatgatggtatcaatgcaaacaagccagatggccaggcgagggaattcttcgatggattaaacgacgatgtgaaagaagcattccaggcatatggcgtcgagacttatgtggaaatgctgggcactaacgaagcccccggtgaatggtatcctatgtggtccttctccaataacttcaataccagcacacccggtggtatggcatggaccaagatcggtgaagtaaagcatgagcagcttcctcaggtagttatggcagctgatttcgacaaagcatgggcagattatatggatgcatataatgcctgcaagccggaagattttatcagtgaattacaggcagaactggacagcagaatggaactggcagcaaagttcaaataaaaacatataaatgaaatttgagaatgggcagatgcaggtaaaatttcatctgcccgttttttaaggagcgaggatatgtcgttaacgagaacaaaatcgaaacaaaaagtaaaacaaaccagaacacctatcacatggaaagaaatcaaaaggcaaaaagttctgcttttctgggcaggagtaatgatgatctatggagtgattttttactatcttcccttagccggatgggcgatggcatttcagaattataagccgcagctgggaatcctgcactccgaattcgtgggacttcagaagtttcggatgttattctcggatgtgacattccttcgggtcattcgtaacacattggccatgggtgtgatcaaccttgtggcaactttcgttaccgcaattgtatttgctattctattgaatgagatcaagagtaggggcggaaaaaagacagtgcagacgatatcttatcttccacatttcctttcctggatcatcgtaaccggtatcctgcatgatatgttgtccggtaccggaattgtaaatgaagtattggtaaatctgcatgtgatcagccagccgatcaatttctttgcccatcccgggtatttctggccaatcgtagcatttgcaaatgtctggaaggagacaggatggaatgccattatctatctggcggccatcacatccattgatccttccctgtatgaagctgctgccattgatggcgcaggaagatggaataaaatcaaatacgttacccttccgggaatcaaaccgaccatcgtaattttattgctgatgaatgtggggaatgtattaaatgcaggatttgaaattcagtatctgttaggaaacggattggtacagaagttctcccagacgattgatatttatgtattgaaatggggtatcagccagggagattatgcaataggtacagccgcaggtatcttcaagagcctggtaagtatcatcctgatcgttctggccaatcagattgcaaaacataatggtgaagagcagttattctaaaacagaaagagatggtaattacaatgatagatacacaatataagatcaagtccaaaaaattcgacatttttccgttcataaacagtgtcatcatgatcctgtttgtgatcataacattatatccggtgctgaataccttggcaatctctttgaatgacggtacggatgccctgcggggaggaatctacctgtggccgagaaaattcacctggaaaaactatacgacggttttacataaagataatctgatcacaggcgcttatatcacagtagccagaaccctgatcggaaccctgctgtctctggcagccaatgcaatccttgcttttattgtcagccgcaaaagattcctgttccagagagaggtttccctgttctgggtcatcaccatgtatgtaaacggtggactgatcccaacattcctcttatataaggggctggggcttaccaacagcttctgggtatatgtgatccccggaatggtaagtgcgtttaatatgctggtgatccgtacttatatgaacggaattcctgacagcctggaagaatccgcacagctggacggtgccggttacagcactatttttcttaagatctattctccgctgtgtaagccggtctatgccacagtagccctgtttgtggcggtaggccagtggaactcttggtttgatgccatgctttacaatcgcatgagcagtaatctgaccacattgcagtatgaattgatgaagctgttatcctccgtaaccaatcagggaacttcagcggaggcaatgaagaatgccgcaggaaccgtaacaccgacttccgtgcgtgcagcggcaacgatcattaccatgctgcccattatctgtatttatcctttcttacagaagtactttgtagcaggacttactttgggtggcgtcaaagaataaaaatcggagaacgagcaaatggcaggagcatatcagactggtatttatcgaaatgtattgaaagagtgcggatatgaagagaccgctattacagaaagactggaacagacctttgaaaccatattttacggaacggaggcagaacgtttttatcatgaggcaggagatgatatggcgtatctggaggataccggcaatcatgatgtacgcacggagggaatgtcctatggcatgatggtctgcgtacagctgaataagaaagcggaatttgaccgtctctggaagtgggtgcggacttatatgtatattccggaaggaccctgccgcaactattttgcctggtcctgcagcacggatggaacgcacaatgcggagggaccggcgccggacggagaagaatatttcgccatggcattgttttttgcatctgcccgttggggggacggggaaggaatatttgcttacagcaaagaggcaaaggcaatcctgcgggaatgtattcacaaaggggagcctggacatccgggagaacctatgtgggagccttccaatcatctgatcaaatttgtcacaaacatggatttttctgatccctcgtatcatctgccacatttttatgaactgttcgcagaaaatgcggaggaaggagaccgggaattctggaaacaggcagcggcagccagcagagaatatctgcataaggcatgccacaaggagaccgggctttctgcagaatatgcagactatgacgggacaccccatgcaggacatcaggaaatcttcggaaggcatgactggtactacagcgatgcataccgcaccatagccaacattgccatggatcatctctggtatgacaaagatccgtggcagacggagattgcaaaccggctgcagaaattttactgtgaagagcagagagaacactgggacggtgtgttcctgattgatggaacaagactggaagagaaggctctgcatccggttgccattgtggcagtcaatgcacaggcggcactggcagcggacggatcacatgtaaaggaatgtgtagaccgcttctggaatactccgctccgcaccggggacagacgctattatgataatttcctgtatctgtttgccatgctggcactttcgggaaattacagaatttatcggaagtgagaaagaagaaaatatgccagaggaatatttgaagtacggaccacatggaacggcggagctgttgtcattttcttttggaaaataaattgtcatagatgaaaagagaggtttttcatgagtacagagactagggaatatgcaaaaaagctgacagcgcagatgacactggaagaaaaaatgagccagatgctgtatgaatcaccggcgatcgacaggcttgggattccggcttataactggtggaacgaggctctgcatggagtggcaagagccggagtggcaacagtgtttcctcaggcaattgcccttgcggcaactttcgacgaagatctgcttcagaaaatcggagatgtggtttcgacagaaggcagagccaaattcaatgaattctccagaaagggagaccgcggaatctataagggactgactttctgggcgccaaatgtcaatattttcagagatcccagatggggaagaggtcatgagacctacggggaggatccttatctgaccggaaaactggggtgtgcttatatcaggggattacagggaccagatagagatcacccgaaggcagcggcctgtgcaaagcattttgcggtgcacagcgggccggaggctctccgtcatgaatttgatgcaaaggtatcaaggcacgatttatatgacacttatctgtatgcttttaaacgctgcgtcaaagacgccggagtggaagcagttatgggagcttataaccgagtcaacggagagccggcatgtggaagcaggacgctgttaaagaacattctgcgggacgaattcggatttgaaggacatgtggtatcggattgctgggcaatcaatgatttccacctgcatcaccatgtgacggggattgcggaagaatctgctgcaatggcggtgaacaatggctgtgatctgaattgtggaaatgcttttttgcatttgccgaaggcttatgagatgggacttgtgagtgaagaagccatcacagaagcagtggagcgtcttatggagatccggatccggcttggcatgatggaggattacccttctccctatgcggatatttcctatgagaaagtggagtgtccggagcatgtaaagctgtccgtggaagcatcccggagaagcctgacgctgttgaaaaatgaagaggactttctgccgcttgagaaagaaaaaatctgcactattgcggtgatcggtccaaatgctaattccagagatgcgctggtgggcaattatgtgggaacctcttcgcaatacatcactccattggagggaatccaacagtacgtgggagaagaaataagagttctctatgcgcaggggtgtggtctgtataaggataaggtggaaggcctgggcgagaggaaagaccgcatgcaggaagctgtgattgccgtggaacatgccgatgtggcagtaatgtgccttggactggatgcaaccatagagggagaacagggcgatgccgggaatgaatatgccagcggagacaaactgggattaaatctgccgggacttcaggaagaacttctggaaaccgttgcagctatgggaaaaccggtggtggttctgttaatggcaggaagcgccatagatctgtcatgggcggaacacaacccgaatgtgaaagccatcgtggattgttggtatccgggagccagaggtggtaaggcaattgccgaaatgctgtttggagaattttccccctccggaaaactgccggtgacattttatcagggaacagaaaatcttccggaatttacagattacaatatggcagatcgaacctaccgttataccgataaaaacgtgttatatcccttcggatacggactacattatggcagagtccgttatgaagaggaatgtgtatccggagaaaggacagatacttccggggaggtgaaagtatctgccagcgtgataaatgaaggcaaatatgccttgtgggaaacggtacaggtctatgtgaagagaaaggaatcactggattatgaaccgggatttcaattaaagggagtctcctgcgtgcatcttgcaccgggagaaaaacagaggatcgaagttacactttcccctcgggatttcgcatatattaccgaagagggagactgtgtagtaagacccggggaatacctgattgccattggtggacagcagccggatgaagaaagtgaaagacttaccggtcaaagggtaacctgcctgaaggtggaaaagacgggaagcagtatttctgtggaatattagggatgactatgaaagaagagaagacataccggcaggaagcagtggtgccggatcggggactgccctttaagctattccgtttcgaaggtgcagacggaaaatatattcgtgaggcgcatcagcactgtagtgttgaaatatttgccgtacgggaggggaaagcggatgcttaccttggtgataaaaaatacgttctttcggcaggagagttcatgattgtcaatagtaatgaggtgcattccattcatacgtcgggacgaaatgaggcaattgttttacagatcccaatggaaaaacagataatgcggttttccggtgaaaaaagggaagaggatgaaaagctttttgcattacttgagaaaatgtacagacagcagatcagaaaagagtacggctatgaattattgatgcagagtatcttttatcagctgaaataccttttgataactgtttatcagatgccggatgaaaggaaggaacattgtactgaaaacaggaaaatgggacaccttggaaagatcaccggatatctgcaggaacactatgcggaagaaatttcgctggaaacgttggcagcaacgtttgggtattgtcccacttatttatctaaaatgttccgtcggtatggcaggatcaattataaagattatctgcggagtatccggtttgaacatgcattgcgggaactggaggaaacggatctcaccataggtgaaatagctctaaagaacggtttccccaacagtcaggctttttccagactgttccgggaaaaatacggtattctgccgacagagtaccagagaagacaataaattccgtacaaaattcctgaatcagggattttgtacggaatttatttattcctttaatatttcttccagcaggacggcagcagaatcacgagcatggggaagagctccagtctgccggccagcatatcgaacatcagcacacatttggacaggggactgaacaaagcgaaattctgggtgggaccgactaattccagaccaggaccgatattgttcagggtggccagtactgcggtaaagtttgtgctcaggtcatattcgtccagacagacgatcagcagggaaacgaagagtacgataaaataagccgtcatatagacattggtggaacgaagcgtctcgtgggacagattgtgtccgtccatcttgatctttttcaccatccggggatggatcatcatggacagctccttgcggatcgccttgaagaggatcagcacacgggatacctttataccgccaccggtactgccggcacaggctccaatcatcatcaggagcagaaggatcgttttcgacaattgcggccacatattgaaatccgtggtggcaaatccggtggtggtgatgatcgttcccacctggaaaaaggagtgtcgcagtgtctctcccaaagttgcatagagcgggcggatattccaggcaatcgtcagagcactggcgaaaatgatcaaaaaataccaacgaacttcttcgatggaaaaagcttccttaaactgcctgcttaacagacagaaatataccgtataattgacaccgcttaagatcataagtaccgttacggcattctgtatcagtggagagtaaccgccgatactgctgtttttgacaccgaaaccaccggtgccgacactgccgaaggtcgtacacagggaatcaaacaacggcataccgcacaggcacagggcaatcacacctaagatggtaatggcaagataaagtccatagagaatcttcgcagtatcccgtactctcggtaccagcttgctgacggaaggaccggggctctccgcacgcatcaggttcatggtggagccacccatcatcggcaggatcgccataataaatacaaatacgcccataccgccgatccagtgagtgaagctgcgccagaacaggctggcatagctgagtgcttccacatcggacaggatactggaacctgtggttgtaaagccggagatcgtctcgaagagagcatcaatataaaaagggatctctccggtgagaacgaagggaatcgcaccgaaaacagacatgacaaaccatcccagtgcaacggcggtgaagccttccctgacgtacaattccttaaaacgtcctgtgtgcctgaagcttaataattttcccaaaatgaaacaaacaactgcggtcgccagatagatcagtgccacatgatattctccgtagatcatacccacgatccagggaagcagtaaaaataaagcttcaaattgtaaaataaatccgataataaaactcaatatcgcaaaattcatgataatgtccttttataaaattacccttcaataatatctttaatatcattcagccgtgcatgtgtcagtactacgaccacataatcgcctacatggagttcatcctgaccactggggataatagcctgtcctccgcggacgatggaacagaccaggatatttttccggatgtgcagacggttcagaggtacattggtaacggcagaatcctctttgatgtagaattccagtgcttccgcatgaccgtcttccagcttatacagattctccacgttactgttgagagattcattcatggatcgtgcatatttaatgatcatatctgcagtcaccaggcgtggataggagatcgtatccagtttgatatcacttaagaccccactgaagttgatacggttgatcttggtgactacctttgcgcgggaagtccgtttcgcatacagtgacaggaggatattttcctcatccagtccggtcagtgcagcaaaagcatccacgttctccagaccttcctgtatcagaagacgttcatccgtaccgtcaccgcagatgatggaagccttgggaagcagctcgctcagatgctcacagcgggcgggatcctgatcgatgatcttggtatggatgccgacttctaaaagtcttcttgccagataataagcaatggttccaccaccgacgatcatggcagtacgtgccctgccggcgccgataccgatctttttgaagaaatcattggccttgggaggagtggacacaatagcaaccacatcgccttcccggaatacaaaatcacccctggggatcagcacctgatcacctctggtgaccatacataccagtacatcacattttaaggtggtacggatatggatcagttcataattatttaagagacagtcatgggtcacgcggaaatgcagaagctcgatccttcccttggaaaaagtatcgatcttaactgcggaagggaactggaagatccgggcgatctcagctgcactggacagctccgggttgatgatcatggcaagccccagttcttcccgcagaaaagcaatctcattattgtagattggattgcggacacgggcgatggtcttacaatgtcccgcctttttcgcaatgacacagcacagaaggttctgttcatcggatccggtcacggcgatcagcagatcagcatggtcaatgccggcctcggacagtgtctggaagctgacaccatttcctacgatgcccatggcatccagatcatccgtgatggaattcactttttcctcatttgtatcaattacggtgatattgtgattttcacctcccaattgttctaccagggtgtagcctactttgccgcagcccacaatgataatgttcataaatatcctccaaaatgaaattcataaagacaatatcaatcattatagcacactatagaaaaaaagagaagaatggaaggaatatcttgtccgcggaaacatatattgaactattcagaaacacgatacatggaaatcatgggaaacatcgaatcagaaatatcagccgggatgcggggaaaagcaccgatttgctatgggaggtggaacatggacagcctgcttcggatctttccgcaaaagagaagagatttttggaaagtgaccgcggacaaagcacaggaggtatgtgagatcaggctccgggtggacaggccggtgatcattgagacttcccggggagatttttttctggatcatagcggaatctggcgggaggaaccatatggggcatactccgtgacggagacggagatccgggacctgatcgcctatttgtgtcaggactccgtctacgcctacgcggatgagatcagacagggatttcttacagtggaagggggacacaggattggtttaagcggacaggctgtgctggaaaatgagaacagtctgcggacattgaaaaatatatcctttgtaaatatccgcgtagctcatgaaatcaggggtgtcgcagataaaatacttccggagctttataaagcgggacgatttcaaaatacgctgatcgtatcaccgccgggattcggtaagactacgttgctccgggatctgatccggcagctgtccgacggcaatgcttacggaccgggacttcgggtaggagtggtagatgagcgctcggagctggccgggtcttaccgggggagaccccagaacgatctgggtatgcggacggatgtgctggatgcctgcccgaaagctttggggatgttattgttattacggtcaatgtcaccgcaggtgatcgctgtggatgaactgggggaagaacaggatctgagagtgcttcacatggccgcatccggcggctgcagcctgctggctacggtgcatgggtcaggggaagaggatgcagccagacgtctgggtggagaatatatgagagaaatgtttgcccgcattgtgatcttgaaagggagggggcggatggaatgcagatgcttggaggggggatgatcctctgcggctgtctggggctgggtatgtggtatcgcggacagtttttgatgaggttacatatgaccagggaactgatctgtctcctagatcagtggatcagtgagatccgttataacagatctacactgccggaaggatgcagacagatcggcagacagcgggaagaccggctgggagagatctgtaacagggtatatcgggaatacgcagaggcgggaggaaccggtttcctggaaatcgccggagagagttttcgcaggcagttggaagcgttgccgttaaaaaaagaagaaatcgatcaattcctgatttttgcgggaaaagaagggtatgcggatgagaccatgcagattcgggcgatggaattgtccaaagagggattggagcggacagccacagcacaacagcgggaaattacgcagaaatgtcggctggcggtaggactgggtgctatgagtgggatgtttttggtgctcctgttgctctgaaagataaaaaacaggacaaaaaaggacggggaaagatggaaataggactgatctttaaaatagcagcggtagggatcctggtgacaatactcagtcaggtcctgaaacacagcggcagggaggaacacgcttttctgataagtctggcgggactgattctggtcctcagctggattgttccttatatttatgatctgttcgataccgtgcagaccctgttctcgttttaggaggaaaaatggcagagatcatcaaaatcacattgttgggaattgccggagtattgtttgctattcaattcaggcagcagagaccggaatatgcattactgatcggtttcgcactgagtattctggtattttcttttgtgtgccggatggcgggaagtttgttggaagagtttcggggattgcagcaatatctcggagattctaagggataccttgggattctgatgaaggtggtggggattacttatctgtgtgaattcagtgccggtatctgcaaggatgccggattctcgtctgtctcggatcagcttgaaatcctgggaaaactgtcggtgctgtttgcgggcctgccgatcctcctgtcggtgatccggcagatctacagtatgatgtaggagcgcggagacagatggatacgatgtggcaggaatatgggatagaggaattggaaaagggaatgcagaagctgttcccgacttttcgaatctctgtgacagatctgatgacacagatcctgcagggagatattctgggggcggtggggtgtctgttgaaagaagtcatacgggaaatgagcaattccgccaccggtatcagaaatatattgatctggttgattgtactggggattctgtcggcattgctgattcattttgtggaagtatttgataaacaccagatcgccgatctgagtttttattttatctatctgttaatgggtgtgattcttctgcaatgtttttcgggagtattggaaacggccagagaaacggtggagaatatagtactttttgtccggctgatggtgccgacctttctgttgaccgtaggcgtggcttcgggaccggttacggtgggagccgggtaccagcttatgctattgttgatctacggcacggagaaaattcttctgggagtggtgctcccgctgatttacagctattgtctgctgacgatgatcaacggaatctgggtagaggaaaaactggcacttttggcggatttactggaaaagctgatcggatggatcctgaaggcttccctgggtgtggtcacaggaatcagtctgttccagtcgctgatcacaccggtggtggattccttgaaaaattccgcagtggagaaggctgtctcggtactgccggggatcggaaatgctgcggatggggttctggagctggcgcttggatcggcagttgtgatccggaatagtgtaggagtattgttactgttactgctggtggcagggtgtgcggttcccttattacagattttgttcacggcaggatttatcaaatgtgccacggcatttatgggaatcgtcagtgataaaagaattaccaattgcacggatcgtatgggaaatgccatgatgcttttgttccgtaccgtaggaacggcgctgctgttgtttatggtcacactggcgcttctggcgatcggcagcagggggatatagaaaatgcaatggttatatcatgtgatcggacaagtggggattttcctgatctgtgcgcagacattgatacatttcagacccagagagtcctatgaaaaatatttaaaacttttgttgtcggtcatgcttctgatccagttattgcagccgcttttgacggtgctgggaggggatgaaatcgcaggcaccgacgtgcaggcggcggagttcgcagaggaaatccggaccgtattggaacaggccgctgtgcaggcagaacagacagaagatgagatacaggcggtcacagatactgcggcggaagtaacggaagaaacggaacctccggacgcttcggacccggtgaagatccgggtggaaatcccggaaatagaggaagcagaaataaaaatccggtagaaagaggacgggaaatgatggaaaaattattgggaaaaaaatggtttagcagagataatctgttgctgctggtcctgctgggagtcctgttgttcgtcattgcactgccggtaaaaaaggaagacagcggaaaggggcaggagaaggaaaatgcagcggcgatgctggaagagctaacggcatccacacagacagtgaccgccggcagtacggaagaatatgcggcatatcttgaagaaaagttaaaaaagatgctggaagcggtacggggactgggggaggtcgaggtcatggtcacactggaatcttcggaggagaagatcgtggaaaaagatatgacggcagaacggtccaataccgaggaacaggatgctgccggaggagccaggacggtaaatacctctaatacagagtaccggacgatataccgggaggatacgggaggggatccttttgtcgtgaagaccattacaccgaaagtggagggggtactggtcgtagcggaaggcgcggggaagggcaatatggccggtgagatcacgcagatcatccaggcactgttcggagtggaagcgcacaggatcaaggtgttggaaaaataaagagcgggaaacatatccggcgaaaggggtacatacaatagagtataaaatcaagaaggcagatacaggcctttggaaaaggggaacgcagtgagaaacttaatcaagaaaaatcagcttatgattaccgcacttgccattatgatagccattgcaggttatctgcagtttgcggggaccaacctggaaaaggagtatctggcggcggatgatgcggatacattaagtgcggtggactccacggatatcgttaccgatatggaaagtctggattccgatatggatattgtaatggaggattatctggaggaagatatgcaggtggcggaagcaacaccggaggaaggagagattcccggggaagcagtgctgaccggaacaagtggtgtggaagtgctgtctgctgccagactttccaaggaacagaccagagcccgcaacaaggagacactgctggagatcattaatagtacggaactgagtgatgcgcagaaacaggaggcggtggacagcatggtgcgcatgacggatattgcggaaaaagaagcggcagcagaagtgcttctgcaggcaaaaggatttcaggaagccgtggtcagcatcaacggggatgccgtggatgtggtgatcaatgcagcggaactgtccgatgtacagagagcgcagattgaagatattgtaaaaagaaagacggatattgcggcggaaaatattgttatcagcaccattgtacagtgatatttttgtgtacataggaaagaatttatgttatgataccaagggttacaagccaaaagtctacgcaagcttgcttgcgggagacttttaggattaggaacccgtaccacatgagcaagtagccattttcaaagaaaatgagcggattgtgaatgtggttcagattgagagagtgcgaagcacggaacaatctggaaggtatcataataacccggaaaagaaaaaggaaaaatgatgaagagagtctttttaattgtactggacagcttcggtatcggtgaaatgccggatgccgaagcttacggcgatatcaatgtaaatacgctaagaagtgtatccaaaagtccgtatttccatatggaacatatgcgggatatgggattatttcagatcgatggtgtgggagtgggagagaaaaccgaacatcccacagcggcttatgcccgtatgacggaacgttcgagaggaaaggatacgaccataggacactgggagattgccggtatctattcgccaaagcctctgcctacgtatcccaacggtttcccggaggaggttctggaagagttccggcttcgcaccggaagagatattctgtgtaataaaccttattccggcacccaggtcattgcggattatggggatgaacacgtacgcaccggcaagctgatcgtatatacttcggcagacagcgtatttcagatcgctgcacatgaggatgtggttcctgtggaacagttatacgattattgtcgtattgccagacagatattacagggagaacacggcgtgggtcgtgtcattgccagaccttttgcaggtgagagcggacattacacccgtactcccaggagacatgatttctctctgctgccgcccgcagttaccatgctggatcagctgaaggctgcaggaaaggatgtcattgcagtaggcaagatccaggatattttcgtgggcaaggggattaccgagcatgtctatacttccggcaatgcagagggaattcagcggacactggaatatctggataaggattttgaaggactgtgttttattaacctggtggattatgacatgctctacggtcatagaagagatgtggacggttatgcgaaggcactggcatattttgatgagaagctgccggagatccaggcacatatgagaccggaggatattctgatgatcacggcggatcacggctgcgatcctgcctatacgaagaccacggatcataccagagagtacacaccgtttctcatgtatggagcaccggtggttcccggcaatcgcggaacccggcctgctttttccgatattggtgcgacggtattggactatttcgggatccaaccggaatttgaaggaaactctgtattaaaggcagatccgtcatagaaagcagattatcaaatctgcaaaaatagatttttgatatatttggaggactataatagtgagtaattatacagaagagatcaatcgtcgccggacctttgccattatctctcacccggatgccggaaagacgaccctgacagaaaagttcctgctctacggaggagccattaacctggcgggtagtgtaaaaggtaaggcaaccgcaagacatgctgtgtccgactggatgcagatcgagaaggacagaggtatctctgtcacttcttccgtattgcagtttgagtatgacggctattgtattaatattctggataccccgggacatcaggatttctcggaggatacttatcgtacccttatggcggcggactccgcagtcatggtcatcgatgcatccaagggtgtcgaggcacagacgagaaagctgttcaaggtctgcgttatgcgcaagattcctatttttacgttcatcaacaagatggaccgtgaggcaagggatacctttgagctgttagacgatattgagaaggaactgggaatcgctacctgtccgatcaactggcccatcggttccggcaagggattccagggcgtatacgaccgtgagaaaaagtgtgtgatcgcttactccgatacggagaagggtacgaaagagggaacttccacagagatccccatacaggatgaggaacatttgaaagaactcatcggagaagatgcggcggacaagctgttgggagaggtggaactgttggatggtgccagcgcggagtttgacctggatgaggtacagaaaggtaacctgactccggtatgctttggttccgcactgacgaatttcggtgtggagatcttcctgaaacattttttgaagatgaccaccactccgctgcccagaaaggcagacattggtctgatcaatcccacggagcatgagttcagtgcctttgtattcaagattcaggctaatatgaacaaggcacacagagaccgtattgcattcatgcgtatctgttccggtaaattcgatgccaacatggaagtacgtcatgtacagggcaataaagtcatgcgtctgtcccaaccccagcagattatggcagatgagcgaaaaatcttaaacgaggcctatgccggagatattatcggtgtgttcgatcccggtatcttctccatcggtgataccctgtgtatgcccaaggaaaagttccagtacgaaggaattcccacttttgcaccggagcattttgccagagtacgtcaggtggataccatgaagagaaaacagttcgtcaagggtgtggaacagatcgcgcaggaaggtgccattcagatcttccaggagttcaataccggtctggaagagatcatcgtaggtgtagtcggcgtgctgcagtttgatgtcttgaaatatcgcctggagaacgaatataatgtggagatccgtctggagaatctgccttatgagcatatccgctggatcgagaataaggacgagatcgatctgaccaagctgtccggtacctcagatatgaagaaggtcaaagatatgaaaggcaatcctttgcttctgtttgtgaattcctggagtatcggtatgaccctggatcgcaataaggggctggtactgacagagtttggcaggaattgatcagaaaacagtaaagtgtgtagggggaacagaatgcgggagatgaaaaaaatatttgccggaattctcatgacagttcttctgacagggtgctcttcacaggagattctgtcggaagtgccgcagaccatcgtattgcccgaggaacagatcgatagtctgcccatgcaggaagaggatccaacgtccgcagaaaccgaaaatacagagagcttttccctcctggaggagggaggctctcgttttgcatatgagagtctggaagctccggaacagatctggtatctggagatcgaacaggcactgggagagatggaaggcacggtcaaactgtccacggatcccctggagcagggactggatgagcaggacatcgataaaatcttccagtgtgtgatgatcgatcatccggagattttttatgccacaggatatacctatacgaaatattccagaggagaaaaaacggttggaattgatttcgcaggaagctatgagctgacggaagaggaagcaatagtccgggcggaacagatccggaaaataacggcggactggatacgtggaatcggcgaggacaaaagcgagtatgaaaaagtaaaggcggtgtacgagcagatcatttttgcgacggactatgatctgaatgccccggacaaccagaatatctgctccgtattcctggaaggagcgtctgtctgccagggatatgccaaagcaacgcaatatctgttgaaccatctgggagttatgtgtacgctggtgcagggaaccgtggataccggagaggcgcatgcctggaatctggtcagggtggacggagattattattatgtggataccacctggggagatgcttcctatcgcatggaggatggcagcgaacaggagggattgtcggagatcaattatgattatctgtgtgtcacaacggaggatattctgcgtacgcaccggatcgagggcgtggtggccatgccggaatgtacggctatggaggccaattattatgtccgtgaaggcaattattttacggaatataacagggaacagctgcagaggatctttgatgcggccagagaaatgggcagaacggatattacgctgaaatgtgcggatgagacctgttaccgtgaaatctgccgggtactgatcgatgaacaggagatattctcttacattccggacagcaacagtacgatctcctatgcacagaacgggaaacaattatccttgactttttgggtgacaaatgaatgaatctttggtagaatagatacaaatagtttttcatagatttacagataatcaggaggaacatatatcatggaaagagaaatagataaaaagaacctggtattaaaagaagatgaaagcatcggtaccgtacagatcgcagatgatgtagtggctatgatcgcatctctggcaacgaccgaggtggatggcgtcagcgcaatggccggcaacattaccaacgaactgatgagcaaagtcggtgtgaagaatctgaccaagggcgtaaaagtagaggttcaggacaagaacgtaacggtagatctggcagtgaccatggaatacggatacaatattcccgcaacctgtcaggcagtacagcagaaggtgaaaaacgccattgagaatatgacgggactgacctgctctgatgtgaacatccgtattgccggtgtgaacatgaagaaggacaaataagaggaattacaggaagatattatgggaagacacgagcagagagaacaggtttttaagcttttattccgtgtggagtttcattcaccggaagatatgccggaacagcttgcattgttccgcgagaataatgaggaagttccttcctggcaggatgcggatgccattgcagcccgtttcgagaagattaaggacaagatcccggaactggataaactgttgaatgagaataccgaaggctgggataccacccgtgtgggaaaggtagaactcgcagtgttacgtctgggtgcgtatgagctgcgttatgatgacgatatcccggacggggtagcgatcaacgaggcggtggagatcgccaaaaaatacggtcaggagagctccggcggattcgtcaatgcgatccttgccaagattatgaagtccggtgagtagaatacaaaatgtagtcagcgtacgacaactgaatacttatatcaaaaatatgttcacgcaggattactttttacagacggtgtttgtaaaaggtgaggtaagcaactgtaaataccatccctctggacatatttattttacgttaaaggattctgcaagtgccctgaactgtattatgttcgcgggagaccgcagaggacttgctttccgtctgacggaagggcagcaggtgatcgcgaaaggttcggtgagcgtttttgagcgggacggcagatatcagctgtatgtgaaggaagtaaccttagacggtgccggtgccctgtatgaaaaatacgaacagttaaaacgggaactggcggaagagggcatgttcgctccggaatataagcagccgatccccaaatacattcacacccttggtgtggtgacggcggataccggtgcggcggtgcgggatatcatacagatcgccaccaggcgtaatccttatgtacagatcattctgtatccggcactggtacagggagcttctgcggctccgtcgatcgtgaacggaatccgtgcactggagagacagggcgtggatgtcatgatcgtgggacgcggcggcggatcgatcgaggatctgtgggcatttaatgagagaatggtggcacaggcagtatttgactgtacggttcccatcatttccgcggtgggacatgaaacagataccacgatcattgactacgttgcggatctgcgggcaccgacaccgtccgcagctgcagaactggcggtgacggcagcaaacgacatcgatcaggagatcctgagcggacaggagaggctgtaccggcagatggacagggtgctgcagcgtaagagacagcaggcagaacagcgggagatgcgcttgaaatatttaagcccggccaatcgcatccgtgagaagcggacttacagcatacagctggaagaacggttagagaaccggatgcagacgatcctgcgggaccgcagacacaccctggcactttatattgaacgaatgaaggcagtctcgccgttagagaagttgaacagtggtttctcgtatgtggaagctgcggatgggaaaaatatccgttccgtgacgcaggtgcatgaaggcgacagcctgcggatccgggtatgtgatggcgtgatcgatactaaagtggaacaggtgcagcagggagacagattcaccgtgtgatccagggaagaggaccatggacggaggtattaattttggcaggaaaaaagaaagcagaagaacaggaacaacgcagtctggaagaaaatttttccgaactggaggagctgatcgaacagctggaagcagaggatatctctctggaggatgcgtttacggcatacagtaagggaatgaatgtcctgaagcaatgcaatgaacagatcgaccgggtggaaaaacaggttatgaaactgaatgaagaaggcggactggaacctctggatccgcagtaaatataccggcaggaagaggaaggacggcattgacatggaagaaacgatattcagacaggaattacagaagagaacgacagcaatagaggatcttttgaaacaatatcttccggcagaggaaggatatcagaagacggtcattgaagccatgaattacagtctcatggcaggcggaaagcgcttgcgccccatgctgatgcaggaaacataccggatgttgggtggtgaggatgatatcatagagcctttcatggcagccattgagatgatccatacttattcgctggtgcacgatgatcttccggccatggacaatgatgaatatcgtagaggacgcaagaccacctggtctgtatatggcgacggtatgggagtgttagcgggtgacggactgctcaactatgcctttgagactgcattccgcgcttttccggcatacgccgcgggaaaaacggtggatgagaattatccgagagtagctgcggcactgaatattttagcccgtaaggcggggatctacggcatgatcggcggacagaatgcagatattgaggctgaggaacagaccacacccctgactacagagcagatcctgttcattcatgccaacaaaacggcagccctgatccagtcagcaatgaccatcggtgccacactggcaggagccacggacgaggagatcgcagctctggagttgtgtgcctacaatgtcggcatcgcatttcagatccaggacgatattctggatgtgataggagacagcagggagcttggcaaagccaccggcagcgatgcacagaatcataagcagacctatgtgacattacacggactggaggaatccggcagggaagtggaacggcttaccggggaagcggtagcggttttggatggtttctcgggagaacatgaattcctgaaggaactgttgctgcatctggtccacagaacaaaatagcagaggaaaagcgaatgttactggataaaatcgaaaaagcaaatgatattaaaaagatagataaatcggactacggggaactggcggaggagatccggcagttcctgattcagaagatcagtgtgaccggaggacatctgggatccaacctgggggctgtggaactgaccatggcgcttcacctggctctgaatcttccggaagacaagatcatctgggatgtcggtcatcagtcttatactcataaaattttaacgggccgcaaggacggcttcgatgtcttacgccagtttcatggcatgagtgggttcccaaaacgaaaagaaagcagttatgatgcatttgataccggccacagctcgacttccatatcggcaggactgggactggtaaaagccagagatctcaaaggggagaagacgaccattgtatctgtgatcggtgacggatcccttaccggaggtatggcatacgaagcattgaataatgctgcaaagctggagaccaattttatcgttatcctcaatgataacaatatgtccatctccgaaaatgtaggtggtgtgtccaaatatctgaataatatccgtacagcaaccggctatctcgatctgaaggaaggaatctataatgccctgaagagtaagccgggcggagacggtatcgtaaatcgcctgcgtcgtgccaagagcagctttaagcagctggtgatccccggtatgttttttgaggacatgggagtgacttatttaggccctgtggatggacatgatatcgagggactgatcaaggtcattgaggaagccaaaagagtcaagggtgcggtgctgatccatgtactgacccagaagggcaaggggtacggaccggcagagaaacaccctgccagatttcatggggcagaaccttttgatattgagaccggaatcccgtcccacccccggacagtagcgaattatacagatgtattttctacggtaatgtgcaagctggggcagcgggatgaacgggtggtggccattacggcagccatgccggacggtaccggactgaagcgcttccggaatatgtatcccgaccgttttttcgatgttggtattgcggaggagcatgcggttacgtttgcggccggattggcggcaggcggcatgaagccgatcgttgcggtatattcttcttttttacagagagcatatgaccagatccttcatgatgtatgcattcagaatctgccggtggtatttgccatagaccgtgccggcctggtaggcagtgacggagagacacatcagggaattttcgattatacgtatctgtccggtattcccaatatgcacatctgtgcaccgaaaaacaagtgggagctgtcggatatgatgaaattcgcagtggcactggaagcacccattgcggtgcgctatcccagaggtaccgcttatgcgggccttgctgaataccgtgcacccattgaactggggaaggcggagtggatcgtgagagagggcggcattgcactgttcgccgtaggcagtatggtgaagactgcggaagaagtacaggcactgctgcatgaaaagggttatcgggcaagtattatcaatgccagattcatcaaacccattgatgaggaagtggtgttgtctgcttgtgaggatcatgacatgatcgtgaccatggaggaaaatgtgttaagcggaggcttcggggaaaaggtgctgacctgcctgaatgatcatgacaggcagatcaagtgtgttatggcgggaattccggatgcttatgtggagcacggaaatgttgatcttttgaaaaaagagatcggactggatgcagtaagcattacagagaaaatactggaaaagttataagagttatagcaataggagatgtatatgaaagaacgactggatgtgattctggtagagcagggctatgccccttccagagaaaaggcgaaggcaatcataatgtccggtaatgtctatgtcaacggacaaaaggaagacaaggcaggcaccggcttcgatgtcagtaagatcaaactggaagtccgggatcataccatgaaatacgtaagccgcggtggactgaagctggaaaaggcaatggagcagtggggctttttactggatggcatgatctgcatggatatcggagcgtctaccggcggattcacagactgtatgctgcagaacggtgccacgaaggtttactccgtagatgtgggacagggacagttagcctggaaactccggaatgacgaacgtgtggtgtgcatggagcagacgaatttccgttatgtgaccccggaggatattccggatgccctggatttcgccagcgtggatgtgtctttcatctcgctgaccaaaatattgattccggcgagaaatctgttaaaggctgggggtcagatggtatgtctgatcaagccacagttcgaagcgggcaggggcaaagtcggtaaaaacggcgtggtcagagaacctcagatccatgaagaagtgatccgtaagatcatcgattatgcggacagcatcggattcgaggtactgcatctggagtattcccccatcaaggggccggagggaaacattgaatatctgctgcatatccgtaagccggaagagattacggaggaaaagctggcattgaacgagcatgaagcggagagtgcattgaagaccatcgtggaggaaaagaccggattgtcttatacaccggagtgggatgccctgatcaaaggaatcgtagataactctcatacactgtaacagacaaggagtgcaggaaacgatgaagcattttctgatatataccaataaacataaagatcaggaacttgcgaccacgaagcggatccaggactatttggaatcgaagggctgtaccgtgaagctaaaggtcaaggagtctgactggaaagaagagacagatgctgcggaggaggaagcaacgggtattcctctggatgtggattgtatgatcgttttgggcggtgacggaaccgtactgcaggcagccagagagacgaaaaaaatcctggtgcccatcatcggagtgaatctgggaacggttggttacatgacggagatcgaactgtccggactggaggaagcgctggaacgcctgatccgggatgattataaaaaggaacgccggatgatgttgaacggcaaggtctgctgtgcggacggcaccgtgtcggagggctgggcactgaatgacattgtcatctcccgaagcggcactttacagatcatagaatttaacatctatgtcaacggacagctgctaaatcattataaggcagatggtatgatcgttaccaccccaacaggatccacaggatacaatctgtcggcgggaggaccattggtagagcccaaggcgaagctgatcactctgacaccgatctgtcctcacagtctgaaccagagaagcatcatattgtcaccggaggatgagatcgttatagagatccccggaggcagagagggtaaaagccagactgtggaagccaattatgacggaagccacaaggtgaccatgtgtaccggagatcacatccgtatcgtgcagtcagagaagatcacggaattcatacagctgaaccaggtcagctttttggatgtgttacatcgcaaaatgagagattcctgacgaattgtcgtaagaaaggcatgaggttaagatgaagaagaccagacatcgcaagatcgtggagatcatagaaaaaaaagacgtggagacacaggaggaactggccggctatctgaaggaagccggatttgcggtgacccaggcaacggtctccagggacattcgcgaattgaaattgtccaaagttcccaccggaggaggtaaacagaaatatgttattctgaagcaggatgacagtcatatgggagacaaatatatccgtgtgctgcgggatggatttatctccatggatatggcacagaacatcctggtgatcaaaaccgtgtccggcatggctatggctgtggcggccgccctggatgcactgaaattctccgaagtggtggggtgcatcgcaggagatgataccattatggtcgcagtgagaacggtggaggatacccagatccttatggataaaattcatttgatgatagtaagatagacagggggaaatacatgcttcgcagcttacacgtgaaaaatctggctctcatccgggagacagaggtagagttcggagaaggactgaatatactgacgggagagaccggtgccggaaagtcattgctgatcggctcggtgaatctggcactgggaggaaagttcgagaaggatatgctcagacggggagaagagagcggcctggtagaactggtcttcgattgcgaggaacccagactggcagaaaaattgaaaagtatggatctggaaccttcggaggacggaacagtgatcttaagcagaaaactgtcctcggggaagagcatctgccgtattaacggcgagaccgtaacggcaaagcagatcaaagagctttcggaattgctgatcgacattcacggacagcatgaacaccagtcgctgctccataagaaaaagcatatggagatcctggatgcttatgccggagcggaattcgcaaagtgcgcagagcaggtgggtgcattgtatcatgaatgtgccgctttagagaagagaatatccgcagagacactggatgatgcttccagaggcagagaacagtccctggcggaattcgaacagaaggagatcgcagatgccgggctgcagcccggtgaggatgaggagctggaacaggcataccgcaaaatgtccaacagccgtaaaattgcggaaagcctggcagagagttatcgtctcagcggtaatgatgcagaagacggtgcggggaattccttaagcagggcactgagggcacttcgcagcgtgactatgtatgatcctgcgctggaacagatggaagagcagctggcagaggtggaaagtctgttatcggattacaatcatgatgtgtcggaatatatgtcggatctggaatttgacgaagaggatttcaggagcaccgaggaacggctgaataccatcaatcatctcaaaggaaagtacggcaatacgatcgaagagatactcaaatacaaagaagaaaaagaagcgtatctggaaaaactggcggattatgatacttatatgcagaaactgaatgccgagtggacggaaaaacagaagctgttggagaagacctgtgaggaactgtccggtatccgtcgtaaaaatgcaaccgtattgacacaaaagttaaaggatgcgctgatcggtctgaattttctgacagtggaatttgatattgcggtcagacccggtcagaccattacggcaaaaggatatgacgatgtggaattcctgatctccaccaatcccggagagagtctgaagcccttaagtcaggtggcaagcggcggtgaattgtcccgtattatgctcgctatcaaaacagtgctggcagggcgggatgaaatcgatactctgatcttcgacgagatcgataccggtatcagtggaaggactgcatggaaagtagcggaacagctgagcgttttatccggagcccatcaggtcatctgtattacccatctgccccagatcgctgccatggcagatgtacattttgtgattgagaagagcagtacggatgatatgaccatcacggatattcataaagtgtcggcggaagaaagcctggcggaactggcaagacttcttggcagtgatgcactgacggaggcggcactttccaatgccaaagaaatgaaagagcaggctggtatgtttaaagaaaccaggtaagggaatgctatagtggaagcgagatcaaaaggatgaaggatgacttcatccttttctttgtgcaaattcaaccaaaataaatcatcaaatttgtgaattaaattgattgaatttgactgaatatgagcatataataacatcataagaacacgaaaggtaacagacaggaggaatggaaatgatttgtactgtgacattcaatccgtcactggattacatcgtatccgtggatgactttcagctgggaatgaccaacagaacttcatcagagctgattcttccgggaggaaagggaatcaacgtatccattgtgctgaagaatctgggtctggattccacagcgctgggatatgtggcgggattcaccggagaagaattgatccgaagattgactgattttggagtgaatgccgatttcatcaaaatcaatcacggaatgaccagaatcaatctgaaactgaaaagtattgacggtacagagatcaatggctgcggaccggatatcgatgcggaagcgctggaacagctgatggaaaaaattgacagattacaggaaggagatgtcctggtactggcaggaagtattccctattcgatgccggatgatatttatcagagaattctggagagaattcagggaagaggtgttctcaccgtagtggatgccaccagagacctgctggtaaaggtattgccgtatcatccttttctggtaaaacccaacaaccatgaactgggggatatcttcggcgtgaagctttctaccagagaggaagtggtcccttatgggaaaaagctccgggacatgggagcacagaatgttttgatctccatggcgggagaaggagcggtactgatcgcagcggacggtcaatgcctggaggctccggctccgaaaggaaagctggtcaatggtgtcggtgccggagattccatggtagcgggattcctcaccggatggctggaagagaaggaatacgcacatgctttctgcatgggaatcgccgcgggaagcgccagcgctttttccgagaatctggctaccaaagatgaagttatgcaggtattgaaactggtaaaatcataacaaaataataaaaagaaacaataaaaaagagagaaagggttacaatatgagaattacggatttattggacaaaagaagtatttccctggatgcagcgcctgctgacaaaaaggcaacactggatatggcagtggaactgatggcgaagagcggaaagcttatggatgtggagcagtaccgtgcacaggtctatgcaagagaggaagagagcaccacgggaatcggcgaaggcattgcaatccctcacggcaaatgtgatgcagtgaagactcccggactggcagccatggtaattaaaaacggtgtggattatgattccttggacggcgaaccggtgacattgcttttcctgatcgctgcacccaataccaaggataatgtacatctggacgtactgagcaaattgtccgttatgctgatggatgagaattttaccacatctttaagaaatgccaaaagcgtagaggaatttttacagatcatcgatgcagcagatgagagtgccaagagcattgacgacagattaagtgataccggcattaccaccgaagagaaaaagagctttaagctcctggcagtgacttcctgcccgaccggaatcgcgcacacttatatggcagcggaagcgctggagaaggcagcaaaagcagcagactgccagatcaagatcgagaccagaggttccgcaggtgcgaaaaatgtactgactgcggaagaaatcgccgcagcggactgcatcatcgtagcggcagacgcaaaagttcccatggatcgctttgacggtaagaaagtgatcagttgtcaggtgtctgacggcatcagcaaggcggatcggctggtacaacaggccatcagcggtgaggtggaaatctttcacggtgagagcggagcggtaaagactgcagtcgccggcaaagaaagtgtggctcataagatttacacacagctgatgaacggtgtatcccatatgcttccttttgtagtaggcggaggtatcctgatcgcgatcgcattcctgatcgatggactgaatgttgacatcaatgcacttcccgcagatcagagaagtaatttcggtacgatcactcccatagcagctatgtttaaaaacatcggcggcgtggcattcggtctgatgcttccggtactggcgggcttcatcggtatggctatcggcgacagaccggcgctggctctcggattcgtaggcggtatgctggcggcaaacggtaagtccggatttttaggagcactggtggcaggcttcctggcaggctacctgatcgtaggactccgtaagatctgtgacaaacttccggatgctgttgaaaaactggcgcctgtattgatctatccggtagtgggtattttgatcatgggacttgccatgaactttgtggtggagccgatcatgggcggtatcaataccggattgaataatttcttaagcggaatgggtgattccagccgggttgtactgggtctgatcctgggcggcatgatggcgattgacatgggtggccctttcaacaaggcagcatatgtattcggaaccgcagcaattgcggcaggcaattatgatatcatggcagcagttatgatcggaggaatgactccgccctgtgccattgcactggcaaccctgttatttaagaataaattcaccaaggaagagcgagatgcaggtcctaccaacttcatcatgggtctggcattcatcacggaaggtgccattcctttcgcagcgtccgatcctctgcatgtccttccttcctgcatcatcggttctgcactggcaggtgcactgtccatggcattccactgcacactgatggctcctcacggcggaatctttgtattccctgtagtgggaaatgcactgatgtatctggtagcactggcggcaggcacggtcgtatccgcattactgcttggtgtattgaagaaaaaagttgcttaatgcttagtcataggaaaataaaaggagaaaaagacaatgaaagaattcaaatatgttatcacagatcctgaaggcattcatgcccgccccgcaggggaactggtaaaggcagccaaggaatttgccgctaatatcactctgaccaaggatggcaagagcggagattgcaagcgtatcttcggtatcatgggtctggctgtcaaagccggcaatgagatcactctgaccttcgacggtgaggatgaggaagcagcatacgcagcagtaacggaatttgtaaaagcaaatctctaaaatagaggaagcataatcgtcaggagaggaaaagagtcatggaagtctaccagggtaaaagcgtattcggcggaatcgctatcggcagaatcagtgttcataaaaaagacgagcagcaggtaaaacgtgtcaggatcgaggactccgaacaggagatcttacgctacagacaggcgaaacagacagccatggagcagctgcagggtttgtatcagaaggctctgaaggaggtcggggaagccaatgccgctattttcgaaatccatcagatgatgctggaagatgatgactataacgagtcggtagaaaatatcatccgcatgcagcaggtgaatgcagagtatgcggtagcttccaccggtgacaattttgcacagatgttctctgccatggatgacgactatatgagagcgagatctgcggatgtcaaggatatttccgagcgcgtgttaagcgtgctcggaggccgggccaccgggattgacgcatccggggaaccggtgatcatcgttgcagacgacctggctccttctgagacagtacagctgaacaaagatctggtgttgtccttcgtgacggtacacggttccgtcaattcccacacggcaattctggccaggaccatgagcatccctgcactgatcggtaccgcaattcctctgacagatgatatcgacggaaaagtcggtattgtagacggaaaaaacgggtgcatttatgtggatccagatgaagataccctgggcagaatgcaacagttaaagctagaggaacaggagaagaaggaattgctccagaccctgaagggaagagaaaatatcactattgatggtaagaagatcatgctctatgctaatataggtaacagcaaggatctggcggcagtattgcagaatgatgccggaggtatcggtctgttccgcagcgagtttatttacctggagagagatacgttccctaccgaagaagagcagtttcagatctatcgtacggtagcggagactatggcaggcaaacctgtgatcattcgtacactggatatcggtgcggataaaaaatgcgattactttgaaatggaaccggaggaaaatccggctatgggttgtcgggctatccgtatctgtctgaccagaccggaaatcttcaagacacagctgcgggcactgttccgcgccagcgcctttggcaatatttccattatgtatcccatgatcatcagtgtagatgagctaaggaagatcaagacaatcgtggctgagatccgacaggaactgacagaacagggagttactttcggtgaaccgaagcaggggatcatgatcgagactccggcggctgtcatgatgagcgaagaactggcaaaggaagtggactttttcagcatcggaaccaatgacctgacgcagtatacattagcgatcgacaggcagaatcccaagctggatgctttctatgatccgcatcatcccgcagtgctgcgtatgatacagatggtcgtggaaaatgcgcataagtccggaatctgggcaggtatctgcggagaactgggtgcagatacgacattgaccagacgctttctggctatgggtgttgatgaattatctatgtctcccggaagtattcttcccgtgcggaagatcatactggagacagatgtgacaaaggaaagagaaaataacaatttatgctgacagaacaacgttatgaggtcattctgaaattattggaagaaaaaaacagcattacggtggccgaggtaaaagatctgttaaatacgtcggaatccacggtgcgccgggacatcacagcattgcataatgccgggaagctggtaaaggtcttcggaggtgctgtggcatgtgaccggacggtgataacacatgaacccacggtggaacagaaggcagaagtcaatgtggaagccaaacagctggtggctgccaaggcggcagcactgatccggccggaggattttatctatctggatgcaggtacgaccacagcaagtatgctttcttatctgacagagaaaagtgccacctttgtgaccaatgcggtagcgcatgccaagacactggcagcagcaggattccgcgtatatctcatcggcggagaattaaaaggctccacggaggctgtggtggggaaccaggcgctgatgactctgcagaactatcattttaccaaaggcttcttcggtacgaacgggatcagcaagcagagtggactgaccacaccggatatgaatgaagctatggtgaaaaagacagccatgggacaatgcagagaggtgtttgttctggcagatcattccaaattcggcaatatcagttccgtgacgttcggttcgttccaaaacggtaccatccttacggacacctgtccggaggaatataaaaacagcggcaacgtggtgatatgtggatagaccggaaaaaaatgtaagacagtaatcctgagatcttcggttaaaaaacagaatgcgacgtacactataccctatacagagatgatagaaatgtagtgggggaatgtgtatgaagctatggatcacagagacggaaaaagtgaaaaggcaggcagaggaagaggccgtagtcatcttacaacactggagacagaaagtaagaagacttcgcctctaccgggcctgcctttgtgctgtgctcattttggcctgtctggggctcatgggttacagttattatctggtggacagcagtatcccttctgtgatccatgtacgtgcggaatcggaggagtcattggaactgagtattcctgccaggggagaaatagttaatgtcagcaggcagggaaacagtaatattcccgatggtgcggtgacgatagatctgagccgtccgttgacgctgaagaccggaaatgcggacaatctgcagatgcaggtgaaattgttcggcatcctgccgttcaaacaggtgggcatacgagtgatcgaagaccgggaattgattccggtgggagtcccgataggaatttatgtcaaaacggaaggtgtactggtagtaggtaccggagagttcgcatcacaaggggcgggaaaagtatctccggcaaaaaatattttgaaaagcggtgattatgtaataaagttaaacggtacggaagtcaccggaaaagatgacttcattacgagaatcgagaactgcggcggagaacaacagatcctgaccatccggagggatgctgagacttatgatgtgagaataaaaccggagagggatcggacgggaaagtataagatcggtgtctgggtcagggataatgcgcagggagttggtaccatgacatatattgacgaaaacgggaatttcggtgcactgggacatggaatcaatgatgtggataccagcacattgatggagatgaatgatggcacactctaccagactgagattatttctatacgaaaaggggcggcgggccagccgggagagatgacgggaatgatcgtatattcggatgacaggatcctgggagatatcacgagcaacagtatcagagggatattcggaaaatgcaatcagaaggcactggcactcggaacggaggaagctttgcccattggattaaaacaggagatagagaaaggacctgcacagattttgtgtactgtggacggaaccacaagatattatgacattgagattacggagattcatctggatcatgacaatgtgaatcggggaattgaacttcgggtaacggatccggagctgctatcggtgaccggcggtattgtccaggggatgagtggggcaccgattattcaaaaggggaaattcgtgggagccgtcacccatgtcctggtgcaggacagcaccaggggatatgggatttttattgaaaatatgctggaatagtcttgcataaaactttccgttactgtacgaccgctttgtccacttcgatgacagtgaagaaatccggatggctggtctggatacgtttggtaatggaatccatgacttcctgatcggagaccggataatcatatgggatcacgatatcgaagatgacattggtatgggtgggacctttgacaatgcgaaaatcatgcatgctaagcttcggatcgatctgatccaggtatccggagacttctgccttcagggaaagggtctcgggatcgctggtgcttacaggatccatgtggatcacagcattgcagttcagctttctgcgcagttcatgttcgatggtatcgatggtatcgtgcagggttataatattaccgtccgcaggcacctctgcatgcagagaaatcagagtccttccggggccgtaattatgtacgatcagatcgtggatgccgatgacattatcataggataatacgatgtcattgatctgctgtaccagttccggctcggggggctgcccaagcaggggactgatcgtgtcttttgctgcgacaaagccggagtagaggatgaacatacctaccagcacaccacagtaaccgtcgataatgataccggaggcggcggagacgatagtgccgatgagaaccaccgtagttgccaccacatcgcttaaactgtcaatggcagtagccttcatggctacggagctgatccgggtaccgatgcggcggttatatagtgccatatagcattttaccacaattgaaaataccagtatgccaataatgacaggggagtaatcaggagcttccggatggaagatcttgcttacagagcttttcaccagttcgaagcccatgagcacgatcaggatagagactaacaatccggagatatattcgatccgcccgtgtccgaagggatggtcagagtccggcttctgtcccgccatccggaagcctaccagcgtaatgatggaggatgccgcatccgacaggttgttgaatgcatctgccgtgatggcgatggaatgactgaataagcctgccagagccttggtagtgaacaggatcaggttgaaacagattccgacgataccgcagagtatcccatatgcctgacgaacgccgggatccgtaacattttcatgatccctgataaataattttgccaataatgtaaccataagataaccccttttctcaaatgagagtttaagggatattgtagcgcatatgtaggaaaaatacaagtgtaagaaatcagcggttgctattgcgcatccggcattttcagtgtataatctccgtggacgtaatgtaagcttttataacggttccgatgtgcaaaccccggaaccgtacaggtaataatgataaaacaaaatggaggaacgatcgatgagaaagaaaccggttgtattaatgatcctggatggttatggattgaatgataaggtagagggcaacgccgtagcacaggccaatacccctgtgatggattccctgatgaaggagtatccttttgtacatggtaatgccagtggtatggcagtaggccttcccgagggtcagatgggtaactctgaggtaggtcatatgaatatgggtgccggccgtattgtatatcaggagctgacccgtatcaccaaagagatccaggatggagacttttttaagaatgaagctctgttaaaagccattgataattgtaagaagaacaacagcgccctgcacctgatgggtctgttatccgacggtggcgtacacagccacattacccatctgtatggcctgctggagctggcgaaacagcagggtctggagaaggtatatgttcattgcttcttagatggacgtgatacccctcccgcaagcggtaagagctatgcagagcagttaaatgaagaaatgaagaaaatcggtgtaggcaagatcgcttctgtaatgggacgttactatgctatggatcgtgataacaactatgaccgtgtacagctggcttacgatgccatgaccgaaggcaaaggtctgaccgctgcctgcggtatctgcggtatccaggagtcttacgacagagaagagaccgatgagtttgtaaaacctactgttgtcgtagaagatggcaaggcagtcggactggtgcaggacaaggattccgtaattttcttcaacttccgtcccgaccgtgcaagagagatcaccagagccttctgtgatgatgacttcaagggatttgaccgcgtgagaaaggatattacttttgtatgcttctccgattacgatcctaccattcctaataaagaagtggcattccacaagatcgccattaccaataccttcggtgagtggctggcagcccatgacatgaagcaggcacgtatcgccgagactgagaagtatgcacatgtaaccttcttcttcaacggcggcgtagagcagcccaacgagggagaggatcgtatcctggtaaattctcccaaggatgtggcaacctatgatctgaagccggagatgagtgctcctcaggtttgcgagaaactgcttgatgcgatccgctctgaaaaatacgatgtgatcgtgatcaacttcgcgaaccccgatatggtaggtcataccggtgtgatctccgcagccatcaaggctattgagactgtagatgagtgcgtaggcaaggcagtacaggcagtgaaggatgtagacggcgttctgttcatctgtgcagaccacggtaacgcagagcagatgatcgattacaccaccggtcagcctcataccgcacataccaccaatccggttcctttcatcctggtaaactacgatcctgcttatacgctgaaagagggtggatgcctggcagatatcgtaccgacacttatcaatgtgatgggtatggagcagcccgcagagatgacaggaaagtctctgttaattaagaaatagtaactgtatcatattactatgacaagaaatgattcctcaggcactttgcacagtgcctggggattttatatctaaattttcttatcagcaggaggaagaattatattatatggaacagaagagaaatctggtaactttaggaagtacgggaattactgtggagaagaactccttcggagcgctgcccatccagcggatctccaaggaagcagccattggactgcttcgcaaagcctatgcggcaggagtgaccttttatgacactgccagatactataccgacagtgaagagaaagtgggcgctgcctttgagggtatgcgtgacaaaatatatatcgctaccaagaccggagccaccacagcagaaggcttctggaaggagctacatacttccctggaaaaattaaaaacagactatatcgacatttatcagttccataacccggcattctgcccgaagccgggagacggcacaggattgtatgaagctatgctggaagcgaaggacaaaggcatgatccgccatatcggcatcacgaaccatcgtctgaatgtagcgcatgaagccattgacagcggactgtatgagactctgcagttccctttctgttatctggcgacggacaaggatctggagttggtacaggattgtaaaaaagcaggcatgggatttatcgccatgaaagcactgtccggcggactgatcaataattcagcagcggcatatgcatatctggcacagtttgataatgtacttccgatctggggagtgcagcgggagagcgagctggatgaatttttgtcctatatagataatcctcctgcattaacacccgcattgcaggcggtgatcgaccatgacagggaagaactgcagggagaattctgcagaggctgtggctactgcatgccctgtcccgcagggatcgagatcaacaactgtgcccgcatgagcctgatgatccgcagagcaccttccgcagcacagctgacagacgagatgcaggcaaaaatgcgtaagattgaagagtgcctgcattgtggcagatgtaaatccaagtgtccctatggactggatactccggcactgcttgagaaaaattataaggattactgtgagatccttgccggaaaagcgtattaatgcatagcagatctgaataataacctccttataggatatacttaactgggaaaaagtaagttaaggatacctgtaaggaggttttttatggaaaaatatctggagatcatcgaagtacacggaagggagatcctggattcgcgagggaatcccacggtggcagcggttgttaccgtgaaggacaaagagaccggcagatgcacaaagggtatggcggcagtgccttccggagccagcaccggacagttcgaggctgtggaactcagggacggtgagaccagatatttcggcctgggcgtgcagcatgccgtaaaaaatatagacgagaaaattgccggtgttttactgggagaaaatgccctggaacagattcatattgaccggattctgcgggagacggatggcacagataataaaagtaatttaggcgctaatgccatgctggcggtatccatggcggtggcaagagcagcggcggaggcactgggacttccgttgtaccgttactttggaggaatctctccgagacttctgccggtacccatgatgaacatcttaaacggcggaaagcatgcggcgaacaccgtggatttccaggagtttatgatcatgcccgtacaggcggaaacctttgcggaagggttacggatctgtgcggaaatttatcataatctgaaaaaactgctagaggagaaaggcttgtccaccggagtcggggatgagggcggtttcgcaccggacctgccggatgcggagagcgtgctggatctccttgtggaagcaatcgaggcttccggatatgtgccgggacaggatatccggatcgccatggatgccgccagcagcgaactttataatgaaaaaacgggaatgtaccatttccccggagagagtaagctgaagggagaggaagtcctgcgggataccggagaaatgatctcgtattatgaacggctcgtagagaactatcccattatctctattgaggacggactggatgaaaatgactgggacggatggcaggagcttacaaaacggctgggagagaagatccagttagtgggagatgatctgtttgtcacaaatacaaaacggctggatgccgggatcaaacttcattgtggtaatgccattctggtaaaggtcaatcagatcggaacgctgtctgaagccttcgaagcggtggagatggcacacaagaatggttacaaggcggtgatctcccacagatccggcgagacggaggataccaccatagcagacatagcggtggcactgaatgccggacagatcaagaccggagcgccctgccgcagcgatcgtgtggcgaagtacaaccggctgcttgccatggaagaggagttaaaggatgctgcggcatatatggagccgtttcgcaagatctgaatggctgtgcaacaaaatgtaaactacaaaaaataaaaaatgtataaacaggaggattttcatcaccggaaatcctcctgcttttatagcaaaacgatagaaaaatacatgagtgaaagaaaatgtacaaaaataaaatgtttaaatatacataatagaagcgtaaaatatacactatatgcatgcttgaaaaacagaaaccatttttattgaaaaagtttttcataaatatacagacatatgtgcgcgctgtgcgcacaccgagaagagacagcgaaagaggcagagtcacggaaactggcagatgcttcatgtgtatttcagttgacacagcctcaaaagtgttgtaatataacaaaagtcgttgtcggaaaagtaaagtacattttacgtacgtgtatacttgcatacaaatgcgaaaaatgtattttattaatgtccgtaggcaaaagaaaagcaaggagttgaagagatgcttaaatatattgcaaaacgtatcggtctggcgctgatcacgatttttacagtagcaacactcacctttttcctgatgaacatggtacccggaggaccgttcctctcggagaaggcagtaagccccgctgcacaagcagccctggaggcaaaatatggactggacaagcctttgtcccagcagtatctgacgtatatgaaagatgctttgcacggtgatttcggagagagtctgaagcagagaggaagaaccgttacttctattatagtatccaagttccctgtatctgcaagagtaggtgggctttccgttatcgtagcgctgttggtaggtatccctctgggatgtctggcagctacccatcgtggcaagacgctggacagcgtgatctccgtgatctccacctgtggtattgcggtaccaagcttcgttatatgtactctgcttctgtatttcctgggaagtaaggtaaagatattgcccacctacggaatcggcacctggaagcattatgtgatgcccgtgatcgcactggcattgtacccaactgcttatattatgagactgatgcgttcttccatgctggatgttctgggacaggattatatgagaaccgctacggcgaagggagtaaagcctttcttccgtctgttcaagcatgcactgagaaatgcactgctccccgttatcacctatgtaggtcctatgatggcttatactatgacaggaagcttcgtagtagagaagattttcacgatccccggtctgggcaatgaatttgtcagctcgatcattaaccgtgactacaccatgatcatgggtaccaccattttcctcgcaacactgatggttgtcatgaatgtgctggtggatatcgtatataagctcgtcgaccccaggatcaagttgaagtaagattaacaggaaggaagataccgatgaaagaaccgaatgctatgagctttcatgtaaaatataaaccggaagattttatgccggcgaacgaagaagagaagcagagccaggtcatcatgcgcgagagcgtgggcttctggcaggatggcttccgcagacttcgtaagaataaggttgctatggtcagcctcttcgttattattgtagttatgatcttttcctttatcgtgcctgcattttatccctatgattacaagacacagatcaaaggaagcgagaatctgcaccccatgcagtattccgagaaagagatagagcgtatggatgcgggagagaaggtattcccccatgtgctcggtaccgataaaatgggccgtgattatgccatccgtgttatgatgggaagccgtatctccctgctggttggtctgatcgctactgccattatttttgtgatcggttccctgatcggttccatctctgcattcttcggtggatgggtggacctgatcatcatgcgtattgtggatattatctatacgataccggatttcctgctgatcgtgctgctgtcctttgcattaaaggatccgttggcaaagctggcacagcttcccggattcggatggatgcaaatcgtaggatctaacctgatcagtatcttcatcgtattcgcattgctgtactgggtaggaatggcacgtatggtacgaagccagatcctgaccctgaaggaaaatgattatgtcatggcagccaaggctctgggagccaaggatggccgtatcattaaaaagcatctgctgaccaactgtatcggtactctgatcgttaccaccacactgcagatcccttcctctatttttaccgagagctatctgagcttcttaggtatgggtgtggcagttccgctgccttccctgggaagccttgcaagtgatgccattaacggaatgatcacattcccgtacctgctgtttgcaccctgtctgctgatcagcctgatcatcttaagctttaacctgtttggcgacggacttcgtgacgcatttgacccgaagcttaagaattaatggaaggagtagtgaagatggataataattatctggtagatatacagcatgaacgtctctctttctttactcctgccggagaagtaaaggcactgaacgatgtctccattcacctgaaggaaggagaagtactgggcatcgtaggagagagtggttccggtaaatccgtaaccgcatacagtctgatgggactgaccgcttatcccggtaagctgatcggcggagaacttcacttcaatggacacgaagtggagaaaatgaccgaaaaagatttttccaaaatgcgtggtaaagaggtttccattattttccaggatcctctgaccagcttaaatcccgtatataccattggcaatcagatcatggaagtgatccgtctgcataccgatgcggacaagaaaaaagcatatgcaagagcagtggagcttttgtcgctggtaggtatcaacgaaccggagaagcgtatgaagcagtatcctcacgagctgtccggtggtatgagacagcgtgtcatgatcgcaatcgcgctggcatgtgaaccgaagcttctgatcgccgatgagcctactaccgcactggacgttaccattcaggcgcagatcctggagctgatgatggagctgaaggacaagctgggtatggcgatcatcatgatcacccatgacctgggtatcgtggcgagcatgtgtgaccgtattgcagtcatgtatgccggccgtatcgtggagaccggtacctgtgacgagatcttctaccatccgaagcatgaatataccaagggcttgttggagagtatcccccgtctggacagcacgaagcatgagaagctgattcccattgagggtaacccggtggatcttctgaatcctcccgaaggatgtgaattcgccccccgctgtaagaactgtatgaagatctgcctgagagagaatcctcctaagacggatttcagtaagacgcattatgcacactgctttatgaaccagaaagccgagatggagggaggaaataccaatgagtgataagttacttcaggttgaacatttgaagcaatacttccccgcaggcggcatgggtaaaaaccgtaagttcgtgaaggccgtggatgatgtcagcttttttgtgaataaaggtgagactctcggactggtaggagagagcggctgtggtaagaccaccaccggacgttctatcttacgattatatgagcccactggcggcaagatcacatttgacggcaatgtgatcctggatgttgaaaataaagtaaaggtggatatgctgccttaccgtcagaagatgcagatggtattccaggatccttatgcaagtctggatcccagaatgaccgtaggagatatcgtaggggaagccatcgacatccataagctggctgctaataagaaggaacgtcatgacaggatcatctccatgctggagaaggtcggactgaactctgagcatgcgaacagatatcctcatgaattctccggtggacagcgtcagcgtgtcggcattgcgagagcactggcagtgaacccacagttcatcgtctgcgatgagccgatctccgcactggatgtatcgatccaggcacaggtggtgaatatgttcgaggagctgcaggagcagatgggactgacttatctgttcatcgcacatgacctctctgtcgtaaaacatatctccgaccgtatcggcgttatgtacctgggcaaaatggtagagctggcagacagctacgagctggtagcacgaagcctgcatccttataccaagagcctgatctctgcaatccccattgcagatcccatcaaggcaagagcaagtaaacgtattgttctgcagggagatgtacccagccccttaaatcctcctaccggatgccgtttccgcaccagatgtccttatgcggatgagtgttgtgcacagaaggaacccgaatggagagaagtggaaaagggccactacgtggcttgccaccatgtggaaaagatcaatgcctgaaattaggtattgacagctgagcaatttagctgtttaatataaagttatacaaagcatagtgcttttgtatgaaaagaaagaggaggataactttatgaaaaagaagttagctatgctgctcaccgcagcaatgctggtaggttctctggcagcatgcggcagcagcgacaatggttcttctgcaaccggcagtgccagtgcaactgacagcaccaagaccgatgcagcagcaactgaagttagtaccgaaggcaaacagcttaccgttcagatcggtcccgatcccgagaccattgatcccgcactgaacagtgcagtagatggcggtaatatgctgcttcactcttttgagtgtcttctgacgattgaccaggatggtaagatcgctcccggacaggctgagacctgggaagtatctgaagatggtcttacctggaccttccatcttcgtgatggattaaagtggtctgacggcagtgatctgaccgcagacgatttcgtatacagctggaagcgtgtatgcgatcccgtagtagcagctccttatgctgagactgttctgggtatggttaagggctttgacgaggcacaggcaggtgatctggatgctctggcagtatccgctcccgatgctaagaccctcgttgtagagctttccaatccctgcccttacttcgagtctctggcagcattcgctaccctgagccctgttcagcaggcaaccgtagaggctaacggtgatgcatgggctaccgcagctgagacctatatctccaacggacctttctacattaccgagtgggtacccggttctcacattaccatgtccaagaaccctaactactggaatgcagatgcgatcaagcttggcagcatcaaattcgtactgatggaggattccaatgcagcttatactgcataccagtccggtgatgtactgttcatcaaggatgttcctacccaggagatccccagcttacagggtaaccccgagttccatgtagagcctaacctgggaacttactatctgtccatgaacctggaagatcctgcattcgcagatgtaaatgttcgtaaggctctgagcctggcaattgatcgtgattatgtagcaaataccctgatgcagggaacttactctcccgcatacaacctcgtaggtgagggctgggtagataccgacggcagctccttcaatgcaaatgctaacggtggtcagagctatatctccgatgatttcgatgctaaccttgaggaagctaagcagctcttagctgatgcaggttaccccaatggtgaaggacttcctaccatcacctatactaccaatgatgcaggttaccacaagactgttgctgagtacttacagcaggcatggggcgagcttggtattaatgtagaagtaaatatcgttgagtggtccagcttcactccgatgagacgtaacggtgagtacatggtagcacgtaacggatgggtaggagattacagcgatccttccaatatgttagacctgttctgcaccggcaacggtaacaacgatggtaagttctccaatgctgacttcgatgcagctatggagaaggcagcttccaccatggataccgctgagcgttccgcagctcttcatcaggctgaggatgttctgatggagcaggcaggatgcatccctgttgcttactacaatgacttctggctgcagagcgagaagattaccggtatctggcattccgcttatggttactggtacttcatgtatggtgacatcgcagagtaagctgcggatctgatcattcagaataaaaataaaggatccccgtgagatcgtaaagatttccgggggtccttttttgtgtcgtcttttcgatactgtcttgtaaaatgttgttgcaattgtgtacaatatatggtaatataaaatctgcttgacattaggaggtgtgaaatggaagcattaagagtagtaatcaacataatttttatattggtatgtgtagcactgacagtgttagtattgatgcaggaaggtaaatccgcaggactgggttccatcagcggcgctgctgagacctactggggcagaaataaaggacgttccatggaaggtatgctggtgaagatcacgaagatccttgcagtattcttcatgttacttgcagtcgtactgaatctgaacgtattttaatcattacgaaggatgacactcttgtgtgcagagcatacaagggtgttttgttttatagatatttattgagagaggttacatgagtaataacgaaatcagagagaagagaaaaaaagtaatctgtgatctggtgaaggatgatttttacgttccgatgaaggaaaaggaactggcaatatttcttcaggtcgcaaaagaagaccgggaagagtttcgtgagatcttgcgggaacttttagcggaaggaaagcttaccctgaccgtaaaagggaaatatatgaagtccaacggtaaggtgttgacaggaacttttatcagcaatgccaaaggctttggatttgtggaagtggaaggaagggacgaggatctgttcattccggaggacaagcagggcggagcattccataaggataccgtggaagtggcacttctgcctgcgaagaccggcaaacggcaggaagcgcaggtcatccgtatcattgccaggggaatgacccaggtggtgggaacctatgagcagtccaagagtaatttcggctttgtcattccggataacacgaagatagcacaggatattttcgtgccgaaggagtggtcgaagggagccatgaccggacataaggtcgtggtggagatcaccggatacggcacaaatacgaagagccctgagggcaaagtagtggagatcctgggacatatcaacgatcccggtgtagacatcatgtctatcgtacgtggctttgatctgccggtggaattcggcgagaagctcatgaaccaggtggagagggtatcccaggaggtatccgaggcagactgtgccggtcgcagggatctgcgggatgtgaccatggtcaccattgacggagaggatgccaaggatctcgatgacgctgtcagtgtatcctttgacgggacatattaccacttaggagtacacattgcagacgtgacgaactacgtgcaggagaattccgcactggacagagaagcattaaagcgcggcaccagcgtctatctggtagaccgggtaatccctatgctgccccatgcactgagcaacggtatctgctccctgaacgaaggcgtggaccgtctggcattaagctgcctgatgaaggtggatgaagagggcgagatcgtggactatgagatctgcgaatctgtgatccgggtcaataagcgaatgtcttataccgtggtgaaaaagctgctggaggagccggagtgtgtggagaataacgccggtgcaccggacggaacctccagggaaggcgcaggaaccgtaacagacgattcccagtacagggaattactccccatgttccaacaaatggctgagctcgcggacaaactgcggaagaagagacagaagagggggtctattgatttcgatttcccggagtgcaagatcctgttggataaggaagggcatcctctggatattaagccttatgagcggaacgtagcgactatgctgatagaggactttatgctggctgccaatgagacagtggcacagcatttttactggcaggagctgcccttcgtctaccgcgtccatgatgtgccggatccggagcggatccagaagctgtctacgttcatcagcaattacgggtattacatgaaggcgttggggcggaagaacagcaaggtctccacggaggaaatccatcccaaggagatccagaagctgttgcagaagattgagggaactcccgaagagcctatgatcgccagactgaccctgcgtagcatgaagcaggcgaaatacagtacggaatgcaccggacatttcggactggcatgccggtattactgtcattttacttcgccgatccgcagatatcccgatctgcagatccaccggatcatcaaggagcagctgcggggacgcctgaaggcagagagagtggagcactaccgggatattctgccggaggtggctaagcattcttccgagatggagcgccgcgccgatgaggcagagcgggagacggacaagctgaagaaggtggaatatatggagcagcacatcggagaggaatacgagggagtgatctccggtgtcaccggctgggggctgtatgtcgaactgccgaataccgtggaagggctgatccatatttccacgatcccgggcgactattatcactacaatgaggcagcctgtgagatggtgggagaagccaccggacgttgcttcaaactgggaatgccggtacggatcgaggtggaagactgcgaccgttttatgcgcaccatcaatttccggctggtggatcaataaatctgcggattaaatgaactgttagttcattgacaattacggaaaatatagtaaactgtaactattcagagccgaaaaagaagctccgcaggggcgttttgtgaatgggtttctgaatagttacaaggttttaagaggtagccatggcaaaaggaaaagagtcccagaagctgatcgcaaacaataaaaaagcatatcacgattttttcatcgacgagacctacgagtgcggcattgccctgcatggcacggaggtaaagtccatgcgtatgggaaaatgcagtatcaaggaggctttcgtccgcattgaagacggagaagtattcgtctacggaatgcatgtaagtccttatgagaaggggaatatttttaacaaagacccccttcgtgtaaaaaagctgttgctgcacaagtacgagatcaacaagctgttgggcaagatcaaggaaaaagggtatacattagtccctttgcaggtatactttaaagatggtaaggtcaaggtagagatcggactggcacgtggtaaaaagctctatgacaagcgagaagccattgccaaaaaggatcagcacagagaggcagagaaggaattcaaggtccgcaatctgtgatctgcaggctctgatcctgcaatgctttactgcaagtgcttgacagtgtgtgtgccatcaagtatacttggtctgacaattgaataaggggtagtaaaggtttcgacaggggttttgcagctggagaagcgagtcgcatggtaatgcgttaaatggccaaattaaaattaaacgctaacgataatttagcatacgctgcctaatggcagcagtcggccctagggcactcacaccttaggatcccggcttcaaacatgtgagaaacgacatatgcaaagctttgcgcatatgggcgtaacatgaagctactgaaatgctcagggtgtttattcccggggcgcggagggaatgtcaaagaataaactacactcgtagaaggacagggaataggcttttggacacgggttcgactcccgtctactccactaaaccgtagcaagtcgaacaccctgtataacattgtggtatacaggaatatgttctgcttggtttcacagagggaatggtaattgtgagaacggttattgtagatagaatctacaggaaagcagcgatattgtaggtaggtgattacacctcgtacagtatcgctattttttgtagaagcatccccatgcctgacggcacagaaggagtagggatgctttgaaatttttagaacagtgcaaataaaagaagaatatatcaaagggcaagccgctaggaagatgtagagcaatctattaacatcttcttggcggcttttgcattttgcaatgccgggagagcccatgaaggaggtaacggcaatgaatatagatgttgtagatgtgagactggatgaaagaaagctgccgtacttggtcagagagacagtggctgaataccgaggggaatatgtgggagagcaacggctgaaagtaaattccccggagaaagtggtaaacgtgctgaacaatgtttttcacatgaaagacttttcggaagaaaaactgtatgtgatgttcttatccgccagtcttcatgtgatagcttatgcggaagtcagtcacggagtaattgattcagcaaccgtaggaatccgggaaataatgcaaagagcgtttttgaccaatgcggcaggaatcattttggcacacaaccatcccggacttggaagtacggcaaatccatcaacgcaggacattgatgtgacacaggggttgatgcgagcctgtgaaattatggggattaaattattcgaccacattattgtagcaggagacgattattacagtttcagagaaaagcacgcagaactttacgtgaagcgtgaggaaagcaggaaaaaagaggggagggaaacgaattgagatatagtttttgaatgatttttataaaaaatatcgacaggggcgttagctcctgtcgtttctatttcgtcttatcatgctcgataatgtcagaaacaggacaatcgaggatgtagcagagcacatcgagtgtctttgtagtgattgcttccccctttttcatgcggtgaatggtattagcggaaacaccgtgcctaaaaatcagctcgtattctgtcatgttcttacgaagtaaggtgtcaaagaaaggcttgtatgatatcatgttattagattgaacctcctatcaaatattataaaaagagtatcatacttaatttcttgactatacctaatatattgactataatgtaagaacgatagagaacgatcacatgaaaacaaaagttaatcgctcgaaataaattctctcaacgaaagcgaggaaaaccaactatgaaacacagaacacacaagctcgctgcgaaagccgtagcagcaatcctttgcgcagcactgatgctgaccgcatgtggcagcaaggaaacaaccagtaacgaaactgccagcacagagaccacctctgtaacagctacagaaaccaattctgtagaatccactgaaatgacaaccacagaagcaaccgtagagccgaccgaagctcccacagagactgctcctgcggaatctcctgcacccgctgcagaacccacaacagcacctgtagaacccactgctgtaagcacagggtatacttattcggaattaaaccagaccatgtatgcaaagtccgcagtaaatgtcagagacctgcccagcaccgatggtaagaagattggcagcctgaaagccagccaggaaattgtcgttacgggtaaatgtgaccagacaggctggtatcgctttgaattaaataacaccactggttatgtaagtgacaggtacatcgtatccgaaaagcctgctgtgaataccgcagcacctgccgcaacacctgcgcctgcacagacaactacgacaggaagttcagaaccttacttcgaccgtaccgtagcagaacaggtattcgcactggtcaataacgaccgtgtagcaaacggactacctgccctgacatggaatgaagatatgtataacattgctgtacagcgatgctacgaaggtgccgcaggtgacattcatggtatgatgcgtaacggaaccagcgagaacaggacagaaggtcagatgggtgacggtggtgcacaggaaatctatcaatcatggtacaacagtacagctcaccgtaacaattatctgaacgcaacctacacatcaggtgctgtagccgtatatgcgcagccttgccctatcgaaggactgggtggtccccaggtagtagcttatgaagtattcacctgggataacaccgcaacaaacagctccgtaaccatcaacactcctgtacaggacgactccgtcgcagcagcccctaagactgccgatgaggacaccagcacttccagctctaacgtaggctggtctatgaccccacccacacaggaagacggcttgaagaagtggcaggagcagaaccctgatgtggaagtgtcgttcggaaattaaatagcaagtaccaaggcggacgctgatgcgtccgcttttcctattttgcggaaggtctgctgtacagaccgggcgcaatatgaaaaagaaaggctgtcgttagacagaatggtaaagaattatggatcgagatatggacttatggaatgctctacagaagcacatggggcataatgtgaaaatcacgttcgagggtgcggaagataaccccgaaaatatcttactgcaatgtgaggactgccatttcgatattttgagtgctgacattgagactgtgtgtgcaagggaggattgttgacagaggaataaggaaaagcataacgcaaagaataatagcatactccattgactgcataacaaaatttgtgtataattttactatcacagaaggaggtgcttttatgccgaccattaaatcaagtgctgacttgcggaacaattataatgaaatatcgacctactgtcataattacccggaacctgtttttattacgaagaatggaaaaggtgaccttgctgtaatgagcattgaggcatacgaagaattaaccagccgctttgaactatatagccagattaaggaagggatggatgatattgccgctggcaataccagaccgtttcaagaagccatggctgacattcggagccgccgcaggagatgaattatcaggtatacatcaccaaaactgcggagcatgacattgcgaaagcagcagattacatcgaatttgtcttgaagaacccacaggcagcagaccatctgttggatgttgcaacggaaaaaatcggtgaactgacccagatgccggagaaactacagctggtggatgatcccgttttggctggttggggaattcgatttattagggtaaacaattatcttgcgttttataccatagacgaagacaagaaggtggtaatcattgtacgttttctttatcaaaaaagcaactggaacaccattcttcgacaaggattttcactcatttaaggaacctgcttttgcaggttcttttttgcagtccgccggactgccgacagggtgcttggaaggagtgtggcaaatatgagaaagagaatactttcaggtatcagagacttatggattgtcctgttctgtctgatggagagaacgttattacagattcttcttgcagtacccgttccggtcaaaatggttcttgtgggagtactggtagcaaagtatgtggggtgtctgttttgcacaagccttagtatgacaatccttaccgttgtgatgacggtatttgtgtctacaaatatcaagaagtggaacgcagaatttcagatcatatatgtgacggcaagactcagaaagcgttcacgaaaaaaagcatataattttatttagaataaactagagaatctacgggcagccgaaaggccgcccatttttttaggcagctaatgtaccatctttaggtgcagaatgaaccacggattgtaccaaaaaggaaagaacaggcattccctacatttgtgtaccaatatgcgcccaagattgacccacatctgggcggaaaccggtacatggaatggttcacttttgaaagaaaaaggtatggcacgatgcacagaacgaccggcagcggtcacatatttttagaaggttttcgtaagggaacttattttttaggacaagctgcgcagaaccttacggtgcagtctaaggtctgcgcaaagaactttcttgtaaacaatgtttacagaaaagtgccaatattctgacggctcgtttacaggctcaaacccgcatggttacggggttttcgcagaaatctcattgctttctccgctaaaggctccggaaagcaaaaagggcataagtagagctgatgcagcttcgctgcggtcggcatagccgacggctctacttactgcgctgcgcttgcccttgaaacgtccaccggacgttcctgcgggtgccctgaaacaagcacagcttgtcacatctgcgatgtaaataaatgaaaaatgcttttgaaaagagacctgaaaaataagggaagctgcaccttacggcaggcttatttttcacaaaatcattttccaaaaagataagcagagaagaaaggctcgaaaaaacagttgtaccaacgagtggttgctggaagaatgtttgacatcctgtgtcggaacattcataataaaatacaggataaaagtaagggaaagcgaaaggagaaagcagcatggaatttgaaaagtttgaggaagtatatcaggtactggaagcgcagaaggaaaaggacgagaccgccgcagaactgtatgcagatgtaaaggagtttgcctacaagtatgcaacgatgcggtatcggttcagcgaaatgagcagagaagagaaagccgagaacgacagctaccgcaccagccagcacaaccggttcatggacagcgtccgtatctatttccgttatctacagaacaacggggtgaatgtgccggacatcagcaagctggaagcggatcgaaagattttcggtaattttgcctgctactatattttccgcattgagtgtgaacaggcatagagaaaagcctgttcccccaaaaaccgcccatcctcttgacaaaaccgaaaaaatgtgctaatttctgagtaggttgagacatcaagttacttgtgtctctttttttgactgataattcaggaaaagaagagatcaggttcagatgtatgtttcaactttgagaaagtgcaaaaagaaatttaaacatacatctgggtttgttttagaaacaagtcggatgtatgtttttttatgaaatcagacggcggcgtggactatcagaaaaaacggatgcaaaggagaaaaacggatgagcggcaacacgcaaaaagaaggaatctacagaacagcgatgcggatttgcagaatgtggggagtggcagaaactttggatagcgggataccgccttatgaaactcccatagctacacagtctgcggagaatgaaaagctggttctgcaatgggcagaggaatatgtacagctacgtgagaatggcgaagaactctggagattctttgaaaagaagataaagaatctacgcaagccggagcagaactagcagtattatcatttctacaggggaattatcatttccttatatcctctattaaataggattccctgccttgcattgctgcctgtagggtcgcatcttccgaaagcatagtaaaacctgcttcgcaccgctgtgagcggctttgggtttgacaatgcttttggaaggatgcgggagggtaaccaggcaatgcaatgaaggggtgtattatatcgccttttatcttagagattcagaggaaaaggagagtgaaacctcataagtcttgcggtagatatttcggaatattacaaaaagctatatacggacaatggctatattgcggtcttggagaatgagctaaaggagacggaaaaaggaattgccaatttgattaaagtcattgaaaaaggtgtgatttcagatgccgtgacaagccgtctggagaagctggagaaagacaaagccaatctcaaagaagccatggaagctgaaaattaaaatacgcgctggcagaggacgagaactgcatcaagaaatatttcgatatgtatgcaaaagccgactttgatgatgaggacaccagaaacaaaattctggactacttcatagataagatatatgtatataatgaccgtttggttattacatggtggtattgcgatgacagaacaaccattgaactggatacgctaacggagatcacagaactccaggacaaaaagtctaacagaaagtgttcgacattgacacagataactccatagaaaagtgccgtttttgcggcactttttatttttcgtgtgtgcattattgaggactgattcgctgcaaaagagcatcctgcaatacttgtgaaaagttaatattcattgcaacagcagcttcattcagccattcgggaatggtcaatgtttttttaacagctttgttattaaaacgtttgcgatattccagggtatcgcatgcaaccatacttaaaaaggaatccgcagtaactttgatgtctgacattttggagggctgtggaatggggcgttggtccttttcatatccatagagaataagcgcgagggcatcctcagccataaacagagcatcagccagtgtgtcgccgcaggtataacaaccttccagatcgggaaaatatacagaataacctccatctggttcagaagtaaaaatagcgggataaacatatttagacataagaatctcctttctaagaatccattccggcatcgcgcaaaatagcaatggcagttccggtttttatttcctttttgtgtcgaggaacagcaaactgttttcccgtcacagagctataccaaatatcatgattgcttccgtggcggataagagaacaaccatttttctttaatagttttagcagttcgtttgttttcattgatagcctttcttaaattataatacgtgtaaatacgtgtgtcaataagcagaaaaaaacacctcaaataataagcctaaatgtttagatgattggcatattatttgaagtgtttttagatatttttagcatactgttttttgaaaaaattgtcaatgaaaagaagaggtcagatgaaaaatgtggtataatttctaaagagttttacaagggagtaattgacaagctatgaaaatgaaacataacagacctcagaaacgtttgataacacaattgtcattatggctggcactgctattgacattcactggctgtgcggaaagtaccgtcacgccgcaggataatacctatgcgatagagcagctggcgacgatcccctccgaattgctggaagcatcggagactgcagtatcggaacccgaatccggacagccacaggaaaacgcttcggatacacaagaatcgcagcaggtcacaatcgcaacagacgttccgacaggagagggcacatcagcattttccctccgggagattccggcatactccggcacaccttatacagaggtcaatggtaaccagccttatttcacagaggaggagctgaccacacagtccttcgaaacctacagcgagctggacagcctggggcgctgtggcgtggcatatgccaacgtgggacaggatctgatgccgacagaaccgagaggggagatcggagccgtgaagcctagcggctggcatctggtgaagtacgataacgtggacggaaaatacctatacaatcgctgccacctgatcgcctacatgctggcggcggaaaacgccaacccacagaacctgatcacaggaaccagatatctcaacgtgcagggaatgctcccttttgagacgaaagtctgcgattatgtcaaaaatacagggaaccatgttctgtatcgcgtcactcctatttttgacggtgataacctgctggcagacggtgtcctcatggaagcctattccgtggaagatgccggggagggtatctgcttctgtgtatttgcctacaatgtgcagccggggatcggcattgactatgccaccggtgataactgggcggagggcagtggaacctaccaaagcacagcagcacctgccgcggtagagacaccggcaccacagcctgagaccgataccgcggtacagatcacaccggaatcgtcggtgtcgcaggaatcccgggaaaccacctatgtgctgaataccaacaccaagaaattccactatcccacatgctccagcgtggacgatatgaaagagaaaaataaacagatctacaccggcagcagagacgaggtcatcaatatgggatatgttccctgcaaacggtgcaatccctaaatcgaaggcacacaaaaagagatacgcgcaacaaattgcgcatatctctttttgcgttagaagatggaagagaagatgaaacggatgaaatatggatgcataattggaaaaaatacacaaaaatagttaataaatattagaattattgtcaatttaaaatacaaaatgcacatgttataatccaaacatagcagagcaaacggttgcgcaaacgagttgcgcaccacagggaggatgctaagtgggatatagcagtccggccggtgcgggataccggtcggaaagaagaaagggaaggtgcattatgaagaaaagagactggaagagaagtctggcatttgtgtgtgcaacggctcttatcgcaggaagcttaagtgaatttggaccattgacccaggtaaaggcagaggagacgaatctgtttacggatggtgatatgggcgatgatggcagtgatttgtggactgctggaaactggaaatttgaagaaactacctggaaggcagccgatactataaaatacaatcaatgggctgcttatgacggtacttcaagtggactgggaatcaactacggaaatggagacggtacagtaagcatgtaccagaccatcacatctttagatgccggagactataccgttacgggatggatcaaagacagcaatagtaagacaggaaaggttacagtgtatcatggagagaatatcacagataagagttcattggatattacttcttcttttcaacagtttaccggacattttacattagacgaagcagagaacaattacatagtcggcgtccagatcaccagtgaaaatggcgcatgggtgtgtctggacagcctgagccttacgaaagatgcaacagacgaaacagaagagactccggcaccggaagcaaccgaatccccggagcccacagctacgccggaagcttctgtcactcctgcaccggagaacaatgttctgtatttcaagacttttgaggaaggaaccgatccggcagatatgtctgactggtcacagacctggagtgtagacagcagtgctacctccaaagcagataccggcgccggtaataatactacaactgtctggaactactactcggcaacggcacagaatctgacagctgctactacggtgacagcatccgatgccggtaactataaagcatctttcctgacagccggagagaacgtgaccggaaccatcagccttacagccggagatagaaaagtatcggcggatctgaccgcaggaggctgggatgtttatactcttgcagagaccgatgcattaaccgtggaggcaggtacgaagctcaccattaccatttctctggatattgcagcaggcggctatctgaagatagatgacatcctggtgacgaaagcaagtgatgctgaaattcaggctgcaaaaacagcaaaggcagaagaattacagaatctgatcacggaatataaagcattaaacgagtcagattatactgctgacagttggaaagctctgcaggaatccatgacagcaagcgagaacttcctgcaggcactgaatggcgattatacttccacaaccgtcacagaaatcgaagagaagatcacaaatctgaaaaaagcgaaagatgaattaaaaagcgcaactgtagtaaaagccggaatcaatgtggaaaaggtaaacggactgacgagtgatttcatcggcggtgtggacatctcatcctacagagctctgaaagacagcggtgtaaaatattatgattttgcaggaaatgaactggatgatgccggatttttcaagttgctgaaagacagtggtattaactacgtacgtatccgtgtatggaataacccttacgatgcatccggtaacggctacggcggtggcaataatgacctgcagaaagcggtggacatgggtaaactggctaccgaagccggaatgcgtgtcctgatcgatttccactattccgatttctgggcagatcctgccaagcagcaggcaccgaaagcctgggcagacatggcgattgcggaaaagacagcagcagtaaaagattatacgatgaatagcctgaacactttactggatgcaggcgtcgatgtcggaatggtacaggtcggtaatgagacaaacaacggaattgctggagagagcggtctggagaatgccaacaccacagcaattttccgcgccggatgtgaagcaatccaacaggtggagcagaatcggaacaaagaaatcaaggcagtagtgcatttcgcaaatcctgagaaacaaaattatatgacttacgctaaagcattggccgatgccggtgtggagtatgatgtattcgcctcttcctattatccttactggcatggaaccctggataaccttaagaaccagttaaatgcgattacggaaaaatatgtaaaagaagtcatggtagcggagacctcctgggcgaccggcttagaggacagtgacggtcatgcaaacaccgtccgcgaaggcaataacgatgcaggcatggattatgatttcagcatctacggacaggcgaaggaactgcgtgaggtgatcaatgccgtcgcagaaatgaacaaaggtatcggagtgttttattgggagcctgcatggatccctgtaaatgtgtatgacccggaagcagaagatgccaagcagacccttgcaacgaataaggcagcctgggaaaaatatggttccggatgggcagcttcctatgcgaaagaatatgatgccgaggatgccggaaaatggtacggcggatccgcaatagacaatcaggcattgtttgatgcctctggccatcccctggaaaccttaaagatattcagttatgtaaaaacaggtgcagagacggctaaaaaaatcagtactgttaaaaatgcagatgcaatcgagattgaattaggaagtacctttactttaccggagacggtaaaagttacctattcagattacacttccggagcagaaaacgtaacctggaacgcacaggatgttgccgcagtcaacaccaacgcagcaggaaaatatactctgaacggaacagtatctctggaaggagagacctatcagacaaaatgcgtgatcaccgtgaatccgcagaaccttctgaacaatccccggtttgaggatggagagaacgcatggatattaagcggaaccggtattaaagtcctgatggatggcaaggactccaaagatggaaacggatatctgcatttctacaatgacagtgattttacctatgatgtaacacagacaattacgctggatgcaggaatttatcggttcggaggatatcttcagggtggtggaaacttagcagcagacagctacgaggtctatgcctccgtagatggtaagacacagacagcagaaggcgaattgaacggctggaagaactggagcaatccggaggtacagaatatcgagatcactaaggatggaacaaaagttacggtaggaatccgggcaactgcatctgccggagcctggggatcctgggacgatatgtacctgaacaaaaccggagaagctaccccggcacctgtagttatcccgcagccgaccgcaaccccgacacctgcaacagcaccggaaacagagagcagctctgcggacaaggatacatctgcaccggtacagacagtagactggaacaccgtgacttccaacgtacaggcaaagatcgcggaagtgacacagaatccgaatattaacagtgtgagcatgaatatcgtatgctccggagagaccagactccctgccgcagtgctgggaagcatcaaaggctcagacatgaccctggcacttcatagcggcaacggtgtggcagtcagcatcagcggacaggatctgaaaggcacagccctgaatgcattacagaacattgatctcaccgtggacagcaaagcccggaatatcccggcagccatggtggcatccaagaaggcagaagctacaaaacagctgtctgtaaaagacaccggagcattcccggtagctgtgaacattcatgtgaatgtcggagcagaaaacagcggaaaatacgcaaatctttatcgttataatgccgagaagaaacaactggaatactgtggctccttccccgtgaccaggaatggtcagtccatgtttgctctaaaacagggtggtgattacatggtaacggtaaccgcggaacaaccgaaggagaccgtatattttaacagtggcgattatgcagtgaaagcaggagataccctgtccgccattgccaaacgcaaccatatgtcattggtggaactgaaagccaaaaacccgcagatcaaggatttacataagatccgtgtgggacagaaattgaatctgaattaaaaaatagaatgggactccgaagttgatttggggttccatttttgaattaatagttgcgtgtgtaaataaaaaaggtaacacaattgatattgtgttacctttttgctttcacatagtatatcggtacgctcgcagaaaacttaacccctgttttgaaaaaattgaaccctcttatttttcaaagtaaatgtagccccgaaaagtatgtgttatagttcacagatatataaaaaatgccggttttatgcggtctacactaatttctaggaggaatcagatgaatacagcacagccaattcgtaacctggaggatctgaaaaattttaaaaactactataaggaaatccaccccaatgccaggaaccaattgttagtgatcctgggcttgaatactgcactgaggatttcggatctgcttacactgcggtgggaagatgtttataacttttctcaaaacagatggcaggagcatattgagatcattgagcagaagacgggaaagacctcctgcatctatatcaatcataatattcacgcatgtcttcaaaattatcaggcacagcttcaaaaggagcgaaaacctattcagccagaaaagtatctttttccccacagcaataaaaatgaacccatcagtcgggtgcaggcttttcgcatcatcaaaaaggtggcagcttattacaatatccccggcgtgatctgctgtcattcccttcgcaaaaccttcggatatcatgcctggcagcagggcgtacagccggcaatgctggtcagcatctataatcattcgtcttatgaagtgactaaacgatatcttggcattgagcaggatgaccgggataaaatttttcaggagatcatactctgaacacaagggtaacacaatatcaagtttgttacattacgatcagtatttccaaaacacagcaaattataaggaaataattgattcaaggaggaatggctatgctgagattatcggtgagagatgaagagtttctgatgatcggagacgatgtgaagattgtatttctgggaagcagcggcggacagacacgtatcatgatcgacgctcccaaggatgtgaacatcgtacgaagcaaggccattgaaaaacggatccgggatccggagcttctggcgacgatcccgaagtattacaagaatccggaaggcaccgccaagaagaaaaaatccaacgtcgtgatcgtacagaataaataacttcagatactgtgggacaaaagcttgctaacaatgcggaatcctagggccgcagtaactattaaccacgaaatgcagataaacggatgtatctgcaacactttttacacatggaggtaaatattatggtagtacaacacaacttaacagcaatgaactctaacagaatgttaggattaaccaccgcttctcaggcaaagtccaccgagaaactgtcttccggttacaagatcaaccgtgcagctgatgatgcagcaggtctgtccatcagtgagaaaatgagaaagcagatcagaggtctgacacaggcttccctgaacgcacaggatggtatcagtgccgtacagaccgctgaaggtgctctgaccgaagttcatgatatgctgcagagaatgaatgaactggcagttaaggcttctaacggaaccaattctgaagatgatcgtggatacatccaggatgagattgatcagctggttaaggaaattgatcgtgtatcggagacaaccaaattcaacgagacctatctgctgaagggtgacggaacggctacacgtgaggttaccaagaccactcctgcgcaggaagcagtcgatgtaaaggctgaatatgtatctggtaagggagtagataatgtagcattaaagaatggtaaaactcttgcagcaaatgctgtttggtatgaaaaaggtaaaacaactgcaattactgctgatgatattgacaaattgtttgaagtgaaaaatggtaatgttgttttaaaagaaggagttgaactgtttgatgcagcagcagatagtgctacggattttggagcgcagcttacagcaaataaggttgataacaccgcagtacagggcgtatttgaagtaggcagttctaaagtttctactgcaaatgatggatccgcactggtcgatgcagcaggtctcaatgctttatttaatacagatggatctatcaagacaaagttttatgcacagaagacagatggaagctgggctgaagtaggtgctgaacaagtagcaaagtttattaaggtaactcctggacaggaagcagtagctgcaggaactaagacagaaactgaaacttatactaaggcgcttacattgtcgttgcatgttggtgcagatggaaatgatgataacaagatttctcttgatatcgaatccatgagcgctgaaggaattggtgttaagggactggatgtaagtactgaggatgcagctaccaagtctattgagaccttgaaggcttctattcagaaagtatccacccagagatctgcactcggtgctatccagaacagacttgagcacaccatcaacaacctggacaacgttgtagagaataccaccagcgcagagagccagatccgtgataccgatatggctactgagatggttaagtactccaacaacaatatcctggctcaggcaggtcaggctatgcttgcacagtccaaccaggcaaaccagggtgtactgtctctgttacagtaatcttaaccacagtttgatccaaaacattattacaattagttgtgtaaaaactaacataaaaaggttccgccggagattccggtggaacctttttgctgtgaacagcctgaaaataccagtgatgcggcacttagtaaagatgcacaaaatccaaatccgtgaaaatagccaatttcaacatactcaattttgtatacttattttgcagaaattcataggaaaacagtcctctataccttataataaacgtgggtgctgccaaaacggtaagcggttcgcctttcgccgaaatgggaacattttgagaacttccagtattatcggaggtgatacgaatgggaaatttaacgaaaacattaaaaaagcaaccgcctccaccaaaggtacaagttgcttttttagaactataaactaaggtgaaccgttgctgtacggtagcactctttttgtcccttaatactaacactttttttacgatgcgtcaacgtttttcgcatacttgcaatcattctgcaaatgctatagactaagagtaatctacattcacttgaaaacagtaaaggagaccactatgtgcacagcagcaacttatagatcgcaggatttttattttggcagaacttttgattatgaatttaattatggagaagaagtggtggtgacaccgcgtaattactcttttcagttacggcatcagaatgcactgactgagcattatgccatgatcggcattgcacacatggtaggggattatcctctgtattatgatgcggtcaatgagaagggtctgggcatggcaggccttaatttcgcgggtaacgccgtatatcgtaagcccaaggagggcagagacaatatcgcacagttcgagttcattccctggatcctgggacagtgtgctacggtgcaggaagcccggacgctgttagcccacatcaatctggtggatacgcggttcagcgagcagtttccgacatcacagctgcactggattctggcggacagggacgaggcaattacgatagaggcagtcgaggaaggactgaacatctatgataatcccgtaggagtattgacgaacaatcctccctttgacaagcagctgttccggttgaatgattacagctatctgtctccggaccagccggtgaaccgtttctcggagcagcttcagctgcagccgtacagccgcggcatgggagctatgggactgcccggtgatctgtcctctgcctcccgttttgtccgggtggcttttacgaaaatgaattctgtatcggggacctcggagtctgaaagcgtcagtcagtttttccatatcttaggaagtgtggcgcagacgagagggtgctgccgtctggaaaacggtaagtatgagatcaccatttatacttcctgctgcaatgcagacaggggaatttattattatactacctatgagaaccaccagatcacagccgtggatatgtaccgggagaacctggatggggagatccccgtgcattatcccctggtgcagggagagcatatcttactgcagaatgcggcagatacaatggaggaaaaactgtaaatggatgtagaacagagagaacatgtagtgtccggcttcgccttctattccgagaaggatgccggacttgcggagcaggaacggcagaaaatcgcctatctggataagcacattgaccatgcggatatgcagtcggttcttgctatttataaaaaagcgctggaagaccgggtgttccgcaccccggtaggactggagtacctcagggagctgcagggagagctacgcgcccgggaagaagaactgggggaggaagtgcctccgatccctctgtggacgagctttgctaatgtcaggacgaagacgtcccctgccagaagacggatccagccgatgccggaagatgggggaaaaaaggcgggtctttgcctgtcggtgatcatgaatatcgtgatgctcgtggcaatcattgccatgtttgtgatcacattgaattccgaccaacccaatatcctgaattacgagcggaatcttcagaataaatacgcatcctgggaacaggagctgacccggagagagcagacggttagggaaaaagagagagaactacatatagaaaatacagggaatacaggaaatacggagaccgaagtttcacagaattgacatatttctgcgctatactatgtctacaacagaaaggtgagggtatgtatggacagactgaaaatactggtagtagatgatgagagcaggatgcgtaagctggtccgggatttcctggtgaagagtaattttgaggtgctggaggccggagacggcgaggaggcactggatattttttataaggataaggatattgctctgatcattctggatgtcatgatgccgaagatggatggttggcaggtatgccgggagatccgtgtgaactccaaagttcctattattatgctgacagcccgcggagatgagagagacgagctgcagggttttcagctgggagtggacgagtatatttccaaacccttcagccccaagatcctggtggcgcgggtggaagcgatcctacgcaggacgaaccagttagggcaggacgaagcactgacctgcggcgggatcacggtagataagacagcacaccgcgtgatcatagacggcaaagatgtggacttaagctataaagaattcgaacttctgacctattttatggaaaataagggaattgccctgtccagagagaagatactgaacaacgtatggaactatgattacttcggggatgcccgtaccattgatacccatgtgaagaagctgcgcagcaagctgggcgaggaaggcaatctcatcaagaccatatggggaatggggtacaaaatggatgaaacagcagaataaacagcagaagaaaaaagtgcattccatcagaggacagttcgcctggatatttatcgggctgatgatcgggacgatccttttgtgcctgctgctgaattacatgtttttaggcagagtctatatgcagagtaagctggatgtcattcacgatgcttatgagacgatcaagcaggcggcggagagtgacagctatggctcggaagaattcgcacatgagctggatgatgtgtgcagaagctataacatgacagtatgtgtcatggacgtgaattccaacatgaaatatgtatccatcaacggcggcgagagactggagaaccgtctgatcggctatgtgttcggctttggaacgtttccggataatgagcggatcatcgagaacggtgatgactatgtgatccagagaaccgggcaggagaataaggaatatttagagatctacggaaggctgaacaccggaatttcttttatcatgcagacaccgctctccagtattcaggggagtgccaggatcgccaatcggttttatatgatgatcggctgtctgggagcactggcgggtggtattattatctggtttgtctccaggcgtgtgacgaagccgatcctggagctgaacgatatctcacagcggatggtacagctggattttgaagcaaaatatcagggcagggctcacaatgagatcgatctgctgggagagaacattaataaactgtccgattccctggaacagacgatttcggaactgaagactgcgaataatgagctgcagcgggatgtggagaaaaaggaagctatcgatgaaatgcgtaaggagttcctggcgaatgtctcccatgaactgaagactcccatcgctctgatccagggctatgcggaaggactgcaggagggcgtcaatgatgatcccgagagcagacagttctactgtgatgtcatcgtggatgaagcggcaaagatgaacaacatggtgaaaaagcttctgacgctgaaccagctggaattcggcaacgatgtggtgactatggagcgtttcgacattacggcactggtgaagaattatatccagtcggcggcaattctgaccaaacagaacgatatcacggtgcggatggaagagtatcctcccatctatgcctgggcggatgaatttaaaatagaagaagtatttatgaactttttctccaacgcggtgaatcactgcgagggtgagaagatcattgatgtcaaaatggaacagaaggatggcagggtgcgcgtatcggtattcaataccggcaagccgatcccggaggattccatcgaccacatctgggagaaattttataaagtagataaagccagaaccagagaatatggcggcagcggtgtgggactgtccatcgtgaaggcaatcatggattccatgaaccagccttacggtgtgatcaattataccaacggtgtggaattctggtttgaattagagacaaaataatgattttaaaaggatatatttttatatgagggaagaacagatgcaggaggcaccggtaaaggtgctgttagtcggtgtggacatcggggaagaagcggattttgaacattccatggaagaactggcaagtctggcagaagccgcggagaaggaagtcgtgggccagatcgtacaacggctggatcatgtgaacaaagcattgtatatcggaacgggcaaggtggctgaggtacgcagactggcggaggagagaggtgcgcaggaggttgtattcgacaattccctgacgccttcgcaggtgagaaatctagggaaagagttggagcttaccgtcattgaccggacgaatctgatccttgacatatttgccatacgtgcacagaccagagaagccaaactgcaggtggagacagcgagactgcaatacatgcttccgagactggtgggtatgtacgatgcactgagccgtcagggcggcgccagcggcagcatgagtaacaagggtaccggtgagaagaagctggagctggacagacgtaagatcgaacaccggatcacggaactgaaaaaggaactggaggatgtcagcaggacccgggatgtgcagcgtaggaaaagacagcagtcccggactccgcaggtggcgctggtgggctataccaatgcgggaaagtctacgatcctgaaccgcatggtggaacagttcggagagcttccggagaagacggtcatggaaaaagatatgctgttcgccacattggagaccagcgtccgtagcatagacacagggcataataagccgtttttcctgacggatacggttggattcattcataagctgcctcacggtctggtaaaggcattccgttcgactctggaagaggtaaaatacgcagatctgctggtccaggtggtggatttttccgatgaaaattacagacagcagatgcaggtcactgccgatactctgaaggaactgggagcaggtgacattccgcagattgtggtgtataataaggcagacaaatgcggcatggaaccactgccgcagaagagacaggagcactggtatctcgccgcagggcagaataccggtatccgtgaactggcagaagccattgagcagcaggtctatgcggacaatgtggattgtactttcctgataccgtacagcgcggggaatgtagcttcctatcttatggaagaggcgcaggttttttctacggagtacagggaagacggtattttgatccatgccgactgtcacagacaggacatggagagatacaaaacatacatgacgcaatagatcatacaatgcgggaggatattatatggaacagaatacacagcaggacagagcaaagcttttggagcagcaggcaagggaatacctgatgcagtccaaggacccgatctttacacagtatgtacagcagctgatcccgagaatacagaaacagccccagtatgtggagcagttacaggcggagctggataaaagcgtggaatactggcatcagagacagcaactgaatgcggcaagagcagaaagtgctgccgcagggcagatacaggagtccgtacagccttctacacaggagcccatgcagaaacagccggcaggacagttcactgggcaaccggcagaacaggttactgcacaatcgtcagggcagttctccgcacagccggcagcagagactgtagtacaggggacgaagaaaaagcagaatgcggaatatctcattggaaccatagctctgtcggtggtgggaggcgtatttatcctgacagccctggtgctgatgggaatgtatttcatgaacggatggatcaagggaatctctctctatgtggtatccctgggcgtagtgttgctggcagagctgttgatccggagaaaattaccgaagctagcacagatattttcggcgatcggcatggcggctttgtacctgtccaccatgatcaatacgctgtccttacataatttcgggatgtttcccgcagcattgatcattggtgtgatcaccgtaggcacggtattgttgagccggaaacgggattcgctgatccacagactgctgggaattgcttcctgctggctctgtgcttacccactatccatgtcctccgggttatcgatggcggaggtcctgatggtaatgggattgatcctgatcctgagtatattgtgcgcctgtgtaccggtgcacagattccatacggcatcacagctgatcctgcttgccagtaccacaatgctgttcccgacggctgtaggctgtattgtgtggacacagggcatgtcggttggtgttgcggttgtagcttatagtgtgtttttcctgatagcacatctggtacttgtcgtacagagccgttatgcgcaaatagaaaagcagaccggacgtgtggtgaaaagtggaggattgcttgctatttacattgcatttattctggtatccggaattatgacgggtgccggtatggatgattattggagagcagcagagacggatggatatattggcatttttgccctgaccggaatagcatttgttatcacaatactgactgtgattgctatgcggaaggcggaaaagggatggcagaaatggcttccctgctatttcttcagtttcgtgactttctgtggattttcagtaatagagaatgattgggggatcgtgatctgtgctacggtattgctgatagcagtaaaagtactgtcacgcctggcaaaagggggccttgcggcactggatgccatcattactacggtatattgtatcctgcttctgatgaacgggaaggagatcccctatgcttatgtgcttttggcaggaacgatcctcagtatgttccttgtgcatgaatggagtacctaccaggagatcgtgctgactttttcactggcattttttgctctgtcgcatttgatgcctatgataaaactgccggcattttccggaattctcttcgtgagcattctgctgttcaataatgtgaattgtatgcgggacaagggaatcctcgtatttaatgtatccgtcctgatcggacagatcggagcactgatcgctctggcaaatccgatctatcggaattcctacattacttatttatgtatgtttgtttttgtactggcttatctggtgctgaccctgcaggaaaaatattataagaattttaaacacagagaattgatcatcgtgatattcctgacctatatggcactgatcgtcaagacgaatatccctgtgatcaacagcattctgatcatgctgatcgcactggtaagcgtgactgccggtttcgtgaaaaaggataagcccgtcagaatctatggcttagtgctttctttgtgtacttgtggtaaaatagccttatatgattactggggcgcaccgatcctgcagaagaccatacttttcttcgtggtaggcgtaattgctcttgtaattgccggaatctatattatactggaaaagaaatgcaatgagtgatgcaatggacaggaaggaagaaaaggaacgaactatgacaggacgtaataaaaatatggtatgcggagccttattatgtgcaatgatgttatccatgacagcctgcggcaacgagatcccggatctgacggaagaggaatcccagcgggtcggagagtatgcggcagttactttgttaaaatatgatgccaataatcgtagccgcctggtagatcccgaaatggtgatcgccaaattggaaaaggaagcagcaaaggaagcatcgcaggaagaggaaaaagcggaagagacgggtagcaccggtaccacggaagtgacgatgcccacggcgcaggaagagattactgccagtatggaagatttttttggcctgccggaaggtgtcagcattacctatgaggattatatggtagcagattcttatcccgaggacggggttgaggatgactattttgcgctggacgcatccatggggaagaaattgctggtactcagattccatctgacaaatggaacagagcaggaagagtcgatagatctgctgaatacgaattccagatatattattacagtgaatgacagcatcagggcaaatgcactgactaccatgctgccgaatgacatgtctacctatgcggagacactggaacccggacagtcacaggaactggtactattactggaagtaaacgaagatgtggcaggtgctgtacagacgatagcacttcgccttaaaaatgcatcaaatgaatatacaattcaactattgtagatattttttgaaaaaaataaaaaacagtgttgacaagtggaagatagggtgatatactcagtttcgttgtcgcggcagtgccaagacaacgaaacagtttccgataagacttaaaagtttttgaaaaagctgttgacagataccgacaaggtatgataagatatcgattgtcgcgaaaaacgaaagtttttcaagacaaaaaagtttttaaaaaagttgttgacaaacgaaagcgctcatgataagatatcagagttgccgctgagaacaacagcgacaaaagaatcactgatctttgacaaataaacagtaatgcaaccctgaaaattccaagattttcagaaaaatgaattgcgagattcaa

SEQ ID NO: 11291 - DNA, 7566 bp, Unknown
  gut microbiota DNA sequence
cctaagtcacctattccaactaaccaacagacattggtaaaaacaggcgcatggttatccgacgcaccgatcatcagataacaatagccgaatgcatttcccaataccagacacaggcacaggatccggaatacctgaccacctttttctgcgattttctcccagtatgtaccaatgcataaaagtcccgctaccgcaccgaggatcaggtaggtattcagcacgtccggtccccagttggacaacagcagtgccgcaacgtagctcacgcaggtaattcctattatgtatgccgcagccttctggtttcggtctttccgcagaaaaatacacagccctgccaccaggattcccacaagagggatctgcggataaattgcgctggatggtccaaacagccagaaccacacctggatcaaaaatactgctgtcaggaaaaacagtcccggaacctgaagtgactccggtaatttcttttttaacagcttcgtgatcagaagtttcacaccccacgctgccacagctgccaggatcaggagtgcaccaacgatgccaaatccttccgaccagcttactattttctcaagcagcgtcatcttgtgagatccttcgtttaagatctcttccaccatctgtaacatcgtggcaggggccatataagtacacagataagcgaacatcgcccccgcactgatcacgcagggaagaagatatgccgcacattccttccacttcctgtcagatctccggagcagcagataccccatgcaacagacaaataccagtaccatactgggatatgccagcacatcacaggtcatacatattcccgaccacacaagataagaaatctttttcccggtgaagaaataccgaagcatgcacaggatcatcagtgtaaagaaccagttatgcagattggaatattccggtacataaacacatttcggcgtaatgatatagtacagcagggaaagcagtaccactgtcttctgttccataagcggccagaccttacgcagcgttttatataagaacactgccactccgccctgaatgagaaaactgacaacgcgcaggaacaggttcaggtaattgatgcctccggtgatcatcaaaaacagtttaatgaacactgcggtaaaaatagctgacgtctgatggggttcccacatttccagaagcagccggtctcccatagccagacgatagcctgccatgataccttagccttcgtccatgtcggctccgacaaacaggtttttcagtgtatatgcaatgatcgcaagaatcactattattttccaaaatttttcttttttcatcatgttgttatcttaacacaggatttttctcatcgcaataacgattatccaaaaccgggacacacaaaacgaggctcactgttttacagtaagcctcgctcgatacaacacaatcaacacaatgagagaaaagtattttcaatatcttatcttatacttcaaagatcaaatcgccataggtaggtaccggccataccttcttgtcaaccatcatctccagcgcatccacaggagctctcaggtcatccattgcggtatgtaccacatctttatagaagaaggcaagcttcttgggatcttcgatacctgctgcctctgccagtttatcttccaatgaagtctctgctgcctgtgcctctgccagtttctcggaaatactcttcagagctgtggtctgcacagtagcatcagcgcctgcactcttaacagccagtacggtatccgccagagtcttggtgtactccataactgcgggaatgtactgcttcttcgccatatctaccatggtcagagcttcgatgttgatggtcttggagtaggtctcatacagaacctcctcgcgggattccagctcagccttggtgaagataccgaacttctcgaacagcttgatagacttttcggtggtcagagtctcagaagcttctaccatggacttgatgttgggaagtcctcttctggctgcctcttctacccattcctcggaatagccgttgccattgaagataattctctgatgctctgtcaggtacttcttgatcaggtcatgtaccgcaatatcgaagtcgtctgccttctccagaagatctgctgcctcacagaaagcctctgctacgatagcattcagagtagtgttggggctggcgatggaatctgcactacctaccatacggaactcgaacttattaccggtgaaagcaaacggtgaagttctgttacggtctgttgcatccttatccagatcaggcagtgtggatacaccggttaaaagcttaccgccctggatagaatgagttgcatcaccggtctccaccagctgctttaccacatcctccagctgctcgcccagaaatacggaaatgattgcgggaggtgcctcgttcgctcccagtctgtgatcgttgccgacatcggatgcactctgacgaagcaggtctgcatgcgtatctacagctttcaggatacaagccagtaccagcaggaactggatgttctcgttcggagtatcgccgggatccagaagatttacaccattatcggttcccagtgaccagttgttatgcttaccggaaccattcacgccggcgaaaggtttctcatgaagcaggcaggtcatgccgtgacgaccggctacctttttcatggtctccataaccagctggttgtgatctactgcaatattggcggtctcataaatgggagccagttcatgctgtgcgggagccacttcgttgtgctgtgtcttcgcagttacacccagcttccacagttcaatgttcaggtctttcatgaaagaaccgattctctcacggatagtaccgaagtaatgatcttccagctcctgtcccttgggtgcgggtgcaccgaacagggtacgtccggcgaagatcagatcttcacgcttcaggtatttatctctgtctaccaggaaatattcctgctcaggtccaacgcttgctactaccttcgtagcttccgtgttgccgaacagtcttacgatacgaagtgcctgggtgctgacagcttccatagaacgcagtaacggtgtctttttatccagtgcctcacccttgtaagagcagaatgccgtgggaatgcaaaggatcacgccggtagcatcctctttcaggaatgcgggagatgtgatatcccatgcagtatagcctcttgcctcaaaggttgctcgtaagcctccggaggggaaggaagatgcatcgggctcgcccttgatcagttccttgccggagaactccatgatcatcttaccagattcatcgggatgagttacgaatgcgtcatgcttctctgcggtaatgcctgtcaacggctgaaaccaatgtgtataatgggttgcaccattctcaacggcccagtccttcattgccttagctacaacatctgcggtagccagtgacagctctccgccatgatcaatgatcttctttacttctttgtatacgctcttgggtaatctttccctcattttccccagagtgaataccttactgccaaagatttcttccacatttaatacttcactcatcttcgtttcctccttattttgcaatttttcatgcttcctgcgacttacttgcacaaaaagaaaggcgctacactactagtgtaaacgccttcgttcgcattgaaaaatatttacttgtgaggatcgctcctctatggttcattactatacaacagttttttttcgattgcaataccctttttgaaaaaattttatgattgcatccgaaacgacctttgaagcgttctatacctcaaaaagcagatccgcatacgtcgggaatggccagtattttttatctaccagtttttccagttcgtctgcgggctttctcagcgcagtcatagccaccatgacttcatcgtgatagcagaatgcctgctccttgcctctctccattgcggatgccttcttttcgacattgagcagtgcctccgaggccttctccatctcagtcagcttttgcgtgatctgctgcaacatacggacaggcacataggtatctccccctgcttccgtaatggcaatgacagcatccgccagagacttgctgtacttcatgactgcggggatgatctgcttatttgccatatccaccatggtcagtgcctcgatattgatggtcttcgcataggtctcatacagtacctccgcacgggaacgcagctctgcttcagtgaagataccgaacttctcaaacagatggatcgccttgggtgtggtcagagtatctactgctgctaccatggaaggaatattgggcagtcctcttctggctgcttcctcttcccattccctggcataaccgttgccgttgaaaataatacgctggtgctcggtcatatattccttgatcagatcatgtactgccatatcgaagtcttccgctccctcaagccgatcggccgcttcacagaaagcctctgcaacaatggcattcagagtggtgttggggcttccgatggaatcctcacttccaaccatacggaactcaaatttattgcctgtgaaagcaaagggtgaagtacggtttctgtcggtggcatcctttacaaaatcaggcaatgtggacacaccggtacgcagtacgccgccttctttcagattatcggccttaccggtctccaccagctgtgccaccacatcttccagctgttcgcccaggaaaatagagatgatagcaggaggtgcctcatagccacccagtctgtgatcattgcctacattagatgcactctggcgcaacagatccgcatgggtatctactgccttcatgatacatgccagcactaacaaaaactgaatattttcatttggagtctgtcccggctccaaaagattcacgccgttatccgtagtgatggaccagttgttatgcttaccggaaccgttcacgccggcaaaaggcttctcgtgcagcatgcagcgcagaccgtgtttacctgctacacgcttcagagtctccattaccagctggttatgatctactgccacattagcagactcataaatcggtgccacctcatgctgtgcgggtgctgcttcgttgtgctgggtcttggaagtcacgcccagtttccacagttctatattcacatcgtgcatgaaaccgccgatgcgttcacggataacgccgaagtaatggtcatccatctcctgacccttgggcgcagaagcaccaaacagggtccgtccggcgaaaataatatcttcacgctgcaatgccttggcagaatccaccaggaaatattcctgctctgcgccgacggagggcagtaccttggttgcctctgtattaccgaacagacgcacaatacggattgcctgtttgctcaaagcttccatggagcgaagtaacggtgtctttttatccagagcttcgcccttataagagcagaaagcagtggggatgcaaagggtcggaccggttgcggtctccttaatgaatgcaggagatgtgatatcccatgtggtatatcctcttgcctcaaaagtcgcacgcaatcctccggacgggaaagaagatgcatcaggctcgcccttgatcagttccttaccggaaaattccatgatcatacggccatcctcatcgggatgtgttacaaaagcatcgtgtttttcagcggtgataccggtcagcggctggaaccagtgggtataatgtgtcgctccattctcaatcgcccagtctttcatggccgtcgccactacatctgctgtcgccggggaaagttctcctccctgatccataatcttttttacttctttgtaagtgctcttggggagtctctccttcatcttgcccagggtaaataccttgctggcaaaaagctcctctacattcaattcctcgcgcatgtccctacttcccttcggtatactatagaattattatccaatatagtttacaacacgtgcgttatgatggtcaatatctatttattaaacacttttacaacgtaacagatcatacttctccgcagcctcggataattttatccacaacacctgcttgggatggggcgcactatccacactttccccatcttctgtatacattgcttccacagtcacaggtacatttgtgccgtccggcttcatgatctcgatcgtatctcccacgcagaatttattccgctgttcgatccggcacagattatcctttaccgcctccacgattccaagatagatatattcattcacataggtgttattatcatagatctgtgtattctcatctggttttccgaaataaaatccggtggtaaactgtctgtaggtacactttgaaatttcggtctgataccagtccatatttttctcatacaatttcggatcggtaaaatagtcatcaatggctttccgataagttctggccacagttgcgacatacaatgccgtcttcatacggccttcgatcttcaggctgtcaatgccgacttccaccagttccggaatatgctcgatcatacacagatccttggagttaaaaatataagttcctctctcattctcatataccggcagatattctccgggtctggtctcttccaccacagcatacttccaacggcagggatgggtacaggcgcctctgttggcatctcttccggtaaagaaattactcagcaggcatcttcccgaataagagatacacatggcaccatggacaaagctttcaatctccatttctgccggaatcttttcccggattcctttgatctccaccagagacagctctctggccgacacgactctcttcgctcccagtttccaccagaacagataggtctcataattcgtattgttagcctgtgtggaaatgtgcacttccacctgaggccatacttccttcgcgatcataaacattcccggatctgaaatgatcagcgcatccggctgttccggtttcatatcccgcagttcggcaaaatattttctggccccgtcaaggtcatagttatgtgccaggatattggctgttacatatactttcacgccatgcgcatgagcaaatgccacaccctctgccatttcctcactgctgaaattcttcgctttggcccgcagtccgaatgcttctcctccgatatatactgcatctgccccgaacattaccgcagtcttcaatacttccaggctgctggccgggatcaaaagttccggttttttataattcatattccttcttctcctactatttttttgtactcagcgtcacgccatcccccacgggcaggatcactgtctccagtcccgggtgatgctttaattcgtataaatattcccgcattctcgcatggatcgtacggttgcgcctggtgaccgcaaagcgggattctatgatatctccgtcctgtaatacattatccgagatcagcagacctcccggagacagaagtctcagaatatccggcaggaaattgatatattgccccttggcggcatccatgaaaataatatcatagctgccttccagccccttcaggatctctgttg

SEQ ID NO: 11292 - DNA, 46318 bp, Unknown
  gut microbiota DNA sequence
tatatgcttgtaagtacataatttttgcagtcatgacacaagaaaagctccctcacaggaaggagctttgtctacagtctgaaaagtccttgatttcaaggactttttttgtgttacgtttcatgttgcaatccggtattcactttttgtaacgcttccggcatagctcctttacatggaaagacatgtcatgaatgctctttcacatactgcaaaaattccggtgtctttgaccagtatttcacaccccagttttcaaaattccattcttccatgtaatcattgcactcgaaatccacataatatatttcttcgttatgtacaacaaaattcgttggaaaataatcaatatttgtattggcagcatataacagtgcacacattttatgcaattgcccgatatagtcagttttcatcttgtcttctaaaaccaactgatagatcgtgtcaccgtcaataaactccttcaaaatgcgttcattttccacatctgtttcaagcatgactggcatttttattccgatttctttcaatttcctgtaatccctgatttctgcctcaagcttgtttccaaactgataataatcacaaggttcatgatgtatctgcttcaaaacatacctgttatttccagactctgccaagtaaaaatatccacctttcccctttcccagcaatttaattattgtatagcttttcccatttacggtcatttctttattcatgtgttttctcctctgttctacaccacattgattactgatttttaatattctggttccatattacaatagaaatataattttcacaaaggttaaacgcgtaacccaccacataatttttagtaatggcaattactaaaaaattccgcaaacctttccctgcctgcggaattttttagacatattacagttgttccacgcaccggatcagtgcatccacattttcttccttcgtggcccagccggtacagaatcgcacgcaactgtgtgcggcatcgatccgctggtcatagctgtactcgaactgttctgaaatctttgccaggtgtgcatccggcacaatgacgaagatctggttcgtccggttgggtgccagataagtgtaaccctttgccgtaaatgcttcccgcagcttctccgccatggcaatggcatgggcggagatctcctgatagagaccatcagtgaaaagagcgtcaaactgcagacccagcaatctccccttggcaagcatgccgccgttctgcttgatgagatatcggaaatcctgtgcaagctccgggtttttgatcactactgcttctccaaacaatgcgccgaccttggttccaccaatgtaaaagacatcgcaaagcgccgcgatatccggcaatgtcagatcattgtccggcgctgccagtccgtagcccagtctggcgccatctaagaacagatacagtccgtatttgtggcaggtctcggacagagcggtcagttctgctttgctataaatggttccaacctccgtgggattcgaaatatatatcattttcggctgtaccatgtgttcaaagctgtcgttgtgaatatgggattcgtaagcctctgctacctgtgctgccgtgatcttaccgtcaggactgggcagtcccaataccttatgtccgcaagcttccaccgcaccggtctcatggacattgatatgtcctgtgacagcgcaaagcacgccctggtgcttgcgaagtgctgcattgatcacggtgacattggtctgggttccgcctaccaggaaatggactgccagactgtcatccccacaggccttacggatcttctctcgcgcctcttcgcagtatttatcctcgctgtagcccggtgtctgctccatattggtctgcaccagacgctccagcaccttcggatgcgctccctcattatagtcacactggaataaaatcttatcgctcatttttttattgacaccgccgtgacagtgtatttcctccaacgttatttatattttaaccttttccatttactaactctttacatttttcgattgtttctatcttatttgattctctggactttctgttactcaaattcagtcagtccttcgtctccagaacccttaccagatactcccacactctcttcgtggaagatatgcttaaggtctcctctgtcgtatgaatgtccttcatatccggtcccatggatacacagtcaaggtctgagattttgctgcctaacagtccgcactccagtcctgcatggatagcctccactctgggctcattgccgtacatttccgcatacagtttcaccattttttcccgcagtggagaatggacgcggtacttccaaccgggataatctccggtcaccacgtaatcgccaccggtcagttccaccagtgcggaaagctttgcgatcaggttgtccttctcgctttccacgctgcttctgacagaatactcagcccgtaaaacttccgcatccgctttcaggatacccagattcagggaagtctgtaccagccccggcatatctgcgctcatcgcctgtacaccgttgggcgttgcctgcaaaaaggctgccacacgttttgtatcttccggagtggcacaggttattgtctcggcagtgtctattaactttttcgcggttacctttacgtccggatccttggtagcaagctcgtccctcagttctgctgccaaagctgctacctgctgctctaagcttgccgcatctttttcctctactacgactactgctttcgtctgtctgggaattgcgttgtctgccagtcctccgtccgcaaataccagtcctacgggcattttctcagacagcttccacagaagtcttcccaggatacagttggaattgcctctctccttatggatctccccgccggagtgaccgcccaggagaccggaaacctccagttcatagcgcaggccggtaagctcctgccttttcatcgggaaacggcagttcactctcgcaccaccggcacagctggtcaggaaaatgccctcgtcctcggaatccagattgatcatgcgatgtccctgcagcatggacaggtcgatctctctggcaccgtccatcccgacttcctcatccaccgtgatgatcacttccagacggggatgcttgatctcttcggaatccaacagagccagtgcgtatgctacagcgatgccgtcatctcctccgaggctggtaccctctgcgtagatattgtctccgtcaatgccgatcttcaatccttccgtcttcatatccatggtgcattccggtgtctgcaccgctaccatatccatatgtccctgcaggatcaccaccggctcgtcctcatatccgggtgtcgcctccttgaccataatgacatttttcatggcatcctgtatatagaaaagattgtgtgcttttgcaaaatctaccagaaaatcactgatctgatccacatttccggatccgtgagggatcttcgtgatctcttcaaaatagtaaaatactttcttcggttctaaattcgataaaacacccatttttatttcctcatttctgttctttgtttggatccattttgcctgcagatcgtcctatgaaatcacaaagctcgtaacgctccgcacaatcccagtataagtagttgctatttttctgtcaagaatagaaaaaggcacacggattacgcataatgatattttttcctcttcgcaatcaaaaatccgatggtcacgaacagcgctaaaaattccgcaatcacaatggacaaccatatgccggtaatgccgatcaatcccggcaggatcaacacgataatgatctggaacacaaaggtccgcaggaaagagattgccgcagacactgctccgttattcagtgccgtgaagaaagaagatccccagacattcatgcctctcaccaggaatgcgatagcgtagatccgaaatccccaggtcgtcatcttaagcagttcctgatcatagtttgcgaaaatcttcaccaacggtcctgccaggatctgggatgccgtaagcaatatcacaccgcaggctgagatgatgaccaggctctttctacacagatttttcaattccgcatgattgccggcaccgtagtggaagcttacgataggtgcggatcccagggaatagccgaggtacaaggtcatgaagataatatccacatacataatgataccatatgccgccacgccgttttctccggccgcctccatcagctgaaagttatagagcataccgacaatggacgtcgacagattcgtcaccagttcggaagaaccgttcatacaagtctgccagatgacttttccgtgccatttcatctttccaagtcgtaacaaactgctgttttttccggcaaaataaatgattggaattgctccgccgacaacttgtcctgccgccgttgccagcgccgctcctgccagtcccagggggaataccacgatcagcacataatctaacaccgcattcgtcaatcctgccagcacattgattttcaggctgagtgtcggcttctccgccgcaatgaagaagctctggaacaaatactgcatgacaaatgccggtgtagacagaaacaggatacgggaatataacacacaatccgcctccagatctccgtttgctcccagtgccagtgcaatctgcggtgcaaatgcatatccgatcagtccaaggacaacagacacagccagtgtcacgtatacgatcagagaaaaatattcattcgccagttcctttttcccctctcccagagtcatggacaccacagcgcttccaccggtccccgccatgaaaccgatcgttcctacgcccatcagcaccggcatcaccagattcagcgctgcaaaaggtgttttccccacaaagttagacacaaaaaatccgtctacaatactgtagattgaagtacataacaacattaaaacggatggtgccacaaaacgcagcaatcgtttatagtcaaaatgatccgataattgtattttcataaaacccctcatttctgagcgactgtatcacaaagaggcgaagtgaaatttgcaatttcctcccggaataattctgtctgccttttcatgatcttaaggaacttttccatttcctgctctcctaagctttctgttgcccgtacttcagcatccatcaggggatctacgatctgttccaccagcttttctcccttttccgtcaggtagatcttcttattcttgcggttgccttcttctgcacgaagtgtgagcaagccatcctcttccatatgtttcagagcagaattcaccgtctgcggcgtgtaaaaccaatagttgcagatttctctctgtgtgaaagtctctccttccctctccctgatgcaatagagaatccagaacgcggtttccgacaggttacagttcttagcatacacacggtaaatatcatccaattccttcaataactgattatatagagccatttgtttcatggcttttcttctctgctcttccatacgcttccagtctcctttcaaatacattttatccgatatcggacgatttgtattataatccgaaatcggatgattgtcaactcataaaaaagtgcacagaaagaacacttcccattgtgtctttccatgcatcattgtataataacttcagcatcagttccgggaggagtgcggttcgcccgtatcgccagtgtctaggttcaccttattgaatatcccgtagaacactcgacggctgatgctattctgaaatattctgtcttttcaaagtatagttttattttaccccaacacactactattacctcgttctttttgtatgtaatattacgtattatttattggcatacgtaatattacgtactaaaatgaatttgaggtaggaaaggagatacaaaagttatcagccagaacggctcccatgtaaagctgaagaacaccgatactcataaaaccgttattgttccttaccattgcaaagacataaaaaaaagtctggaacaggcaattctgaaacaagctggcttaaaataacaaatattaacaaggagaaccaaaatgaaaaaacttttttatccggcactttttcataaagcagaagaaggaggcttttggatcaccttcccggatttccccgaatgtatgacacagggggaaaatatgcaggatgcctacgaaatggcatgggatgcacttggtcttgccgtagtctcccgtatagagaacagagaagcccttcctccggtcacagaaccttacgctgttactttagatcctgataccttctgtgtggttgttccctttgacctcatatcctaccagaaaaaacataactccaaagcagtcaaaaaaactctttccattccggaatggctgaatgaagctgctacagataggaatgttaatttttcacaggtattgcaggatgctcttcttcaaaaattgaaccaataaaacatgttgcattccatgttgcattttgcaaactattacgtcaaaatacaaaaaatcaaaatgcgcaaagacccatttctacaggtttttgcgcattttctataaatataaaagcagataacgggaatcgaacccgcctttccagcttgggaagctagcgttctaccgatgaaccatatctgcaaaggaacataagatattatactccatgttcctttattttgccagtcctaatttttactatttttatcattttacttatccagcactcccaaccacttcagggcgttccaaatgccgtctttatccacgtccgtggtgatataatctgctgtttccaacacctgtttactggaattacccatagcaatgctggtgtgggcatactttaacatcggcaggtcgttattgctatccccgatggccacagtgtcttccatggagatcttcaaatagtccgtaatgtaacggattgctgttgccttggaatatcctttgggaacaatctcgtaaaacccttgttctctgtcgataaaatccagtatttccgacaggtcatgcttcattccgaccattcccgccggagtctctgcataagcatataatttatcgtagttgcccggtgcattggcatagcgatcgtattttctattctcaatctcacgtgccatatggcggaaagtttcggtaaatacttcttctcctctgggagcatagtcttccctgctgccttccaggacggcatccacatgatactttttcatggctgtcagaattgccttagactcctccatggaaaatgtcttgtgcatcagctgttttccatgatattcaatctccgttccgcagcccaataacaatccgtcgaattccacctgtccggtaagattttcccctaccagccgtttcgtacgcccggtgttgatcatgcagatatgaccgttggctctggcgatgcggatggcttccttcgtgctctctgacatcagttcgcttcctccgcatattaaggttccgtcaatatcaaaaaatattatcttcatctcagattcttaagctcctctaccagatccagatcggatttctgtaccttcagattcgtggacacgggttcttcaccgggtcttgtgatcgtgatctcgataatggttccttccgtgatcgctccacccataaaaaatctgcttacaaacgctgcaaatttgggatgattactctcgaaggtattcttcgcattcatcagtttcatcatcattccgggatttatcataatggtctccttccaaatagttacaaaaaagaaaggccgtccgcaccatccgaagataatgtgtccagccttaacagttgctattatttacgcgatcttggacttagccagctctgcaagggtcttgaaaccttctgcatcgttaactgccaggtctgccagcatctttctgttcatatcaacgcctgcaagcttcagaccgtacatgaacttgctgtaagataaaccgttcattctggctgctgcattgatacgagcgatccacagctgtctgaactgacgctttctctcttttctacctgcataagagctggtcagagctctcataacagactgctttgctactctgtactgcttgcttcttgcgcctctgtagccctttgcaagctttaatactctattgtgcttcttcttggcatttaagccacctttaattcttgccatgtcttatttcctcctcgcctgaattataaataaggtaaaatcttcttcatattcttaacattagttgcatccgtaattgcaggctttctcagattacgttttctcttggtagacttcttggttaagatatggctcttgtaagctttagatctctttaacttaccggttcctgttgctttaaagcgcttagctgctgctctgcttgtcttcattttgggcataacgagttcctcctaaactttacttaatctatcgtgtcggaatccgacactttttaactgtacgaattaacgcttctcagttaaaaacattgtcatgcttctgccttctaccttgggagctttttccactaccgcaatatcggacaggctctgtgcgatatcatctaagatatgcttgctgttgttcatgtgtgccatctctctgccgcggaatctcaaggtgatcttcactctgtctcccttggtcaggaactttctggctgcaccgatcttagtgttcagatcgttggtatcgatgttgggggaaagtctgatctccttgatatcgatgactttctgcttcttctttgcttccttctcttttctcacctgctcgtatttgtacttaccgtaatccacgatcttacaaacaggaggctttgccgtaggagcaatcttcaccaggtcgagtccggcttcctctgccatcttcagggcatctctggaagaaacgattccgagctgttctccgtcttctccaatcagtcgtacttctttgtctctgatctgttcattaatcattaaatcgctaatggttgtgtacctccataagaaaatgtgttaaacaataaaaaagcagatagcataactatccacctgttcccttcacggactgccctcattcaaacaaatttcaaacgagttctctgtctatgaaaaatctgaacgcttaccagcctgcgccgtaaggtgagagtggatactctgcttgttgtatcgtgttcttcacacgcttaaatagaataccacgaagtttttctgatgtcaaccccgtttttacaataatattacattttttcagattactgtattctatgtaccggcggtctcccgccgaatccggtttcctgctttattatccgcagtttcggaacatttgtcaagccggaatactgatttacttttctgaaaaagtagcacaggcggtctctctgcagtcgctggctccgcagcccttgatatccacatgatccgccacacacttataattactgttatagatgcactttaccgcctcacagtcgatgctgatcgtatggcttggatgagacagggagctgctgaaagaatcccgcccctctctcttctgcgcaaagctttcacagcaggttccgtcacagtcacaggcgtgcttgccgcccaccatgatgtctcccttgctacacagacagtccttattataggtacaattttccacaacgcattttaaatctgccatgtttccctcgccttctgccgctttctgcggcgtctcatcttcttttttgattttaaaattttaaaagaggacacgcggcaaaagagcagttgcagtcccaccacgcgtcatggatagtctgtgcagatttgaaattcttattccttttactggtttttttataaaatttgagatgccactggctcatcttgttgcccataagaaataaataaagcgccacccccatttctatgggaagtgacgctttttcatgtttttcttttatctgactgccaaattacttgctcagtttcttggttgcgatctcatcctttaacatcgcaaggaactcatccttagatacggtagtggtgttctgctgtccatgcagacgatagcttacggtgccgtcctgtgcttcctgctttcctaagatgatcaggtaaggaatcttcttcacctgtgcttctcttacgcggtagcccagcttctctgctcgctcatcgatgtctgctctgatgttattgtccagcagataaccgtacagatcatgcgcataggcattcagctcttcgtcatcgttcttgaccggcaggatcatagcctgtacgggagccagccacagaggcaggttacccttggtctcctccaggatataagccatgaatctgtccagagatcctaagattgctctgtgcaggaccacgggagtcttcttctgaccgtccttgtccacataggtcaggttgaattttgcaggcaggcagaaatccagctggcaggtagacagggtgtactcgttacctaccgcaggttttacgtttacatccagcttcggtccgtagaatgcagcttcaccgatctcctcggtatactcaatgcccaggtcgttcagaaccttgcgcagagcgtcctctgcattgttccacatttcgtcgtcatcgtgatattttaccttgtcctccggatctctcagggacaggacacatctgtaatcggtaataccgaaatccttgtaggtattgaagatcaggtctactacattggagaactcggactcgatctgctccggtgttacaaacagatgggcgtcgttctggcagaaatgtctgcctctctcgatacccttcagggtaccgctggcttcaaaacggaaatcatgcgcgatctcaccgatacggataggcagatctttgtaagaatgctgcgtgttagcgtagatcatcatatggtgagggcagttcatgggacgcagtacgaaggactctccttccacttccataggagggaacatgttctccttatagtgatcccagtgaccggaggtcttgtacagatttacagtacctacgcagggagtcataacatgcagatatcccagtcttctctctttatccttgatataattctccagctcctgccatacggtgtaacccttgggaaggaacatgggaagtccgcggcctaccagatcatcagtcatgaacagttccatttccttgccgatctttctgtggtcacgctctttggcctcttccagctctttcagatgtgcttccagttcctctgcggtagggaagcagacaccatagatacgctgcattacgtggttgttggcatcgcccttccaatatactccggagtgttttaccagtttgaagttcttgcacagcttggtgttgtctacgtgaggtccacggcacagatcggtgaaatccccctgatcgtatactgtgatgttgccgtcttccagattgctgatcaggtccagcttgtacatatcgtccttgaacatttccatagcttctgccttggaaacttctcttctgtagatcttcttgccttccttgcagatcttcttcatctctttttcgatggcagcgatcacttcatcattgaccacatcgttgccgagatcgatatcataatagaatccttcctttaccacaggtcctacccagaattttgcatgagggtacagatgctttactgcctgtgccatgacatgggcgcaggaatgattgagcgttgaaagtctttcgtcttccttaaaatttaccattttcgttctcctttttgttttctaaatactcaactattcagcacctcaattcgcaaaatcgctctttcagagttttgctgaaaagtcacaaaaaagtcccttgcaacaatctgcaagggacgtatcacacgcggttccaccctgattgcaattatataaaataactgccactcatttactcgtaacgggagctgccgggctgtattaaagccactcggagatggtcttcgtccgcatccggcaaaaccgctcacagctcctgttcttaataacaaggcggttctctctggtgcctttctatgcatcctactcttctcttcaacgttttctgatcttaaaatctgttgctttaggacttatgttgatatcatagaccttttcacacggattgtaaagaggtatttatatagctttccacattttctctggacatatctaaagctaccgccagttctccatacagatgatcctctgcaatacgaaaatatctggcatccactgctgtctccttacgtcctacttcctctctggcacgtttccgcaggtagatcgtcttgatgatccggatcagatcctgacagcttctggtctttaagcaattcttgtattcctgctctaacagcttatcattggcaatggtgatcagcgggatctccgggatcctgtggatcagattctccgcttcctcgtgcgcaagcaccttacgcatggagccttccgccgtatccaccggaatatataccgtgctggaggacagatacagaggttttaaaatataatactctctcttcttatccactcccgcaatgtctaatgtcgtgatctcttccaccacacagactcccttactgccacatactacacgttcgcccttctgaaacaccttaaccttcctttcctctgccgactgcagaaaaatgcaaaacacaatttccgtttactaccaataatatatccatttttaactattctaacagaaaaaacgccgaaatgtcagtatctttcggcgtttctgaatatttttgtgaatattgctcataggaaatcggtcaggtattgtgcattatttctgataggcgatgcgtggatctccgtttttcaggtaaataatgcctctgcgttcaaagccgttcttctccaataagtgctgcatggtgtgattatcgaaatgggtgtcggcccgcagatatttcactttgctctcacaaaaagcaacacattttgcaaacagtcccttcacttccccgtctcccgccaggcgatggattgtgccgtaaggtctctcctcccgccagctgccgtcctcaatataggcataggtcggttcctcctccagcaaaagcataaataccccgtggatgcgtccgtcttttttatacacgtacaacctctgtttttcaatgtctgtccgcagtgtctccggatccggataggcgccgttccactggttcggattgccgtttgcccgcatgtaagctttggcgatgtcatagatctccagaatccggggcaggtctgcctcttttgccgttacgatctcctccatcccgtcactctctctcctctcttccactgcctccggtgccgttttcccaaggatgtcccgcacggcggtctccatccgctctgccatctgtctgtggcccttcgctgtcaggtgcacatgatccgccttcgtcagttcacagcctcccgcatctaagaaatccgcccgctcagccactgccagcaaagcatattctcttgccagtgctctcgttgtctccacactgttttcattaaaatcaggataaatcacaccctcttcgatgggaaccggtgccacgatcaggatcttcggtccattctttccccagcagggaaccgatttcgcctcttccaagaggatctgcatgccctttgcaatcttccgcgcatccgtattgaatttcaccttggaatcattggtacctaacatcaggatcagcaggtctaacggctcgtggctgttcaacagggcatgcagtaccggtagcagatttaccgaatccatgtccggatcatcatacacacaggttctgccgcttaagccttcctcaatgaccagatattcctctcccagtgctttctgtaacagacaagtccaacgttcctcttcattatatctgctgccgtggtcggcactctccgacggatcggtgcagagcccatgggtattggaatctccgatgcacaaaatatgttttttcactgtttaactctccgttttctatttcagtctgtaactatccaggatccccagacccttttccgactcttgctcatagagctccagccttcggtttcattgacatattcacgtattgcttctgctacggtcatttgattttttctccttctactgttcctttgttcatatttgctgcttctctttattgtatcataagctcacgaattcgtgctatcgcactctacatcctgcttcgcaggatattcgttcgctaatgagcccagaaaaacaaatgtctgcttgcagccacttgtttttccttgaggctcattatatcataaaaggcgaaccctggcaccgccaaagtccgcccttcatcattttcttctcttattcctcattcaacttagctgtataacttatgataattcccgtttctacctttcgcattttctggaagagtaaaaaatttatctcttaagttagtgtcattttagaatcaaaacagacccttaatagttcaaatactaaaaaggaaatcggaattatcaacaaatcaggttcatgaaatgtgacaaggatagaaaacctttcagctatattttcaagtacctgtgttcccgcaagtgcgccggtaccactgatatagaaataaatatctttcatggatataacggaggcaatacgatccaggaatctggtataagacattcccaatactacacccactattaatattgtctgaagcattatttttctccaatttccttgtagcgtttccttaatctttttcaactgtcccacacgaaagtctttcccatgagctaacatacataacacaactgctatcaatgctgtaaacaacagtcctgtttttcccgggatctgaaagaacctgctttccggcatggtaatccaactccattgttgctcatatagatcactttctgtttgatgtgccatgaaaatccaaaactctatcattttgccaaactcagttaacaaaaaatatcctaagatcacaggcacacatttaacagcttccttgattttcatcataggattctccttctaattttgtagacttttgttactctttcattcttttttataataacttatttttttattattatcataatttgtccacaaaaagcagaaatctgaccaccaattattgcacgtccaacaatattttaatacttacctgcatatcaaccctgattgacaactctccttgatattttcccacgatttgttcaataatcttcattccccagccatgcgctaatgaatcctgctctctctcagatacaaaatgattatttttaaccaatggtttttccttatagtcatttttcatttcaattacaagaaaccctgctgttatcgcaatattcaatctgatttgttcttttgctgcttccaatgcattgttcaataaattggcacataatacacaaaattctctatcctccaattttagccctgacggaagaatcggtgtttcgaccaccaaaagaatattacgctgttctgctttctcttttgcttcataaattacggtatctacaatatctacgcctgtatgtaccggaatcattttacactgcagcggttcctgcacgctctctatatatgctaaagcttctctctgatcaccatgttgcagaagtctctccagcgctcgcagatgatgttttatatcatgatacagttttgcattttctgtataaaaattctgtgctctgacatactgactctcaatcagatcatattgtgtatctaatacagagatttgcatcttcagttgcgattggcggaagtaaaaatataccataagaagcagactcaccaggcaggacaggaaaacataattctgaattgcatttccataaatcatatccatgaaaaaatcacacagaaatactgtgctaaagaaagcaatgccaaatgttttcaacagattcaacgctgtaaaagtttttcctattactttatgtcttatagcagatatcaatataccatttaaaaccagccaccctacctgtgcgcaaaattctacatttgtccagaaatgttccaccagtcccagtaaaacagtccagataaaaacataactgactacaagggatgccactttttccacagagccattccataacaggtatcctaaaatagtaagaagtaacagtaacggaatccacgacaaatacttttgcagaccataccatagcattcccgataaaaatattgttaaaataaattttttatctgaatctatgtattttctccgatcaaaaagcatatccatccatatcaaaagccatgccgaattgtgtatgctccacagaattttaatcatttgtactccattttccattatccgtacctgcctgccaatattccattattcgatgttttaattgcgccagccgtcgttctccgatgtacaattgctgccccgtagataaaaccatttggttatctttgatctgtatcacatgatataaattacacaaatatccccgatccacccatacaaattcatcttccggtaatttctccgatatcttttttaaggagcttcttaccttacacctggtagcatccgtcttttcaatatataaatacttaccttctctccaaatatatacaatttttctaaatggtattttttctataccctgttggttttctgcaatataaacctctgaggtacgtgatacaatttccctgaatactgcctccagtgcctgtgtgatcatgctctccatttgttgcttcggaataaaacgaaatggtcggaattcaaatgatttatacacataactctcgtaagcagacacaaagatgattagaatatccggtgctgtttcctgaattttagctgccagttcaaagccatttaattcctgcatttcaatatccaaaaacaacaaatcaaacgcttgaccatcctcaatttcgtaccacaatgccttactgctctgatatacattacattcataaggaatgctttttttcatgaaatactcttttatatgtttttccatgaactccgcgtcttctactgtatcatcacatattgcagctttcattttccatgctgtatactttcccatcgttcccctctcctttatagtataattatgccataactatgtcctttttcaaattatttttattcattaagagtatacataaaaacggtcttttgacttatgccaaagaccgtttcttttacaattttattcctcattcatcttagccagcttggctgcctggtcagctgcgatgcaggcatcgatgatctcttcgatatctccgttcatgatcttgtctaacttatacagggtcagaccaatacgatggtcggtgacacgaccctgtgggaagttgtaggtacggatcttctcagaacggtctccggtaccgatctgactgcggcgcatctctgcttccgcatcgtgtctctgctgctgctcgatgtcatacagcttggactttaacagtgcgaatgccttcgccttgttctgaatctgagacttctcagtctggctgtataccacgattccggaaggatagtgggtcagacgtactgcggaatcggtggtgttgacacactgaccaccgttaccggatgctctcatgacatcgatacggatatctttgtcctcgatgacgatatcaatatcatcatccacctccggcataaccgccacactgatggtggaggtatggatacgtccgccgctctcggtctccggcacacgctgtacacgatgtacgccactctcatacttcatcttggagtaagcaccctgtccgctgatggtaaactgtacttccttcataccgccgataccgatctcatccacgttgatcagctctaccttccaacgctgcttctcggcataatgcacatacatacgatagatctccgctgcaaacagtgcagcctcatcgccaccggcaccggcacggatctccacgattacatttttgtcatcattaggatccttgggcagtaacaggatcttcagctcctgctccagctcttctacgcgcttcttgctgtcgtttaacgtctccttgatcatctcgcgcatttcttcgtctttttcctcttccagcatggaaagagaatcttcgatatcctgtttgcactttttgtactctgtatacgcatccacgatgggagtcagatcactctgctccttcatcagcttgcggaaacgttcctggttattcgtgaccgtgggttcatgcagttcgcccatgatctcttcaaaacgaatcaataaatcttctaacttgtcaaacataactaattcctctcaatataagttgtaacagttcagccatgaacatattggagagcaaaaatcatgcttgcatgattttgtgaacgaatatgttcatgaactaagcgccaggtttatgagcaaaggtagtcacgaagtgacggaaagcatgtcagcgcgactttgcgaatggtgcgggctgaactgttacatacgttccaaaaactacccggtccagaccggcataatcctgcaccacttgtacatcgcagtacccttcggtgcgcatcagctccgatacagcctgtccctggtcatatccgatctcaaaaaagagcattccactgctcaccagatgttttcctgcttcttcgatgatacggcgataaaaatataaaccatcctccgttccgtccagagccatccgcggttcatggtcgcgcacctccggcatcagcctgtctacctcagcactggcaatgtacgggggatttgatacaatgatctcgaattttccctccaccttttcaaacagatcgctctgtaaaaaatgagcatgctccgctttttccggtgtaagcaccttcaagacattccgtcctgctacttccaacgcttccgcagacagatccacgcccagtccttcacagtcattgctgtaatgcagcaggcttaacagaatacagccggagcccgtacacatatccagtatccgcatcccgtcatgaagctccttcagtacttcttctaccagaatctcggtatcctgcctgggaatcaatacattttcattgaccgtaaatgtcagtcccataaaatcctgttccccggtcagctgttgcagcggaatacgtccagcgcgcttcccgatccagccaaagtacttttcttccgcttccggctctaccggctgttctccgtgcaccagcagatcgttgcggtccgttccacacacagcctccagcaaaagtctggcatccagtgtggattcttcgattcctgcctcattcagtatacgactgcctttttcatagcattcacgataggtcatcgtttctaatcctcaggctccgcaggcttttcatcctgcatccagctctcgtccacttcgtagccgaaggtatcctgcagatatttcttccagtcaaacaccgcttccacggacgcgatagctacctctgccatgctctcatccggctccttggtggtcatacgctggatccacataccgggagccgacagaatcttaataaagatattgtccgtgcgccctgccaggcggatgatctcgtaagagattcctgccacaacaggcatcagcagaatacgaaggatcaccttctccgctacattgtccacctgaataaagaaaaacagcacaatgcttaccagcataacaaagaaaataaagctggttccgcaacgcttgtgcagcctggagctatgcatcacgttgtgcaccgtaaggggtctgcctttttcgatacagttaatacacttgtgttccgcaccgtgatactgatacagtctgcggatatccttcatggcactgatgccccatacatacagtaaaaacagggcaatacggatcacaccctcgatgatcgacatcagagaacgattgcggataaagctctcaaacagagatgaaataaaataaggaagtacaatgaagagtcccactgccagtacgacagagatcaccgttacgattccggataataatttctctccgttaccgccgctcattttatccattgctttatcgaactttgtctccttactgtcctcctcttcataaaaggaagcagaataatttaacgccctggttcccaggatcagagaatccaggaaattaaaaataccgcggataaagggaagctccttgattttgctgccgtgagccagcccctgataagtctcaacttccacttcgatctcgccgtcgggcttacggactgccaccgcgtatttttctttatttttcatcataacgccttccagtacggcctgaccgccgattccggaataacgacttttccttctagccataaactttgtcctcgtaatgcaatataaaacagaatcctttttgtcgtataggaaagcactttctgtacgacaagaaacggttgagataagaatacctcaaccgttcgcttgcaatcttatttaacaccgtatttcttattgaacttatcaatacggccatcggttcttgcagacttctgctggccagtgtagaatgaatgacacttggagcaaacttctacgtgaagctcaggcttggtggagccggttacaaatgtgttaccacagttgcaggttacagttgcctggtagtaagcgggatggattccttctttcatttctttcacctctctataaaaatgtcgtgtataagttcttgttctcatcctcactgcttatggaaccacaaacagcggtattattgtaccataagaggagatacggtgcaagacttattttaacattttttgcgataattaaataaagtgatttttcttcaccatgttcacaaattccacattatttcgtgtatgggcaaacatatccagaatccggtcggttgcctcatccggcttcagtccattcagtgccttacgcatgatattgatggcttccaactcttccggagttaacagcaggtcttctcttctggtgccggactttgcaaggtcgattgccgggaagatacgcttctcggacagttttctgtccagaaccatttccatattaccggtacctttgaattcctcatataccacatcatccatcttacttccggtctctaccagtgcggtcgccagaattgtcaggcttccgccctcacgcatattacgggctgcaccgaaaaatctcttgggcatatggagtgctgcaggatccagaccaccggacagagtacgtccactgggagggaccaccaggttgtacgcacgggtcagacgggtgatactgtcaagcaggatcacgacatccattttatgttcaacgagacgctttgcacgctcgatcaccatctcggatactctcttatgatgctcaggaagttcatcaaaagtggaatagatcacttccacattatctccgtggatcgcttccttaatatcggtaacttcctcgggacgctcatcgatcagcaggatcagcatatgcatcttgggattgccgcgcagaatagattttgccacttccttcaacagcgttgtcttacctgccttgggcggggatacgatcataccacgctgtcccttaccgacgggactcaccagatccataactctcatagcaatgctacagccgggagtctccattttgatccgctcatcggggaagatcggagtcatatcttcgaatgccattctcttggaggattcttctacggtatatccgttaatgctcttaacaaacaaaagcgcactgaacttctcctgctgggttttgatccgcttgttacccttcagaatatctcctgtcttcagtccgaaacggcggatctgactgggtgccacatagacatcattctcaccgggcatataattctcgcaacggataaatccatagccatccggcatgacttccagaataccgctggcttcgataccactgtccagttccttgggatactgactctcatcatatgccacattattgggattgaaagtacgttctttggtgtaggcttcgctccgcacgcctacgttctccgcactctccccacgataattgcgatccggtctgtaattcctctcctgtctgacaggacgttctgatctctcctgcttttgcggttcttcgcttctgacggtctctgtcgcagactcctgcttctgctctgctgctttagcctcttcctcttttttcagccgctcatcctctgccagcatagcttctaccagctctgcttttttcatcgtagaagtacccttcagaccgcgtacttttgccagttcttttaactgaactaacggcaatgattcatatttttctctcataaactcctcctctattccttattatcgtccataaaactgttaactaaggggatttacatcttgatctacctatgatgtgtgatgaattaaaaagatataaaaacaacatctgcgtctattataatatattttttttcaaataggaagtcccaaaattatttttttacaaatccttgctaagacatcgattctattatatcattactaatagctgtcaaacacagaaatctgtatgacagatcaactactaatacaattaagagaggtattgtcatgacaaccaacgaaaaagcattactgatgcacgaaaaatggaacggcaaactggaaaccgtctccaagactcccgtcaagacccgtgaagatcttgcgatcgcttatactcccggtgttgcggaaccctgcaaagtaattgcaaaggacaaagaagccgcttacaaatataccatgaaagccaacaccgttgctgtcgtctccgacggaagtgcggttctcggtctcggtaatatcggtccctatgcggcaatgcccgttatggaaggcaaggcagtcctcttcaaggaattcggcaatgtcaatgcagttcccatctgtctggatacccaggacactgaggagatcatcaaagccgtaacttatctggcacccggcttcggcggcatcaatctggaagacatcagcgctccccgctgctttgagattgaggaacgtctgaaggagcttctggatattccggtatttcatgacgatcagcacggtaccgctatcgttgttctcgccggtgtgatcaatgccctgaaggtagtcggcaagaaaaaagaagactgccgtgtcgtggtaaacggtgccggcagcgccggtgtagctattacgaagctgcttctgacctatggattccccaatattatcatgtgcgataaagtaggtatcgtatccaaagacaccgaaggtttaaactggatgcagaaaaaaatgacagaagtaaccaatttaaacaacgagaccggatctctggcagatgctctgaagggtgctgatattttcatcggtgtatccgctcccaacattgtcacaccggaaatggtagcttccatgaaccgcgattccatcctgttcgccatggccaatcccgtgcccgagatcatgccggatgtagcaaaagcagccggtgcccgtgtcgtaggaaccggacgcagtgatttccccaatcaggtaaacaacgtggtggcattccccggtattttcaagggtgctctggaaggtcgcgctacccagatcaccgaggaaatgaagctggcagccgcagaagccattgcaggcctggttcccgcagacaagctgtctgacgacaatattatgccggaagctttcgatcctcaggtagccgaagttgtggctgacgctgtgaaaagtcatattcactgatgcaacggacagacatagcaagagactggcacggtaaaccctactactctctggattcctattgtaaaaatacgtttcaccataaatgttataaaatagccctgaatgcccggatgtcctgtcccaatcgggacggcaccctggacactcggggctgtatcttctgtagtcgcggcggcagcggcgattttgccgtagacatcctcggcaaatcgatggaagaacagattgcggaaggcatttccaactttggcaataaatccatcggacaggatctgatcgcttattttcaggcatataccaatacttacgcacctctcccgtatttggaagaggtctatcgttctgccctggatcatccggacatctgcggtatctccatcgccacgagaccggactgcctgggaccggaggtactggcactgctctctcgcctgaaggaagaataccgtgataaatttctctgggtcgagcttggtcttcagaccattcatgaagagaccgcttcctatatccgcagaggctaccctttatcctgcttcgaaaaagcctgtgctgatctgagggcactacagattcccatcattgttcacacgattttggggcttcccggggagtctgatacacaggttcttcagacaataaattatctgaaccgtatctctccgttcggcatcaagctgcaattacttcatgttctggcagacacggacctggccgaagattatgttgccgggaaatttgaggttctgacattggatgcctacctgaatctggtcatctcctgtctggctcatctgtcaccggagattgtgatccaccgtgtcaccggtgatgggccgaaggatctgctgatcgctccgaaatggagcctggataaacgtggggtgttaaatgctttgcatcatcgcatgaaaaaacagggcatccgtcagggtgacctgtatcaaatataagatcgtaatacaagattgtataagaaaggctgttatgacattatgttacaagatccgcttaccctatataaactcattgtgctctatatgctgaatcgtgtcaccttccctctcacggcagcacaggtcagcgatttcattttaggaaaagaatataccaacttcctgacgctgcagcaggtgatcaacgaattgaccgatgccggtatgatcgccacgcaatccatccgtaaccgtacgcatctatccatcactcccgaaggaaaagaaactctgaatttcttcgaaaaccgcatcggcgatacgatcaagcaggaaatcgatacctatttccgcgagaacgaattcacacttcgaaatgaagtatctgttctcggggattattataaatccacttccggcgaatacgaagctcacctcgtggcaaaagacagaggtatcagcctggtagacattactctctccgtacctgtggaagaaaccgccgcagccatctgcgacaactggcagaaaaaaaaccagaaaatatacaaatacctgattacggagttgttctaatcccgcaatcaggtacctgattttatgattctttgttttcagaagaagcctctgcggcttcttttttgattctcgccatatgttcgcggatcttcacttcatagccgttgccggatggctggtagaactctctgccgctcagttcatacggcagatactgctgttccacataatcattcggataatcatgtgcatatttatatcctgtgccatgtcccaattttgctgctcctttataatgtgcatcctgcaagtgtgtcggaatcggcagatctccggtggcatgtacctcctgcattgcctgagataccgcttcataactgcggttgctcttaggcgctgtggcaacataggttactgcctgagccaaaatgatctgtgcctccggcatacctacccgttccaccgccagagatgcatttaccgctaccaccagtgcctgtggatctgcatttcccacatcctccgaagcacagatcatgatacgtcttgcgataaaagtcacgctctctcctgcattcaacattctcgccaggtaatataccgccgcgtccgggtcagacccccgcatacttttgataaatgcggaaatggtatcgtaatgattgtcaccatttttatcatatcgtgctgctctcttctgaatacactgttgtgccacatccagagtaatgtgaatctttccgtcagcggaaggttcagtagtcataattcccagttcaatggcattcagcgcgtgtctggcatctccaccggagatatccgccagaaaatctaacgcatcttcatctatggttccgttataggcacccattccgcggtccgtatcgtagaccgctttttttaacagttctttgatcgcttccttgggaatcggctttaattcaaagatcaccgagcgggagatcagagctccgttcacttcaaaataaggattctctgtggttgcaccaatgaggatgatcgtaccatcctccacatacgggagcaggtaatcctgctgtcctttattaaaacggtggatctcatcgatgaacaggatcgtacgttttccgtacattccctgcagttccttagccttttccaccacttcttccatgtcctttttaccggctaccgttgcattgatctgccggaattccgcactggtggtattggcaatgaccttcgccagcgtcgtcttgccggtgccgggcggtccgtagaaaataatggagctgatcttgtctgctttgatggcgcggtacaacagcttatccttaccgatgatgtgttcctgccctacgacctcatccagtgtccggggacgcattctcgccgccagaggagcctctttttccatattggtgcttcgcatatattcaaataaatccatatgatcacatcctctgtttctaattttgcgtccaaatcttcatccgccgcttcagtacatttgcctccagcggggtcagcagcagatcctggatcccttccgtctccaacgcacatttcatctgtacaagattcccctccttgcagatggcgatcatgggaagcgcatgttctctctgtaatcctccaagctcctgccagcgtgcctgtcctccgtcctcttcttctgatacatccacgaacaggcccagaatgtcttcgccggtcttctctcccatgttctctctgatctcttccaccgagattactttcttcagatgaacaaactccggcagtgcaaactccagcatgctggtaacattacgggaggatgaccacacaaaagcctgtaatttctgatcaagggtctgattttcctcaccgaacacgctgtagcgtccttttcccgacttcttggatacatacaatgcctgatctgcttttgccgcaagatcatagtagcaatgatcctctggatcggaaaatgctattcccacactgatggatatattttccggtatcgataagttttctttatattttatgagggtgaccagattctctgccttgatcagtgcaatctctttggacggaatgtctcccatcaatactgcgaactcatctccacccatacgtcccacataatctgtgctgcggaactgtgaagaaatgactcctgcaatgacgctgatcacatggtctcccatagtatgaccgtatacatcatttatggatttgaaattatcgatatctatcaccataagagcatgcagaccatcctcatgttctgtcagagtcttcgtgatcagcttctctactgtcatcttgttgaacagactggtcatctcgtcaatctgcgactttgtcttccaggccttctgctcatctctgctattctgcaacctgcgttttacacccagtgtattattgatgcgggtaagcgcgatccgggcatctaccggtttgataatgaattcatccacccccagtgcaaatgcttccgactgggaagacaccgattccgtattcgtcagaacgataaccggcgtgtccttgaagccctccatattctgtctgcggcgcagtacttcaaagccgtcgatccccggcatgaccagatccagcagcaccagatcaatggcatcgctttccttctccatgatcgtaagacattcttcaccggaaacagcctctgcgaagttaaaatgctccccgagagactgtctgatcactactctttgaaattttgaatcatcaacgattaataatgtttctttcttttgtaaactgctcatggctgtcggatcctgctttccgtatcacgtcgtttaaaacgtgatacagttatagtatatccaacagccatgtgctcgtcaatttaaaatatatctactttttacacaatttttatgtggcgtttccctttaaagatcaattttactacgtctgcggagaattcctccgaatgtcaccagacctgcagctgcaagcagcagtatctcaggcatccatcccatcacaccttcaccggtcttaggcacgctgtccagctccggctgtgcagctgcggtgtttgcagctaccgtaaatgtggtacttgcggaatcatcgatccacatgatgtccacggtatgttcaccctctgacagggatgccagataggaaggtttcagggtcacaatagtggagcctgattttgcctcgtagtgggcactggggatccagttgccgtctacacggacaccggcaaattttgcgaaatcgccgtcgccacggatggtcaggccttcggtagtgctgccgttccaggtgctcctggcgccattgatgatcttgtaagtatcgttacttgactgagacgtatttgcctgaggttcatttgcctgaggctcagccgtgtccttcttcacagcttttccctctacaacaatggttcctgagccgttatcatctaactggtatttatatccatacaatgtagagctgtccttaggtaatggtactaacagcgtatcgttccagctgaccttcggttcttctgtaaaataatatccatccttcggttctacataaaggaaaaggtgcgcatcatgggactccgcagcacttccgctcagaccatatcccttagctatatgaccattttccaatttatctctattgatcgtccagtcattccacttttcccatgttatttcagtattggtgttgccgggattggatggctgtgcgtcatcagttttaaattcatacacgaatgtaaaactgcggtcattgttcatatcactggttacacacctcggatcaatggtaacattatcactaaattcataatccgtttccgcagataatgttatatttgcaaaataggtcttattcggttcagcaacagaacctgttacatcctgaccgtcgcttatccacactaaagaatttttatgcacacctgttgtattgatatcccatttggaaggaagcgtttgtccgattaccggcacagttggcgtgatacgtattttcgtgattattgtcataccatatttacgaatatttatactatacttatgagtaggatcaatattattagcccatataaaatatgtataacaagtgttatcattatcctgttcctcggtaaatgataacaacgttgccttatccgtctcatcataaagactgacgctaggtgcctgtgtgaaagcataaccatcctcttgatatagatataaataatatttctgaccattttcatctttgtctacatgtgattttgtttcatcaatatggcatgtaggattagatttgaacgtaaatatatcgtcttccgccttcgcattcatcccctgccagccccacagcagcatcactgccattgctaacagtccgattctctgtaatatctttttcatctgttttctccaatccatattcttgtaatacctggtttacagtcccagcagctgtttcttcttggcttcgaattcttctgccgtaatgacacctgcatccagcagtgccttatatttaggcagtgccacggtgggatcctctgcctgtacgggtgcggcctgcggtgcactctgcgtactctgggttgcggcatggagatctattacctgttcctgtacctggggatcaatgatctgcatcaggttctgtgccagtgcatgcagtccctccgtcttctgggtataatcatccagataatcgatggtgctgggctgatcggaattgaattttggtgcccccgtctccttataaaaactcttccagtaagggtgctccagcgtgatctccacagcgaatttctctaccggattcggaatattgaaatccggctcggtcatacggtctctgtaatccggatcatctcttctgaagttatcgtctcttctgctgtcctccatgttacgacgcatttcttccatcatctcatactgatgccgcagcattctgtattcgtcgatcctgggctttaactcatctaaacgctccttaatattgctcttgtagctccggaagttccccttttctccttcgtacagtacctctccatcctccagaatacggaaggacttaatgtcagagggttccatggcaaatgctccgtcaacaactcccagtcgcagtagctggtgatccatatccagtaccaggcttcccttgaaaaatccgaaatcataacggtaagtctctgtgaagctgtcacgcagcggcttgttggcatcataacacttgatatattcccggaaatcatccagcgtcatggaattgaacacaccatccggcagatcgatcttggctgcacactccttacagagattctgcccctccaccgctgaagccagcagtctcggtgtcggacttccgcagatcggacataactttttgttgtttgtaaataatcccatcgttttaccctccttaagaatgtatatggatcacatgatctcgattaattttttccggtgatatccgcagattcccgctgcgatacgatccggtattctgtgaagcatacaattatagttttccacagaatcgttatagatcagttcactggtcttcaccatatgttcataactttttgttgctttccagtatttctgataagtctcctgtgcctgcaaaagaggcatggtttccgagatctctgcaatatttttctgtactcttaataattctctctgttgttctgctatccactccggcatcccggtcatttcgacattctgtacactctccaaacaaagtttcatttttcgaaaagtctctgcatccatggtatgtccgagaagctccgccaatgcttccagagcctcccgttctgcggaaagctgtaccagtgtctgatgcatggcattccggatattttcttcctgtatctccagcttacaccgtaccgatacgagccagacaccaaaaagggaggcaagcagcaatacgataattataatctccatcgttacttcttccctccccttttcattccttctacgctctcaaaatttctgattgcatcttactgtacaaaataaagtccgtcataaccattcatatcagacatagcgatcagtgttacagtatctcccacctcagacaaaaatccggcataggtaacctctgttccaccaaaatcaagtgtcatcttgatagctgtgttgtcatcggaatactcataagtaccttctgcatttccgccgccctgtaccatggtaactgcaccgtcttcaccaaatacaagctgtaaggtaccgccataagtctccagtgttgcgttcagatcctcttcttccatctcaacaccatcgatcataccgccggcaaagttccattctgtaccactcagatccgggatctccataactgccacctgtaacaggggaccgccctctgcttctgtacctgtctctgctacagtctctgctacagtctctgtgggagcttctgttgcttcctgggtctgtacttctacagacacttcttcgttggtgttctccacaatcacttcttcctcaccgcaggctgtcagagacaatgccagtaccagtcccatcacacatgcaaaagttttgttcttcataatatatttcctccttcttacaacatttttctgttgtctgaatatattgtactgtattttacctgttttagactctttatgacaccaatcgacccaaatatgtaatgaaacgaccggagaaatactctccggtcgtctcgcagttccatctatgataaaaatgtttggtttttacgaaagaaataatcaaaaaatttatcttttaattccgaatattttccatgagggatcggaatctgtatgccatctgtcatggtgatggtcttactggaaatattctgcacataatccatattgatgagataggacctgtggcagcgtacaaattgttcgtaatccttcaactgttcgcacagatcatccaatctgccgatactgtccagtgcttctccgtccttgcggtggaacaaaagtgtccgtcccatcacctcacaatattgcaaccggtcaaggtccagtctggtaattccggttctgctgcgcaggatcaagctgttttccttatctttgtggcattccgaaagtacagaatccatcaggcggtaaaaactttcctgccagataggcttcaactggtagaaataagcgcctaccgaataagaatccacagcatactctgccgaagatgtcagatagataatctttaccgaagtatcatactgccggatttccatggccgtactgataccgttctgcgcaggcatcagcacatccagaaaaataatatccagcctcgttcctctctccacttccgtcagcagctccagcggactgttaaatgaagcatacataatattctgattccgttctacccgatacttgtccatcagcgcaccaagttctctcagtaccgacagatcatcatcacaaaatgctatttttatcataggttttctttctcagtttctaaactcatctgtaataccatgacaattatacgcacactggaagctttcagtcaaacaatatttcttccactgttacgaattggaatccacgtttctgcaaaacatccaccacttccagtgcggcagtcacagaagtatcataataatcgtgcatcagaataatatcaccgtctccggccttttccaccacttttgccgcaatacactctgcattgtgggagcaccagtccagtggatcaatattccacagcaccgggaacatatttaattctttttcaaagcttttgtcccagcttccatagggcggacgaacgaagctcaccttttcccccgtaatattttccaggatctcattggtctttaccagttcctcccggaacgtttccctgttcccggaggtgagttggatatgactgtacgtatggtttccgatcagatgtccttcctcctgttctctccggataatattgggataattctgtgcgttctccccggtcacaaaaaaagtcgccaccacatttcgttcttttaaaccatccaaaagctgttccgtatacctcggatgcggaccgtcatcaaacgtcagcgcaatctttttcgccacatcttcctctccggtgatcttcccggtcgatacttcctgcgaagcaggtgctgtagtatcctgacgttttcctccggcccacaggcataacattcccatgatcatatcaaaaaccagaattcccaccagcgtttttttcattttcatccatccgcttactgctttcacagaaaatatatgcatccggacaaacggcaattcctcgcagcaaaaaaggaacttcggaatacagaattccaaagttcctttctgttctatgtctgtcatcaaatcttgaatacagaaatctcgttcttgaggccttccatattctcatccagtacacttgccgtattgctcagcttctctacatgctcaagcaacttattagccacatcattaacagtctcggcacttcccgcagtctcttcgatgatatccgaaatattcttcactgctgctaccgctgcactacgttcgccatcagccttttctgtacttgctgcaatatccttcaatccctcgatcagctgccccatgcgagcctgcatctcacggaatactgcaattacctcgtccactgccttggtctgaagctctaccatcgcctgtgcctggcttgcgctgtctacactgttctgcgtctgtgcagtaatgttcgcaacattattgctgatctcaccggctgccttggcggaatcatctgccagcttgcggatctcttccgctaccacagcgaaacctcttccggcctctcccgctctggctgcctcaatggaagcattcagggacagcagattggtctgctccgtgatctccgtgatcgtaccgacaaagctgttgatgatcgcggattccttacgaagcgattcgatactgtcacttacctttgcagtcatcttggtcgtctcaccggctctgtcacccagtacctgtacgatctccattcctttgttgatcataccctcggtctcatccaccagtttctcaacacgttctaccacgcggcttacttcctgcatttcattggagaggacatctgtcttctccacacattcctgtgcatgtctggactgttcttccatgccttcgttgatctctccgatggctctggtaatatcctgggaatactcatggatcaattcggaagcctgtcctacattctgtgcggatacttccagttctccggtggcattgcttacctgatttaccagtttcttagtattcgtgatcatattggtcgcagatcctgccagatcctggaactcatcgtggcccttggcagataccgtcacggtcagatcgccctgtgcaacatcaccgaactttctggagatgcgtttcatgttgttctcaataccggcagtaataaagatacccacgatcaccacgatcacacatgccaggagcaccagtccaatggtcatattacggatctccatagcctggctggtcaccacacgcataggcaccagtgcacaggtggtaaagcccacttccgcactgcgactatagataaagaggtatttttctccacggaactccacttccgcagtgccggaatccgatactgcctgctccattaccccattataaaattcctgatcgacgaatactttctcatcctcagccagagtactctcttcaccgtcttccagctgctccactaccagttctcttccactcggagtgataaatccgatgatactgtcatcaccgatatcgatctccttcaaaaagttcgtaatagtcaaaggcttcatgtcaataacaacgcaggcattgttagactggctcatcatctggaaagacaatatgtagtcctgctgcgtctcttttaccttttcatccagcaccggatggctgtcgatccactgtgggatgcttcttctgccttcgccggaagctaccgactccttatattcatccaggaatccatccacaccggaagaaagcttagtagacaaaagtcccacaccttccttgggaataatgtgcatatggctgatgaatgggttggacgtctgcactgataacagattcgatttcgtggatgtcaggaaattcagtttgtctaccggattatcctcgaacattcccaggaaatatttccgcagatcatcgtcatacgcatatttcaaaccctcggaacggataaaatcacaagtcatgtccaagtattctgtcgccatgcgcacagtctgtaacgtggaatccgtatatttctcacttaagccttccgcagacttctggtatgccgaaatgccgataatgatcatgaacacgatcggcaccaggaaacatactacgatcttattgcgtatactgaacagtttggagcttttcccactcctgccggatgtcttcttcggtgtctttgtctttacagccttctctttcggtatttttgtcacttttttctcaggttttggcttcttttgggaagctttctcttttttccccgcaaaaagagatttttttgttttctcaacattcgtactcatacaatatcctccggtacctgtaatcatattaagaagtataccatgatttttgctataatgaaacaacattttatgcgctttgctatatttttttgcgcaattttaacaaaagtccatcttttttaagaatgtttctgtgaattttacctgctctgccagattcaatatctgaatctgtaattcctgccgccggtgcagatcatcccatgctcgcagctgtccggtcagcatcctgtttcccaccagtgcagcgccactaagtgccgtgttgccgccggtcacggtacgatctgtaagttccttcggaagcagtccgatggctgcagctgccttcggatccaggtaatagccaaagcctcctgccagcactaccttggaaatatccgaaagtctgattccatagctttccgtcaggatctctatgcctgcggcaatggctcccttcgccagttgtaccgcacgcacggcttctttcgtgacaagtacatctccgatacggatccccttcgtaaaatagggttcctttaacagtccctgccgatccatcaatccctcttccaaaagcttttgtaacaatttcaccatatccgcgccccagataccacggtttgccccgccctcgaaggcaggtccggccgccgtggcacatgcacatagcttttgtctattccccagtgccatctcaccgttggtccccaaatcgatgagcagcatgggttcctcctgctccaacatttgacaggccagtattcctgctgtgatgtccccgccgacaaaagcagacaatccgggaatgatatgacaggaaatgcctgcgatctgcgtgtccacagctccgcaatgacttacctgaaaaggtgccctgcccagttctgccggatcccagcccatcagcagataggtcatagtggtattcgccgcaatgaccatctgtatagactccttctcctgcagctttttggaaaaacgctgcgctcccttttcaatgaggtccaggacttttttctgcatatccgctgctttccccggatcccttgccgcctctatccgtgagagtacatcggcaccgtagctgacctgtggattcacactcggaaaactgtccaccactttaccgtctgcatcatagagctgcatggcaatggtagttgttccgatatccactgtcatcagccggatactttccggattctgtaaagataacggaggaagctccagcttttccgtcaccacctgcatcccccggatcactccgggacatctgccgcagccggtgcagatcagacatctggttccctttttccctgtaagactgctggttgtattatacaaactgattcctctcttcattgtaatgataatcgatggatgccagcttatccctgatctcctgttccttcacatccagatcttcgcagagctgctccaggcttccgtaatagtcacggagtttcagattgataaagcttaataacatgaccggatcctgtggtatcataaaaaaacctcgcttttaaaatattattactataacatcttaaacgaaaaaagcgaaaatgacaagtctgccactttcgcttttcgtattactgtttatttatttttagagcctttctcacatttggcggaaagcttatcgtcctctacggtaatgacgatggtatcgccctcctccacctgatctgccaggatcatcttggcagccagggtctccacatacttctgaatataacgtttcagaggtcgtgcaccatagaccggatcatatgcgttatccacgatgtactgcatagcctcgtccgacagacggatcgtcagctgcttatcctccagacgcttattcagatcggcaatgatcagatgaataatgccgccgatattatccttggtcagaggcttgaacaggatcgtctcatccagacggttcaaaaattccggacggaaatgtgcacgcaggtcgttcatgactgctgcctctgcctccggcttgatggtgccgtcttcgttaatgccgtccagcaggtagcttgcaccgatgttggaggtcatgatcaggatggtattcttgaaatctacggtacgaccctgagaatcggtgatacgcccgtcatccagtacctgtaacagtacattgaatacatccggatgtgccttttcgatctcatcaaacaataccacgctgtaaggttttctccggacagcttcggtcagctgaccgccctcttcgtatcctacgtatccgggaggcgcaccgatcagacgggagacagaatatttctccatgtattcactcatatcgatacgaaccatgttgttctcgtcgtcaaacagtgctgctgccaggctcttcgccagctccgtcttacctacaccggtaggtcccaagaacaggaaggaaccgatgggcttactgggatccttgataccggctttggaacggatgatggcttccgtaaccttggtcacgccttcgtcctgtccaactacacgtttgtgcagttcttcgtcgaggtgaagggtcttgttacgctcactctcggtcagtttggctaccggtatgccggtccagcgggaaataatccttgcgatctcttcctccgataccttttcatgcaccagagacatatccgattcgccgaccttattttcctcctgctccagctgtttctccagtgcaggaagttcgctgtattttaatctgcccgctttctcatagtctccttctcgctctgcgatctggatctcattgttgatacggtctctgtcctcacgcagcttggaaagcttatctacggatgccttctcgttatcccactgtgcttttctcgtattgaactgatcctttaactctgccagttccttctgcagatcagccagacgttccttactgatccggtcatcctcttttttcagagcagtctcctcgatctccagctgtgtcaccttacgttgcagttcatccaactccgtaggcatactgtccatctcggtcttgatcagggcgcaggcttcatccaccaggtcgatcgccttatccggcaggaatctgtcggtgatataacggttggaaagtacggctgcacttaccagcgcattatccatgatcttaacaccatgatatacttcgtaacgatccttcagtccacgcaggatagaaatcgtatcctccacggtgggttcttctaccataaccggctggaaacgacgttccagagcggcatctttttcaatatactgtctgtattcatccagagtggtagcaccgatacagtgcaactcaccacgagccagcataggttttaacatattgcctgcatccagagcgccatctgtcttaccggcaccaacaatggtatgcagctcatcaatgaacagaatgatctgtccgtcgctgttcttcacatcatccagtacagctttcagacgttcctcaaattcacctctgtattttgcgccggctaccagtgcacccatatccagtgcgaaaatcttcttatccttcagtccctgcggtacatcaccttttacaatacgttgtgccagcccttccaccacggcggtcttaccgacaccgggttcaccgataagtacagggttgttcttcgttttacgggacaggatacgtaccacattacggatctcactgtctcgtccgatgacaggatccagcttctggtttctcgctttctccaccagatcctgaccgtatttttccaaagtatcgtaagtagcctccggattgtcactggtaactctctggttgcctcttacggtagacagagcctgtaaaaaacgctctcttgtgatgccgtattccttccagatctcggcgatctccttgttgggattcctgatcatggcaaggaacagatgctcaacggagacatattcatctcccatctgctttgcctcatctgatgcgttgaccagcaccttgttcagatactgaccgacataaggctgaccaccctgcacctttactcttttctccagagcctgttttgcacggtttacaaaatgatccttttggatctccatcttttccacaagctttaagatcaggctgtcatccaacgtcagcagactgtacagcagatgctcctgctcaatctcctggttgccatattccatggcgagcttttcacagccgttgacggcttctatggatttctgtgtaaatttatcaatattcataatcgttcgcctcctcactaaggtgttacaattttgtttttcacattaatttcttagacaatgaactgatttgtttgaattgttttattccaattcctttgtccgcgccttcgtcagacagatgccacaatctcaaaatctctcttgtttcatctgttctatagttaatataacacatagtgtaagaaaatcaattaagaaagtataaactttatatagaatctttcgaaaatgcataatttcccctttgcattttccatgatacgattgattgatacactttcacttacgctatttcacaacagacgtgcatgattataaagagatatcagtcatgggtctatgcagaaaaatcttgttttctgatccccttttctgccataatatcactccagaagattcactttgggtctatagaaaaaaatttgctctccagatactcatttttcatgatatgagtatctaaaatgatattttttctgtatagacccaccgcgcacaaaaatctatgatatctacataaaaaaagtatctggaaagcacttttttcgctatagacccaaatggcgctgccaccgcattccgtctgctcataaagcagaccgcaacacggtggcggcgccattttttcatcatttgctattcctatccgacaacaaagggcagccttattttgcagtaacgcccttcacttcatatcctgcgtccaccacagccttggtcagtacctcatctgctacatcggatgccagttccacggcagcgttcttctgctccagactcatggtaacggttttcacgccttctactgcctccagtgccttctgtacggttccggtgcagtggttgcacatcattccttcgatactgattacttttgtcattgtgtttgtcctctctttctcctgctttacatcttgtctgttattttgctctgcgggggctttcagtatgcactgttcttcctccgcagctgcatgcgttatctctatttccttacgggctgcttccggtactccttttttcagcggggtgaatccactcttaaagcctctcagccgcagggcatttcccacgacgaagatactgcttaagctcatggctgccgcgccgaacatgggattcagccggatctggaacgccggatacaacacaccggctgccagagggatgccgatgcagttgtagaaaaatgcccagaacaggttttccttaatattgcggatcacggcacggctcagcttcatggcagtcaccgcatcccgaagatcgtttttcatcaggataatgtcggcactctccatggcgacatcggtacctgcgccgatggccatacccacatctgctgccgccagtgcgggagcatcgttgataccgtcaccgatcattgccaccttgtgtccctgacgctttaactcactgaccttcttctccttatcctgcggcagtacctctgccacgacttcggagatccctaacttctgccgtacagcttccgcggtgcggcggttgtctccggtcagcataatgaccctgactcccattttctcccatgcattgattgcttcataggaggtggctttgaccgtatctgatacaccgatgattccaaggaatcctgtttccttgggccaagttttctggatgcaagcttcctgagagcctccttcccggaagtttacttcctggaagtttacatccattgctaccagaagcggtgtcataccttcgtccgccatccggttcagggcgtctaacgccccctccggcaaaataatattcttctcctgcagaaatgcaagattgcccacatagaattttgtacctgccggaagaatagtttttctctgcgacagctccgcagactctgaactttcttttgtcattgttgcggcatcttttgtgccattttctgttccgactgaatttcccgtatttttttcatcaaattttcctgcataaaacactgcagtcggtccatcttttttcaagaactcctgcgcagcaaaatcctgtgccagcgcaccttccacaccacgtccgaaggttgcctggaaatcagtgatctccggaattgtcagccggaagctttccgcatattccactaccgcctctgccagtggatgctcactttttttctccagtgccgctgcgatctgcatcatagcatccacagggaaatcgctctgataaccgcctgcttcttctacctttaacttaccgcttgtaatggttccggtcttgtccagtaccacggtgtcgatctccttagcctgctgtaaagcttccccggtcttgatcaggataccgttgctcgcaccgacaccagttcccaccatgattgccaccggagttgccagtcccagcgcgcagggacaggaaatcaccagtactgcaattgcagtggaaatcgcaaactccgcggtcgcaccacttgccagccacacgatcaatgtaaccagcgaaatcgccataacagtaggtacgaatactcctgccaccttatctgccagttgtgcgattggcgccttgctggcactggcttcttccaccaggcggatgatctgtgccagcgtggtgtcatcaccgacacgatccgcacgacattttaagaagcccgccttgttcacggtagcggagaccacatggtcgcccgcctgcttctccacagggacactctcaccggtgatagccgcttcgtccacgctggagttaccctccagcacgatgccgtccaccggtaccagacttccaggctttaccaggaatacatcgcccttttgcagactctccgtaggcacttccttctcctgtccgtccccggttacgaggattgccaccttaggtgccagattcatcagtttggtaatagcctcactggtcttgcccttggaacggctctccagatattttccgaccgtgatcagggtcaggatcgtaccggaggattcaaaatacagatcgtgggaataatgctctactactgccatgtcaccatggcctaagccatagctgatccggtacatggcgaaaatgccgtacacaagcgccgcgccggatcctaaggcgatcaggctgtccatgttcgggctgcggtgcgccagtgttttaaatcctacggagaaaaacttccggttcacatacagaatcggcaacaacagtaaaaactgtgtcagtgcgaaattcatggcattggcattgccgtgcagggtattcacgataaatgcagggaccggaatcccgaaccattccttgaacatatgatgcatggacacatacattaacggaatcaggaatccgatggagattccaagccgccatttcatggctcttgcgtccgcatccagcttctgctgcaattcctgcttgccgtcggctgcggatccgcttcggcggtttccactgccggaagcactctgtccgcctgccgcattcccgttactgctttcgcccatcacggaagctccgtaacctgccttcaccacagcatcaataatcccttcggaagataatctgctctcatcataagtgacatccatagtctctgtcagcaggttcacagatgctttttccactgcatccaatttatttaccgccttctccacatgcgaagagcatgcggagcaggacattcctgtcacatgatatctttctttcacaatactacacctctttccctatctgtaactgtatattttcgcccttatttaagcgtatgctctccgcatatccgctgaatgaatttatttcgggcgtgtacaacctcacaagtctttactttaatttttttaccagttctaccgcttcctccacgatagcagtattccctttttgaatctcctcaaccacacaggtctccatgtgctccttcaggattgcataaccgaatgcctgcagggcgctctccaccgcagctacctgtgtcagaatatctccgcagtagcggttttcttccaacatccggctgataccgttcagttgtcccgtcatgcggcttaaacggttctgtaattgttttctttctttttcagagcgaggtgttgctttctgatgacaatggcaacatttcatgcccttctcttctaatttttcttttaattgttctgccatactttctcccatttcgaatccggctcctgctaatttttcctatctgtccgtatattatttattgtcctttggtcacatagcagtgttcacaatctgttgaacgacttattgttgctgcaatgcaaaataccccataggggtatcttgtcttcttctacaagatatacccctatagggtatttgtcaagaggtactttttaattcctgccatttcacctctgaccaaaactgatccttataatcggcatcttcatgattctgccgccagtcttgttatccgcgctttctctgaagtaagattcccatggtaatcagaagaattcccccgaaaagtaacatgatttccattacataagctgtaatgtcttctcccgtcttcggtactacgtccaatttctgcgtaactgcctgtgttgtagccggctgtacatcagaactgttgtcaccgtttcctttagaatcctcatgagagcttccaccggtactagtacctgcagtcgtcttttccttttttacaatgacataggtagaaaactgattggtctcgaaggtgacttttccattgatcactttcgtaggcaatgcagtggtagttccgttatgatctctcaccacaacatagtcataattcgcatcgtagttgttgattccaagacttaaggtaatcggattcgtaaattctgtaatctttgtttcccagttcgtgccatcccctttgcctacgatctggttcagattcaattccactgcctgtgcagatatcgcccctgctactttctgctgtgccgccgtcatatcgtatccggtactgtcggcaactgtcagctgaagattaccgctttctgctgcattggcgccgttgctgatggatacggaagtcacttccttcgcagctgatatatccaccatgtcctccgctttcccaaatattccttttaaatggatctgggtatttggcatcgtgaaggtaaatgtggaaacatcctttgccgctgccaggctcatcccgtttagtgaaactcccttcaactggtatccgtaatccggcttcaattccacggtaaccttatcccccggctgtaccaccagatttccaccgctgttgtttcctgcattgtttccataaggatcgttggtattgggtacagcatcattgatttgaatgatccgggccgtcccatgctccagataagcatcctctccgtaggttttcgaatcatatccccatgttattgtaattctctctttgtccacctgaatggaatagtttctttttcccgtccatgtcatcgcattatcttctgaagttccggctccctggattatatattttcctgaaccgctattaagtacatatacttttaccgtgtccacagaatcgtccactctgtattcttctccagccacagaaatctttttttctccgagccattgattcaacgttttataggtctctccgattcctatatagatttcgatattactttttttccatgtgacataatcgtttgaagaaataccgtcaccttctaatcgaaaacagatattgtttcccgttcccggattcggtccgggtacatttcctcccgctgcttcgaacatgggttcaaatttcagatccacattttctaccttggtttgataaatatacgaagcaccattgtaggtcatgcttgcatctgcgatgctctgaccattcaccataaagcttctcaggacgcaatccttatccggtgtcagtgttatggtaagctcttttcctgctgccacagttgcctgtgcagcatccccctgtaatccggccccttctattttcatactaccggcagcatattggaatacaccatcctgcaccctgtcccacagtgtatgatcatccgcgcccaccttatatgtctggctgttgtcctctgctcttacatgaaattccggcaaaactcccaatatcagcaccagtgccagtaaaaaaacaaatatctttcttctgcttttgtacatctgcgcaagtcctccttttataatatacttatatatattcataggatacctgcctttttcaagttgacatttgtctcaacctgccaaatccacgcattttctgcgtccatgggtatcacaatgtcactctgtctctcataccctcgcttcctctgctccgtgggtatcacaatgtcaatccgtctctcatacccgcgcttcctctgctccgtgggtaccacatcgtcaatccttctctcatacccgcgctttctctgctccgtgggtatcacatcgtcaatctatctctcatacccacactttctctgctccgtgggtatcacatcgtcaatccgtctctcataccc

SEQ ID NO: 11293 - DNA, 20812 bp, Unknown
  gut microbiota DNA sequence
ctctcatacccacactttctctgctccatgggtatcacatcgtcaatccgcctctcataccctcgcttcctctgcgtccgtgggtatcacaatgtcaatctgtctctcatacccgcgcttcctctgctccgcaaggcgcacgataaaaaagaatctcgcttgcgagattctccgcctgcggcgggtcgcttttgcgacatatttcataaccgccgcggtgcgatccctgcggagcttttttaattcataggaagaaatttcctatgaattaaaaaagcacagtccctcacagggctgtgcttttctcgttctctcgctatttcttatcttcttcccagttgtagtagaactggatcagtccgatgcggcttctggtgccggtcttctcattcagcgcagaaacatgccgatagagcatcgcgcgggagacaaagagactgtcggcgatctcctgcattccatcatcggacaacagcaaaagctgcagcacttcctgctcccgttccgtcagatcataagcttccgcaaatctctccagccggctctgactgccagacatttcgcgactttccatttcttcgggagtctttacaatctgcgtacaactataataccacaacagtgccacactgatcagcacgaacagcaccagtgccagtactgccgtcaagatatgatcttctccagtcagcaggcttacggaagctactcctgtgatcacagcgcccagattgttcgccgctcttcccatacctgcccatagcctgccatcctgcatgcgataggacaactggagaaatccgttcgtgaaaaacaccacgaaaaatcccgcagacacatagaagatcaacagtcccggcagaaacgatccgccgctttcgatgatcagcacacagatggtcgacaggatcgtcaccgcatacatgatcagtccacgatatcttccgttattcagatcaaacagtactcctgccaaaagtccgctcagtgctaagaacagtctcggccactggccgatatccatggtacccgctgcatgcgccaatgtcacagcattgtccaatgtagcgaagatacatgtcatcagaacaaccgtcaccagcaatgctacacctgccagccggggattcttccatgtaatccgctccgcagcagcaccgtcctgcatgtttttcaccgacaccgtttcgccgtcctctgccttctgtctccggtgatatccagacaatgcatcctgcgccattccgacagtcagtatccacagcaccacaaaacttaccgccaggaagataccttccactgtctctccccacaacagattgtggttcagaaactgaaggagcagccccacagcataagccacactcacagtcttcgccggatgtctgcttcccctaagcaactgtgccgccaggtaatgtgtcctgctgcccagatatcccagtatcaggaacagaaaacacccgctgcccaatagtacccggtacccggtcccggtaagcaacagtacatatcctgcgatcaccggcaccggcaagaagaatcccgctaccttgaacgcagtgggattcccggatttgcttttccatttttctatcagagaatatgccaggaaaccaaacacgctgacgcccaggatatagctctgcgccagcactactcctgtgggatccgtacataacgccacccggttatcaaacagatactctgttcctaaaaacacaaaatagaaaacagctaatgaaagcatggtctctccttatacagactggaaaccaccttccagatcctcaatgatatcatcaatattctccgtaccgatagacagacgaatcgtattgctgtagatgccctgctcattcagctcttcctcagacagctgtgcatgggtggtggaagccggatggatgaccagagacttcacatctgccacgtttgccagaagtgagaacagctccagattatcacagaactttttcgctgtctccttgccgcccttgatctcgaaggtgaagatggaaccgcctccgttcgggaaatatttcttatacaactcctgctgctccagatcggtggatacggaaggatgatgcacacgttctacctgcggatgattgttcagatactgtacaactttcagtgcattctccacatgacgctccacgcgcagagacagtgtctccagtccctgtaagaaaataaaagcatggaaaggggaaatgcagccgcccatatcacgaaggagcattgcacggatagcggtcacaaaagccgcgcccggtgctgccttagtgaaagtcacaccatgatagctgggattcggagtgcacagatgagggaacttgccactgccctcccagtcaaatttaccattctctacgatcacaccacctaagctggtgccgtgtccgccgatgaatttggttgcagaatgtaccacgatatctgcgccgtactcaaaaggtcgtaccagataaggggtagcaaaagtattgtccactaccagaggcaccttgtgtgcatgggcgatctgtgccagacgctcgatgtctaccacatcagaattgggattgcccagggtctcgatgtagagcgccttggtgttctcccggaagcttgcttcgatcctgtcataatcggaaggagccacgaaagtagtggtcacaccgtagtccaccagggtatgcgccagcagattgtaggttccgccgtatatattatttgcagaaacaatgtgatctccctgttttgccaggttctggatcgtatagcagatggctgctgctccgctggctactgccagagctgcggtaccgccctccaatgccgcaatacgctgttcgaagacaccctgggtagggttgcccagacggccgtagatctcaccgggatcctccagtccaaagcgtgctgccgcatggtcgcagttgcggaaaacataagaagatgtctgataaatgggaacggctctcgcaccggtcacgggatcgggctgctcctgtcccacatgtaactgtaatgtctcgaattttaaattacgctctgcatagggctttttactcatgttctgcctcatttctgcactttatgtgcttatgtatttttctatgatgccaggatcaaaaggtctaagcccacatgcttgaccccgactttatttctataaaaacatgctaaaacacattacaaattctgtcaatgtaaaactttagcacagtaccatgatttacttcaccagccgatccttatacttcagccattttcccgtccgtatcctgttagtaaacaaaaatgcccgtacgacccagtccatggtcatagcgatccagacgccgatgacgccgagtcccagaccctgtcccaaaatatatgccatgcccacacggcagagccacatggaagcgatcgccacgatcatggtgaatctcacatctcccgcagcgcgaagcgcattcgactgtgcaaaggacaacggatgcaccagcatacaacatacacagctgtaacataacagaaaaacagttattttcattgtctccggactcagatgatagattccgcagatcggccgggcaaaaataatcatgggaatgcccagcaggatcatacaggcatatgctactttcatcatttttttcagataatataatgcctgctctgtttctcctgcgccgatgcactgtccgatcacagtgatcattgccacaccgatggcattggcagggatctgctggaagctggcaatgctgcctgttacagcatttgccgtcgtagctgccattccaaatccggcgatcagactggtggtcagaagcttaccgatctggaaaatactattctccagaccgttcgggacgccaatatacaggatttttcccaggatgttcgtatccagcctccagttattgctcattacgattttgtcactcttcttaagcagcactacgatcatcaccgcagacaatactctggaaaaaagcgtggacaacgccgctcctgcagcaccgattccaacaccgtagatcaaaatggcatttcctgcaatatttaccagatttgccaccagagataccttcatggacaccttggaatctcctaccgcacggaacagagctgctccaccgttatagattcccagaaaagggaaggaagcggctacaatataaaaataaattcttgcagcactcatgacatccgcttccacattgccgtaaagcaatgccagcaatcccctgttccagatcagcgctatcgtcataaacagaagggccacacccccaaccgctataaacagctgattggaggcccggcctaccatttccttatctccgtgtcccatgtattgtgctgccacgaccgcaccaccgcttgccatggccgtgaacagaccgatcagtagcacacagatactgtccacaagcgaaatcccggatactacagcttctccacagctggctgccatcactgtgtcagccattcccattgcgattgccagaaactgttctatgatcagcggccacagtaattttctcaatgcatcctgtgaaaataacatttttttctcttccgtcataatttacatcattcctttatccttacattaacatctgccaaaatagcacattgtcattgcattgtaaatagaaatgtaattttatgattcagtaactattcagcaccccattcgcaaaatcgcctctactaggctttcctgaataacatgcttgcatgttatttgctcatagtggttacttcgccctataaatagttacagttcctgatatacaaaataatccgcagccaccgaaccgccagccgcaccctgttcgttgatggcaaacagtccgtccttgacaccgacccagcggcccggtgttgcttccaccatctgtcccacaggctgtaagttttcctccgtggttcccacgtagaacgtacggtaagtctccttctccaccttcatctgcatatagatcacatcgctgttccattctcccagaccggtgcgtatctcatcatccttcgtccagttgccggtgcgctgctgtaactgcatttttccattgattttctgcaccgcaagtgccgtataacatccgcctaacgataccagtcctgccacatcaccgtccttcatctgctccagctgcagacaggtggtaatagagaattccggtgcaggccacttctgcaataacagattactgatgtcgcacagctgtgtcttcggatccgccgcctgtgcatggagaaggagctgaccgtctttcagctcgtaccattcccttttataattggcattccactgccattgcagtcctaagcaatcgccttcgaagaaatcgctgtcctccggggtatcgatggggtatgtagctcccacttccggcttcttataacgcagtaccggctcaccacagccgtccacggcatttactccgatcaccggccagtcgttctcccagtgcatgggctgtaaatgtacgatacgtcccgcattgcccacatcctggaaatgcaggaaccagtcctgtccgtccggcgtatccacccaggcaccctggtgaggtccattgacaggggaattgccctggtgcaggacgattttctcttcccagggaccataaatatttttcgaccgcagtacggtctgccagccaggcttcacgccccctgccggagcgaagatatagtaatagccgtttctcttatacagcttcgggccctcgatggtgggctgggtcgcatgaccgtcatagatgaactgaccgtcacccagcactccggagcagtccggttcgatgggagacatatacagcatgctcttgaagccgatacggcttctggcgaaagccgtcaccatataagctttgccgtcctcatcccagaaaggacagggatcgatccaacccacgaccttacgcacataggcaggctcactccatttgccccacgggtctgtggtcttgcacatcataatcccctcatccggcatgggaataaatacgtagtaagttccctcatggaagcggatggcaggtgcccaggtaccgcagccgtgtaccggcttgtcataatattcaaagggaagtttatccatgatgtaattgatgaccttccagttcacaagatccttggaatgtaacagaggaactgcgggggtattacagaagctggaagcgatcataaaataatcctctcccacacgaatggcatccgggtccgagtaatccgtatacaggatcgggttggaataggtgccgtcgccctgatcggcgatccacattttatgtatcttcgtcttgtccatagtatctccattccgcagccttttgccgctgtttcgtattttataaaaccagtatagcagatatcccgtcacatcgcgtgtcaatttcccattagtttgtgtcaaatcttgcatttcaatagaataaatgtcataatagtgacaaaagttgcaggaggaaaacaccttgagtttcttttatcagaatcgcaaagaacaactctatctgtatctgtccaataataatccttacgccgtccatcttcacagacagctggagctgatctatgtcttaagtggttccaccacggtcactgtggaacagcaggaatttccgctgactcccggtcagggtgtcctcgtttttccgaaccagatgcacggcttaaaacatgtggaacccggtcagaatctgctctgtatcttcgagccggatttctgtcattccttccgacattttttccagaataaaaagccctcacgcaatgattttgccatctccaccctctcggagcacagccacattgccttacagggactcgaggctctggcttccaccatggaaaaagatcgtcccactccttctgatgtgcagatctatgcggaagggtatctgacgctccttttggcagatctcctaccctctctccccctgcagacccggaaaagcacggaggatctggagctggagcagaggctgcttctctatctggatgccaactacacgaaggaattgtccctggacagtctctcgaaagaattcggtgtcagccgttttgtcctctcccggatatttacggaaaagttccacaccactttcccggattatgtgaattccagaagacttgattatgccagagaccttctgctgtccacggagctatccgtgacacagattgctctggatgcgggctttggcagctcccgtacctttttccgtgcctttcaggataccttccataccactccgggagcttaccgcaggcagacggaatctacccacaacagctcctcgcccgcccggatataatccttccaggtacgaacgatccgtccccggtcaggtgtctgacacatctccactgtcaccgccgtatccacgccttctctcgccagcccttcctgatcgaattctacgagaagcttgccttttctcacgatctcattgggcaggacattgcagcggtaatagttgctatgaagttcttctttatccttacagatattcaatagcagctccaccccgctgtctgtgcggaaacggatccggttgcccataggataaagcttcagcacttttcccgaagtgggcgcatagactcttccatccgccggcaggatggtaatgcacttcgtattgtcatccgccgcttcttccgttgtgtcctgcaaagtatcctgcgatattttcctgatctcgccgttcaccgggctccctatggcggtgccttccataacaagctgtctgttccctgttattcttctctcttcctgtctgttgaccgcctcttcttctgtttcttccatattccatcggatgctcctgcccaaccagaaaccgatcagcagtcccagcactcccgttgccaccacagcatacatctgcatgtttctaccttcctttttccataactaagactcttacatcttattctgtctcattttcgggaaaacatgccagtttttcattcataaaatccaagagtatcgctgtcacgatccccgccgccatgcagaacagattccgggatgccgcatccgccgatgttgcaaagctgccccagggaacggtcatcaccgtagccgcaccgacaatcccgagaattccatgaaacatcaacgcataatgcctctcaaacagccggtttaccagttttgccagacagatgaaagtcaccacgcaccctgccactcccggaagcagaacctccggtctcacatgaccgatcccttccacaaagggcgtatacagtcccaagggcatcaatattgttgaaaagctcatgcccggagcgatcaccgacagtgcaaaggcaaagccgcagaacaaaaagctgaaaaatcccggctccacggtattttgggaattctgcagccagcataacagacgaagcattgccaccgatgtcgcgcaggataagatcacatttcccacattcctgccctgttcccccgcttctctccacagcgagggaagcattcccacgatcagtcccacaaacacgcagacagaaggctccgggtaagtctctaatacatatgataacagattcgccacccctaaaaatcctgctgccgatccgatcatataagggaacaattccggcagatgggtccgccacttatgtaccggatccgacaaaagctccatgatcggtcgatagactccgaacactacacttaaaacgccgccggatatccccgggagtaccgctcccagaccgatcagcaccccttgtaatacttttcccaaaaatctaagatccatcgtcattctccgcatcctgttgctcttaaaatcatatgctttttccgtaggaaaataggtctaaaaatcaaagataattattgacatttcgatcggggcaatggtatactctaaccgtattctaaatgaaagtcattgatctcacatatttttgtaagacattgctactttttcacggatgctttacaaaaatatgtgatttttttgtcctacgttttagaatcatcaaaaggatcaggcaaagcctgaattattaaaggaggtaccaataatgaataacggtacagttaagtggttcaatgctcagaagggttatggtttcatcaccaacgatgctaacggcgaggaagtattcgtacacttttccgcaatcaatgctgatggtttcaagtctctggaagagggccagaaggtaactttcgataccgagtgcgatcctcagaacagcagcaagatccgtgctaccaacgttactgttgtagcttaatagcaagacaaactaaaaggatcagtcccttggggctgatccttttttgtaactatttatagggcgaatgcggttctggtttcagattttcttttgtatacatgattttttctgctactttctcgcctcaggcacgaaactgtcaaagataaagatatcgaaatgctttctcgcttcatccagctcctgctggctcttgatagtccaggccgctgcggtattatgatacaggcctctgcaaagctttcttgacaggatctcgggataatgatgattgtatgccacgaaatccggcttcgtcacgaagttcaacagcagattctgcaggataaaatacaatactcccacatactctccttccttcaggaaagcatcggacagctgtccgcgcaccagttccggatgattcttgcgataccaccacactcccagcggattaaaggactccatgcagtacattcccttgtaggcccgaagtatcttatccgcaatgggacacagggacaggtcggtacgctcgatcttgaactccacgatcagaggtacttttccgtccaccatcttaagcacatcctcgaacttcgggatcttctccgtggactcacacagatgaaactgctgcaattcctcataagtgtaatcgcagatttttccttcgccgccgcagactctttttaaggtaaaatcatggaacaccacgggaatcctatccttcgtcagctgaatatccagttcgataccgaagcctgcgtccactgccttgcggaatgctgccatggagttctccggagcgtctgtggcattgtcatgcagacctctgtgagcatagagccattctttaaaaggggctgtgtccggtttgtgcagcatcctcggcatgatcatgagaaaatacagaactgcgagaaccaccaaaacaatcaataagattcctaatactttcattcctataaccttctatcttcctgtaactttttacagcgaatccataccgtttctatcacagtatagattcgctgccttttactttaatccactactcttttattttcaagtaggtatttcttaagattctccaaagagcttacaacacatttgtcaaattgtatcgtcctgccaagtatataccgaagttatccgcatcagtcatctacatcaaagttctccagaatgctctccttcttctggggcttcacatcgccgtgacgtacctgggtcatagtaaggaatgccatcagggagaagaacagggcatagggaaacagggtgttataggatacgttttccagcagaaatccggagagtaccggagtcaggatctgcgctgccatggagaacgtataataggttccggtgaatttccccacatcactgccactgctcatggccacgatcatcggataggaattcacattgatggctgcccatgccacaccgatcagggcaaatgccacattgacgatggggtgatattctctggcaaaaattgcgccaccatagcaggctgccatcagcagaacaccgcccatgatagtcttcttacgaccgatcttcgcagagatgtttccaatgggaatataactcagaatagcagctaccgtcgctaccatcagacagttggcgaagcttccgccctccatcttccatactaccttcgtgtagcgggaaaaggctgtggtcacggcattatatgcggtaaaccataagaaaatagacgccagcatgaaatacatactccgcttcacttccttcggcatccccttggtgccttccgtctttcctgtctgttttttcccgtcggaagcttttaccgctccggtatctcccactgcctcgatctcaccgacagcttccacgccctcagccatcgctttttcttctattgtttctgcaattgccgcctctgccttctcgacttcttcccgcagcttattttcccggatggtcatcacgagaattcccacagcgatcgccatgactgctgcaatacttgcaaataaaggcagataatccggtgtttcacctttgcccaccagaactttgatcatgatcagagcatagacaccgcccacagctcccatgagattgatcaccgcattggcacggctgcgcagatggttcggggttacatccggcatcagtgctactgccggggaacgatacagtcccatggacaccagggtgaaaaacagcaccgccaggaagatcacctggttactgaaggactctccggtgccccatcttgccttttctgcattgtcgatcatcggcagtaacatcatgaagatcactgccaggatcgtacccgacacgataaagggcattcttctgccaagcttcgtatgtaccttatctgacaacgtaccgaacaccggcagcagaaagatcgccagcacattgtctaatgccatcaccgctcccgtcatggtctcgcccagatgataggtattctgcaggatcagggggatgatgttgtcatacatctgccagaaggaacagatgctaagaaaagccagtccgatcagaaacgttcttttgtaatttaattttgtctccataagaaaacctccctttgataaattcattttatcaaagggaggtcctcctagcaatcattactatgtaaaatttatgtctttaaaatctatattgcttatcctttcacaccgcctgccaccagtccactctggataaatctctgcagacacatgaaaacaatcataattggcaaggatgaaatcaccgctgctgctgaaaacagcgtccagtgagcagcaaactgatcactgataaaagactgtaatcccaacgccagcgtcatttttcccggtgtctgcaaaaaaatcgatgtgattacatattcgctgtaggttgctataaaagaaaacaggaagatcaccgcaagctgcggcatggcaagcggaatgataatcttgtaaaacacctgaaactgattcgccccgtctaccattgctgcctcatccagttccaccggcagaccatcaatataggattttaacagccagatattgtatgcactgcctcccgccagcacaaagattaacgcaagactgctgtcaaccagcccaaacctatagatcagaatatagtagcctgccactgccatactgttgggaaatacctgcagcaccagcagcgacatgagtccatattttctcccgataaaacgcagtctcgcgaatgcatatgccgccagagaagtgatcacaagctggatcgtcgccacaataacgcaaaactttagggaattccatacccatacagtaaaatccgtctcccgaaacaacgtcacatagtgttccacactgaacttttccggaaagagagaggacagaaaaaaactgtcgcccgccgaaaaagaagacattacgatccacactaccggaaacagcaccagtattatggtgatccagattacaatacggcttccccagagcgcacgcatttccgaaccgttcattttctctctgccaagcatttaatccacctccttgaatgagccggacaaatgcatgttcaccaatgtaaatgttccgacaataataaagatcagtacactaaatgtagcagacaactcgtaccggttagaccatgtagtcattttgtaagtcgtacttgccagaatatccgtataaccggcgaactggttgtctactctggcaggaccgccctgtgttatcatatagatatttccgaaattgttgaaattcgccgcaaatgaagaaatcaccaacgggatagaaagcttcgtcaccatgggaagtgtaatacttttaaagcattgaaacttcgatgccccgtcaatctccgccgcttcataatattccgtggagatggattgcaaaccgcccagacagacattcatcatataaggaaatcccagccatacattgacaatgatcagcccaatcctcgcccaaaggggattcgtcagccatgggatgttccatgcaattccgattacatgaagcagattattgatcccgccgtattgctcatttagcaatccctgccatgcaagaatagcgattgtggacggcaatgcccacggtacgatcagtattgcccgatatattttggattccttcatatgcggattgttcagaagaattgccagcagcagtcccatagcataggaacccaccgtactgaatatcgcaaaacatatcgtccacccaagcaccgggaaaaacacacttttaatactcccggaaaaaactgtcagataattgtctgctcccacaaaagtgtaatctcccaaatggtacatattataattcgtgaaagacaaaataaccgtatacagaattggcagacaagtcaccaacaatatggtaatcagtgtgggtgccagataggcatatgccataccattctttttcttcttcatatcttcactactttcctgaattcatcaattcaacagcttcttccagttgcgccaccatatttttcgccgcttcctctggagtctgctcacctgaccacatggaacggatattattgacatgaatgctccatagctgacccatctcggatacggtaggcatcggttctccctgattgatctgtacgataaatgctttcgcgtaagcattctccctgatctcttccagttcctgatcggacagtcttgcaggaatgcggtcacctgcttcatacagatcttttgcaccgttttcaatcagatatttgataaaactccatgccggctcctgtttatcactgtccttacccacaaagcttacctgggttcccaccggtgttacgaatgcctgaccgtgaaatgtcggcatctccgtgatgccaaagggtgtctctgccgaagtaaaaccgtcaatatcccaagggcctccaatatagtacgcacattttccgttctggaaattgcttctggcaatatctgccgtgacatctgccgtaatcaggccataacggttgcacagatcatcaaggaaatgatacgcctgtactgccccatcatttgccaggccaatgtccgacgtatcataagcaccattctgataattaaaaatatagccgccgcaggctctgacaaatcccagatcataatagatactggtggcatcaaactgcacaccgccgttctccactgcctgttccaccagttcctcccaggtcgcaggcactttttctaccatgtccgtattatagaataaagcggttgtctccacagaaagaggtgctgcatatcttttgccgtccacatagcatgcctgaactgcagcttcggaaaaatccgcatcattataaagttctgccggtacttccgctgtcaggcctgcattcacataatccgcaagctggtcatttgggatacccactacagcatccggtccttcagcacttttcaccgcctgtgcaaactgttgcaccgacggggactggtggatcacctccacctcatatccattctgttctccccaggtatctgcatatttctggagcgtatccacttccacgttcatattcgtccagatcaccagtctgttatcctcttttttacttccgcatccggtcagtgtccccaccgccagtgcaatgcacaacatcgatatgattccttttttcatagtcattcctcacctacattgttttcatatgcagcagggcactgttggcattgccggctgcatcaaataatgccatattcgccatggcgttgccggctgccattttttcctgcatatactgacttccgctcgtgctcgcccaggtacaatccggaatcgggagccatgcgggttcccagtaaaacacaccgattcctctgtcctccttgaccttcctgactgtagccatcagatcccttaagaactgctcctgtccttcctgtgtggcaggatatccggtagcctcttcttccttctcggaatagacgattcctttacatcccagggtatccgtagtatagccgatggaagtctctaccaccagtacattcttgccgtaacgggcactgatatcgttcatattattctgcagttgctccagagagccgttccagtgcggatagtaggacattccgatcacatcataatccaatgcaaacggtgcgatccggtcgaaccactgcctgtaaagctcattgttggtgccgaaatccaaatgcagcacaattcctgccccggggcactcttccctcactccccggatccctgcccgcaaaagccttgccatattctccgtctgctccacataaccgtccggccagagaagacccttggtaatctcattgccgacctgcaccattttcggaattagcttgtgattcttaagtgccttcagcgtattcacggtatgcagatacactgcagtctccaacgcttctccccgcagcttctgccatgccttcggcttgatctgtttggcgggatctgcccagaaatcgctgtaatgaaagtctaacataaagtccattccgttttccacagttcttccggcaatttctatggtagtctgtaaatcattgcccccgccaccgtaggagttacccatctcatcaaacgggtctgaccagatccggagccgtaccatggtcgttccgcactccttcaggatacgaaacagatcctcctgttttccgtttatgtaataggacgctccgctgacttccagttccttcaccatagagatgtccatacccttgataaattccatgatcactccttcaccagcgtgagatcatcgatggtgccccatccgccgggtgctgtagtaacacgtacacctaccgtgatttctccgtccgcaggcttcaaatccggtatctctgcagtgtaccagttcacatagccgttcagttctccgtccactttgatttcttccccgtttaccacagcgtagaaatacaccgttgcgtttttatcccctgcagcatctccctggatatgtgccgtcagtttgtaagtgccttcctccagtccgttcaccgtctgttctgcggaaaaatccacattactgctaccggaataaaaatgcagggactgtaccccctcgaaacagtcagtatcacgatcatagatatccagttcctctgtggaatcgttcacattatttaccgtccatccggtaaaatcagcctcttcaaagctaccattaattagataattaccattctcatctgctgttgctttctcaccgtctacattgtttgtgcttccgcatcctgtcattgccgcgattactcctgccgccaacaaaatccccaaaaatttctttctcattaattttctcctttcaatctttctaaagttaatgttttacttttattatagtaaattatttacctttagaaaaaatatagcatcattacctcttttcgtcaatgcctcttgttctttttttaccctattgccaaatttggcaggtatcttttgtcagttttatacaaaataagcatacaaaaagagaggtctgttccgtcacctcccttttaacttttttctatttattgttcattgacttattattgatttagcagctcttgcgaaaaattggaatcccgttcacaaagataagctttgtcactttgccaccatacagcacccggtttcgcagcagatccaatgccgtctcacaaatgcagggaatatcaatatgtatggttgtcaacggcggagacagatatttggctatattcacatcattgatgctgaaaagcgccatctgctccggcacctgtatccctttttcattcagtgcctgcaatactcccactgccagtgtatcgctcgcaatgcacaatgcggtgggcagggaactttttttcagtaattcttttcccatgcgataaccttcatccacggtgaatttctccgagatcaggatatattcctcctccagacaatgataatatgccacactttgccgaaaggaccattctcggatatccatggagggcttccccgtatcaatattccggtcgcttccgccaataaatccgatttttttatgacccttttccacaaaataatctaccatctgtgtcacgaaggaatccatattgggtctaaccgcatcaaacaatttttcatccggtgatgtgccgatgaacactcctctggggcagattttatacaattgattgatctctttgcgggtcagccagcctacggcaataaaggcattcagatctctggggatcacgctcatgccatctctgcggtcataaatctgcagtcggatattcattttttttgcctgctttataacttcctccctgacaccgcggtaaaacacatcctccaattcatcctcattatctgtaaaatacaaaagtgcaacgttttcaattttcggataaataacttttttcttatagccaatcttctccgctgtggcaaaaatagcctctctcgtttcctcactgacggaaattccttcatcgtaattcaatactctggagaccgctgcgctcgacacacccacgatctctgcaatctctttaatcgttgccatgcaaacctccattatgccaatgaaccttgttcatatcttttagtaatcattttacataaatattttactctgtcaagatttcacactttttccttgaaatatgtgggcttttatgtataatggtaagggtggctttgtaacacatttaataagaagaataacaagaggtttaagaatgatcagtgcaaacaacgtaacttaccgtgtgggtaagaaagcattattcgaagatgtcaacatcaagtttaccgagggcaactgttacggtctcatcggagccaacggtgccggtaaatccacctttttgaagatcctgtccggtcagctggacaccaccaaaggtgatatcgtcatcacccccggtcagcgtctctccgtgttggagcaggatcatttcaaatacgacgacaatgtggttatggataccgttatcatgggtaacgcgcgtctcttccagatcatgaaggaaaaggatgccatctatgccaaggaagatttcagtgatgaggacggcatccgtgccagcgaactggaagcagaattcgctgaaatggacggttgggaagcagagtccaatgccgccatgctgttaaacggtctgggcatcggtaccgagttccactactctctcatgaaggatttagacggcagtctgaaggtgaaggtcctgttagcgaaagcactgttcggtaaccccgacattctgctgcttgacgagcctaccaaccatctggacttagacgcgatcgcatggttggaggacttcctgatcgatttcgagaataccgttatcgtggtatcccatgaccgttatttcctgaacaaagtatgtacccagatcgccgacatcgactacggcaagattcagttgtatgccggcaactatgacttctggtatgagtccagccagctgctggtgaagcagatgaaagaagccaataagaaaaaggaagaaaagatcaaggaattacaagagttcatctcccgtttctccgcaaatgcttccaaatccaagcaggctacttccagaaaacgtgccctggaaaaaattgagttggatgacattaagccctccagcagaaaatatccctatatcgacttccgtcccgagcgtgagatcggtaacgaagtactggctgtggaacatctgtccaagaccatcaacggagaaaaggtgttagatgacatctcctttactctgggtcgtgaagacaaggtggctttcgtaggaagctgtgagctggcgaagaccacactgttccagatccttgccggagagatcgagccggatgagggaacctacaagtggggtgttaccacttcccagtcctacttcccgaaggataataccgcagagttcgacaatgatatgaccatcgccgactggctgaccggttactctcccgtaaaggatgctacttatgtccgtggtttcctgggacgtatgctgttcgccggcgaagacggtgtgaagaaggtccgcatcctctccggtggtgagaaggttcgctgcctactgtccaagatgatgatcagcggcgccaactgtctgatcctggatgagcccaccaaccatctggatatggagtccatcactgcgctgaacaacggtctgatcaagttccccggtgtggcactgttctcctgtcatgaccaccagttcgtacagaccactgccaaccgtatcatcgagattctgccgaatggcagtctggtagacaagatcactacctacgatgagtacctggcaagcgatgaaatggcaagaaagcgtactgtattcaccgcacagaccgaagacgacgagaactaagacgaataaaatggatgccggtgctgccgacatccattttgttaattttccaattctgtttcgtttaatgatctccattaaaatatgtaatatttacaaacactgtctctatacgcaaaaaccagctctaatgtatgttaatgtggaccagtccccaaaaataatctcagaaaggatagaaatatggtagatcttcatgtacattccacctgttccgacggtacctttaccccggaagaattagttgattatgcaattcaaaaaggattaaccgccttcgctctcaccgatcacgatacagtaaacggactggaccgggcgatccgatatgcggaggaactgcggcaggctcaggcgacatccccggttagcttctcccataacgatgcagctacccgccttccagtttctttctcccgtaacgatgcagctgcccgccttccggtttcttctgttccagatgctgacgttccccgcgtgcctgaaatcattcccggtatcgagctatccacggaatatcagggcaaagatatccacatggttggccttttcattgattactgccagccgaagtttgcccattacttagaagatttcattcgttcccgcgagaaccgcaatgcaaagatgtgcgcgctgctcagagagcatgacattgacattacttacgaggcacttctggcggaattccccggtgcggttatcaccagggctcattttgcaagatatctcctctcccacggctatatccagagcatgaaggaagcatttgaccgctacgtgggcgatcactgcccttgcttcgttccaagagaaaaggtaacacctgcccaggcggtggaactgatcctgggagccggcggcgtaccggtgctggcacatccgatcctctatcacatgagcgatgatcgtctagatactctcgtagcggaattgaaaaagatcggtctcgtgggcatcgaagccatctacagcacctacaataccgctgaggagcgccagatccgcggacttgcctccaaatataatctgcagatcagcggcggctccgacttccacggcgccaacaagcccaagatcgacctcggaaccggctgggggaagctgtatgtaccggatgaagtattagaaaatctacgcccggaccggtaacttgagagttagtgaaataattgttctaaaatccacgcagaaaggactgcccgccctggactcagatgctagctacaactg

SEQ ID NO: 11294 - DNA, 9172 bp, Unknown
  gut microbiota DNA sequence
caggaaggagctttgtctacagtctgaggctcatcccgggagggagagcctttttgcagtgtgcgcgacagagtcacgctctattcatcgaaaacaatattagcagccgaaattaaagtagccgcaaaatgcattcaaccactgagaacagttaatgaatctgaaacacatactttcttcctccttttcctgttgcatggtgtccggttacgtctgtgttagctaagcacaaatgaattgtaacaattttgtaacaatttatccataggagatgattggcaataaaatggaaaaagcaggaaatgggattcgagtataaaaagggaaaaagaaagcgcagaaccttaagctctgcgcatactgccggcaatgggacttgaacccatacggtgttgccaccaacagattttgagtctgcctcgtctgccattccgacacgccggctaatcaaacactcacaacggaatttatcttaacatagattgaaaagcttgacaagagtttttttcccaaatatggatactatttttctagtctttttccacaagatgttgtatagtagatgtgtatgggtataggggaatacgacctatagtgatggaagcaaacagggtggaagcatgaattgcaaagaatttgaaaaaaatattcctgaatttatagccgggaaacttgatttcctgacgttacaggagtttggagaacatatgcaggaatgtcccggatgtaaggaagaactggtgattcagttcctggtgacggaaggtatgcagcgtctggaagacggtgatgcttttgacctgcagagagaactggagattcgcctgacggaggcaaagcgcaaggtgaagattcatatgtcttttttgaaggcaggagccgtactggaagtgatcacggtgatttttctcctgggatttctaggatggatcatctcgtagcatgtaattgtatgtaatagcagaaacaggataggacagattagatgatgagtcagaaactggtattgatcgatggacacagtatattgaaccgggcattttacggagttccggatctgagcaatgcggaagggctgcatacaaatgccatctatggttttttgaatattatgtttaaaattctggaagaggaaaagccggattacctggcagtggcatttgatgtgcatgcaccgacttttcgtcatcagatgtatcaggcgtataagggaacgagaaaacccatgccggaggaattaagacagcaggtgccggtcatgaaggaagtcctgaaggccatgcatattaccatcatggagcaggctggattggaagcggatgatattctgggaacccttgcaaagaaagcagagcaggagggaatggaagtatcgctggtatccggtgacagggatctgttgcagatcgccacggatcatatcaagatccgcattccgaagacaaaacagggaagaacggaaattgaggattattatgctgcggatgtgcaggcagcctatcaggtgactccgttgcagtttattgaactgaaagcgttgatgggggatacggcggataatataccgggagtgcctaaggtgggagagaagacagcccaggcgctgatggtggaatatggctcgctggataatatttattcccacgtagaggaaatctcgaaaaaaagtattcgggagtcgctgatagaacacaaggatctggcagaactgagtaagacactggctacgatcaagacagattgtgatctgcaattggattacgatcaggcaaaagccgaagaattctatacaccggaagcgtataccctgtgcaagcgtctggaatttaagaatctgctcggcagattcgagaagaatgctgctgccacagacacaaaaatcacagagaactttcggatcattgaggagaaaaaagaattcctggattttttaaaaaaagccaagaaacaaaaagaaatcggtctgtggctgatcacggaaccggcggtgggatccaatacaaagaaggaagaactgctgggagcggcagtatctgtgccggatgcggaaacggtattttatgcgttgaagcgggagcaggaaccggaggggcagttgagcctgtttgaagaggtgaaacagacggtggatgaaacggcagagatcacggcagccttgcaggaactttcttctgtgaaaggactccggattgctacatttgatgtaaagcgtcagtacgattatctggaccacagcggtaccgaacaatattttgacattctcatagctgcctatctattgaatcctctgaaaaatgattatgatccggagtccattgcttcagagcatctggggatcatgatccagggaaaggcggaagtatttggaaagagatccttccggacattgctttcggaagagagagaaaaagccgcggaatatacctgttatggggcctgggtatccgtaaagtgtaggaaagtgctcgaggacaagctggaggcagcaggcatgaagcggctcatgaatgagatggaaatgcctctgtcgctggtactctacgatatgcagaaggaaggcgtggctgtcagaagagaggaattgaaatcttacggtgatgcgctggttgcccggattgaagaactggagcatgcaatacacgaacaggctggagttgattttaatattaattcccccaaacaattaggtgaggtactgttcgagacgatgcagatcccgggcgggaaaaagacgaagaccggttattctaccgcagcggatgtgctggagaagttgtctgcggattatccgattgtgcgggatattctggagtacagaggacttacaaaactgaaatcaacctatgcggacgggctggcagcttttatcgaggcggatggaagaattcatacgaacttcaatcagaccattacagccacaggacggatcagttccacagaaccgaatctgcagaacattcccatgcgtatggaactgggcagaaagatccgcaaggtatttgtccccagggagggatatgaattcatggatgcggattattcgcagatcgaattgcgtgtactggctcatatgtccggagatgagcagctgatcgatgcctacagacaggaagaggatattcaccggatcacagcatccaaggtattccatactcctttcgaagaggtcacggatctgcagagacgtaatgccaaggctgtaaatttcggtattgtctacggcatcagttcctttggactgagccaggatctcagcatcagcaaaaaagaagcggcgcagtatattgaacagtattttgaaacctatcccaaggtgaaggaatttatagataaactggtggcggatgcgaagaataaaggctacacggaaacgatgttcggcaggagaagaccgattccggaattgtcatcgtctaatttcatgcagagatcttttggagaacgtgtggcaatgaacgcacccattcagggaaccgcggcggatattatcaagatcgccatgatcaaagtatggaaagcgctgaaagaggaaggattaaagtcacgactgatcttacaggtgcatgatgaacttctgatcgagacagcactggaagaagaagcaagggttcgggagatccttacagagaacatgaaatctgcggcagatctggcggttacgctggagatcgatctgcacacgggaaaagactggtacgaggcaaagtaaatgcgttttataggaattaccggcggtgtgggtgccggaaaaacggaaattttaaaatacatcggtcagcattataaatgcgagatctatctggcagatgatatcggacataaagtaaaagaaccgggaacggaagggtatcatgcactggtggaattgctgggcagagatattctgcgtgcggacggacagatcgataaaccgtccatggcgaccaaaatttttgcggatcccgcattgttggaaaaagtaaatcagatcattcatccggcggtgaaaaaatatctggctgaccggctggcggaggcgcgtgccaggggagatgtggaattgtttttcgtggaggcagcccttctgatcgagaacggtttcggtgaagtcgtggatgagatgtggtatatttatgccagggaagaggtacgcagaaaacgtctgtccgtaagtcgcggatacacaccggagaagatcgggaggatcatgtcttcgcagctttcggagaaagaattccggaagcattgtgatttcgtcatagataacagcgacagtctggaggacagttacagacagatcagacagaaactggaggcatatacatggagggagtaaaagaaaaacagggacagttgatattcggactggacattggaaccagaagtatcgtaggtacggtgggatacttaaacggcggaaagttccatgtgcttgcacagcgttccaaagagcatgagaccagagccatgctggacggacagattcatgatatcggcaaggtcggtgagacgatttctcaggtaaaggaacagctggaggaagatcttgggagagaactgacggatgtctgtattgcggcagcaggccgtgtactgcgcacggttacgacctatgtggagcatacgtttgaaaatgatcgggaaatcttacaggaagatatttattctctgtgtaccatgggtgtcgaaaaagcctatgaggaattccaaaacagtaatacggacacagatatgaaattttattgtgtaggttatacgcctatgcggtattatatgaacggctaccagatgggaaatctggaaggacataaggcaaaaagtattgcggtggatctgattgctacctttttgccggatgatgtagtggacggactgtacaaggcagtggaatttgcaggtttacatgtggcaaatctgacactggagcctattgcggccattcaggtggctatcccggaaaagttccggatgttaaatatggcactggtggatgtcggcgcgggaaccagcgatatttccattaccaaagaaggtaccataaccgcgtacggaatgattcccgtagccggggacagcctgacggatatcctggtacaacattgcctggtagaatttgagactgcggaacagatcaagagaaaatgcaggacccaggagatcattgaatatgaagacatcatgggtctgccccagacgattaccgccggtgaggtactggagcttctggatcctgagattgagcgtatgacgcagatggtatccgatacgataaaggagttaaacggagacaaaccggtcagcgctgtgttcgtagtaggcggtggcggaatggtgccgggttatacggaaaagctggcggcgaagctgggtattgtgaaggaacgtgtggcaatccgtggacaggaggtcatgcagacgattgtgttcgaactggaaaatgccagaaaagatgccatgatggtaaccccgatcggaatctgcctgagctactatgtgcagagcaataattttattttcgtagaattcaatggggaaagagtaaagctgtatgataatggaaagttgtccgtgacggatgcggccatgcagatgcagttccccaatgatcaactgttccccagaagaggagaggctcttttatttactgtaaacggtaagagccgcatggtaaggggggaacagggagaggcagcagtcatccgcgtcaatgacgaagaagcggatatgtatacgcaggtacataatggggatcacattgtgataacgccatccacggaaggtgtggcagcggtcatggaactgggaagtcttccggagatgggagatgccctggcggtgtacgttaacggcagacagatcagtctgcccagaacggcagatgtcaatggccgcagagagaatgaattttatcatatttgtcagaaagatgatatccagattcgcaattcctataccgtaaaagaaattgcggaattcctggatgtaccactggggacaggtatcaaagtcaatgatacggcggcacagccggagaccagagtgtatgaacattttacggttagttgggatatggagaatccgttgctggaggagagtgttacggttccggatccggtggaaaaaccgaagaatacggtagcagaggcacagacagatgagggaaaaaacgagcccggggcgcagactgtgcaggaaacacctacggtgccgcagcttccgcatcccctgactgtaatcgtaaatcatacgcctattaccatgcagggaaaagcttcctatgtatttgtggatgtgtttgattatattgattttgatctgggctccgctgcgtccgcaggaagatccattgtgacaaatctgaatggccgtccggcacagtatatggagacactgactgagggtgatgtgatcgagatctactggaaaaatttgaaataataatgcgatagaaaagagattagtaaaattatgagattatgcagtattgccagcggcagcagcggcaattgtatttatgtgggttccgaagccacgcatctgctggtggatgtggggatcagcgggaaaaaagcggaggccggattgaacagtctgggactgaccggcagagacttagacggtatcctggtgacccatgaacatatggatcatgtggctggcttaggtgtcatggccagaaaatacaatgtgcccatctatgctactcccgggactttggaagagattcagaagatgggaaatcttgggaagatcgatccggaactgttccgtgaggtgaaggaagatgtgaaactgaccatcaaggatctgaccgtgaatcccatgaagatttcacatgatgcggtacagcctgtagggtatcgcattgcatatgggaataaaaaagtcggaatctgtacggatctgggcgtgtataacgattacaccgtggagtgcctgaaggggatggatgctttgcttgtagaagctaatcacgatgtgaagatgttgcaggtaggtccttatccttattatttaaaacagagaatcttaggggagagagggcacctttccaatgaaaattccggaaagcttctttgtcgtattttacatgataaattacagactattgtgttagggcatctgagcaaggaaaataatcttcccgagctggcctatgaggcggtccgcatggagatcaccatgggagagaatccttatcgggcggaggatttccgaatgatggtggcggacaggagtaatgtatctccggtcatcaatattgcttaattatgtttcagaccgcgctatttgcaaagtcgcgtcagcacgttttacgtcacttcgtgattcactttgctcatagattggcgttcagcgaatgaacataaggttgcaaaatgtaacaaagtgtagtttaatagatagaaatatagatagaaataatagcatgaaatcatgcggaaaatgagggcgattatgaaaaaaacaattattacggtagttggtaaggacacagtaggcattatcgcaaaggtatgtacctatcttgcggagaacggcatcaatatcctggatatttcccagaccatcgtacagggatatttcaatatgatgatgatcgttgacaccaatcagatgcagaagccttttggtgacatggcagatgaactggctgctctcggagaagagatcggcgtagtgatcaaatgccagaaggaagagatctttgacaagatgcaccgcatctaatgccccacgataaatcataaagacccgaaggggcagataggagctgtaatgatcaatttatatgaagtaaccgagacgaacaaaatgattgaggaagagaacctggatgtgcgtactatcacactgggaatcagtctgttagactgtatcgattccgatctggacagattaaacgagaaaatttataacaaaatttacgaagcagccaaggatctggtgaagaccggagaagagatctccagagaatttggtattcctattgtaaataagagaatttccgtaacacccattgcgctgatcggcggcgccgcatgccacaccatcgaggatttcgcaagcattgcaaagaccctggataaagtagcacatgaagtgggtgtgaattttcttggcggatattctgcactggtaagcaagggaatgactccggcagacgagctgctgatccgttccattcctcttgcgttgtccaccacagagcgtgtgtgcagctctgtgaacctgggctccaccaagacaggcatcaatatggatgcggtcaagcttatgggagagatggtgaaggaaaccgctgagtataccaaggaagatgattccctgggttgtgcaaaactggttgtgttctgtaatgcaccggatgacaatccctttatggcaggtgcattccatggtgtgaccgaagcggacaagatcattaatgtcggtgtcagcggtcccggtgttgtcaaaactgcattagagaaggtgcgcggagagaattttgaggttctctgtgagaccattaaaaagactgccttcaaagtaacccgtgtgggacagttggtagcacaggaagcatcccggatgttaaatgttcctttcggaatcgtggatctgtccctggcaccgaccccggctatcggcgacagtgtagctgatattctctgtgagatcggtctggagcgtgccggagcacccggaaccaccgcagcccttgctctgttaaatgatcaggtgaaaaaaggcggtgttatggcatcctcttatgtcggcggtttaagcggagcgttcattcctgtcagtgaagatcagggtatgatcgatgctgtcaatgcgggagctcttaccattgaaaaactggaggcaatgacctgtgtctgctccgttggattggacatgatcgccatccccggagataccaaggcaactactatctccggtatcattgcggatgagatggccatcggaatggtgaaccagaagacaactgccgtgagaatcattcccgtcatcggaaaaggagtgggagagaccgtagaattcggaggcctgttaggctacgcgcccatcatgcctgtgaacaccttctcctgtgatgctttcgtcaaccgcggcggacgcatccctgcccccatccatagctttaagaactaaattgagagttagtgaaataatcccgtagcccttggcagggtataagaaa

SEQ ID NO: 11295 - DNA, 9161 bp, Unknown
  gut microbiota DNA sequence
atattttaacaatgacaatgcttcattcttaatattatcgaagtcctcactggacgccagggatttcgctttgccgatattacctctggcaaatgccacacagacctccgctttataatccggcacctgcagctgatgcatgagataattacgcaccagttcatcggctaccggcttcatgttcagtaccacacaacggctgaggatcgtcggcaacagagaattcacgttagaagtcaacaacatgatcactgcgtactcgggcggctcctccagtgttttcaggattgcattctgcgcctggggcgtcatcttctctgcctcgttcataatatagatcttatagggactgctgtatggcttgatggcgatatcattgttgatctgcgcacgaatatcgtctacgctgatggtattcggcttctcgtggctgacatagataatatccggctgattgtccgacagcgcctgcttacaggaatgacattcctgacagggctccgtgccgcctttttcacactgtaatgtcatggcgaatactctggcaataaattccttgccggaagatttttcgccgttgataatatatgcatgggaaatcttcttcgccgaaatggcgttctgtaaatgctctttgatctgttcctgaccgatgatgtcatgaaatgttgccaatagtattccccctgtccgtatcttatgctatgtctgtacactgcttatgatctgcttctatcgtacttccttctagcctttagcgcaaataaaattttgcatgatcaagtaaaaatatccaataacaatcccctgatctctccgatcttattcaggatcgccagattgtctttttcatccttcatcaattcctgtgccagctgatccaggttctcatccaccagccggataatgccgtatacccggtgccgtcctcgccggtccagaaaattttccctggaaaaagaatgcgatctcgtcactacttcattgagaaattccttgaccagtccacggtaatgccgcatatccttcacatcccgtttcttcgccagtttttctccctctgtcgtgatctccgccatgaggttcgtcagtctctcctgcagttctgcctcttccacatggctcgccagcatgaacttgaagctgccatccgtgggcgcagtgttctgtacctgctccaccggagccggctgctgtatctgattgactctcatttccatacgcccacctcttttctccgaaatgcattcattacctgatagtttccaaacattatttcggcgatataccagcttcttttaagtgttttgtaatagctttcagacatttcgtcagatctgtattctcgaatctgtcccggatgcctgctgccgccagcttttcttccgagaaatctgcactgtccgccaggaatctccggcacatttcctcatatttcggtttctcctgtccaagttctctgtccagtgcccgctgtaagcgcacgccgtcatccaattcgatatagaccggcagaatcgcctccgcaccaaaataagcaatcattttagtataagcttccagcgttccgatcatgagatagttctgttctgccagatcgatctgtccgtcatccactgtaaaataccgccagattccgtagacggtgtcataagctctgtcttcaatgacttttccctgctccttcaatgcctgaaaaccggtttcatccgtgaaaaaatattccacaccgttctcttcccccgcacggatcggtcgtgtcgtataaggcacgatggtcctcagatccatcgtgccctctttcatcagttctttaaatatggtgtcttttccggaggaacttttccccatgagatatactatttttcccatactctctcatttccattgttttattctcatggcatttgcatacctttttatgatagattgataacacgatcctttattccacttctaccacatggatcatatcggtcttacctaccacacccaggggtacacctgcggtaatgacaactgtgtcaccagtctttaccagacctgcctgctttgccttgaataccgcttcctcgaacagagcatccgtggtccgctccttctggatcatgacaggttttacaccccacagcagatttaactggcggtataccttctcatccaatgtacagccgatgatctggcatccgggcttataacgtgcgatcatattcgcggtaaatccggacatggttacggtgatgatggctgctgcattcagatcggaagccacactgcaggtcgcataggagattgccgtagtaatatcgggagtttcctgtctgtcttccttaactttctgcattcttccgcggtagtcaatatcctgctccgctctctctgcgatacggctcatggtcttaactgcctctacggggtacagaccggctgcactctcgccggacagcatgatggctgtcgttccatcatagatggcatttgcaatatccgttgcctcagctctggtaggacggggattcttgatcatggattccagcatctgggtcgcagtgattacatgcttgccctgtgccactgccatcttgatcatcttcttctgcagaataggtacttcttccagagggatttcgacacccatgtcaccacgtgctaccatgataccgtctgccacgttaatgatctcttccagattctgaataccctgcatgttctcaatcttggcaatgatcttgatcttgctgcctctgtcctctacgatcttgcgcacttcctgaatatcttccttggttctgacaaaggaagctgcgataaagtcaaatccgtgctctacaccaaacacaatatctgccagatccacttcactgatatatggcatggacagaattgctccgggcacattcacgcccttatggttggatacaaaacctccgttgattactctgcagacgatctcttcacctctgatctcttctaccgtcatctcgatcagaccgtcatcaatgaggatcgttgtaccgactttgatatcgtttttcagattcttataggaaatcgtagctttctgggcggttcccataatttcttccgtggtcaggatgaactgctgaccggataccagctctaccttaccgccttcaaaatcacgcagacggatctctggtcccttggtatctaacagggttgctaccggcaatcccagttccttacgtactttcaatactctgttgtattttaccagctgctccttatgacttccgtgggaaaagttgaatcgtgctacattcattccggcaagcattaactctcttaatttctcctcactctcactggcgggaccgatggtacagataattttggtctttctcatacaagctaaatcctttctgctgttaaaattattcgttttttactacggtaatgcgatacccggcatcttttgtcactccctgaacattcaggtcttctttcaggtattccgcaagctgtctgcaatgcgtctcctcaatctgttctcccggtaccagcacaggaatcccgggtggatacagattcacgaaatctcctgcgattcttcccactgcctgtgacaacagaatttcttctttttcggcatcccaagcctgagcaagggacatccgcacttcgggatgcagctgatagagagagatttcctcctcttctctgccgtcctgcttctgtctgctctgccattttcccgcagtgatatcgcggtcgattgcaagcagcgcatctgtcattctccgatacgcttcttccccatctcctatggtaaacatcgcaagacaatatcccggtgctgccatctccagctgcagatgatatttctttaatagaatatcataaatctgctgtcctgacaaacctgcctttgcagatactatgatcagttttccgatatcctgtctggcatccagcggtaaaaagcttaaatttctgcattccgacagttctgtcagcattctcagataatttatctggaattttgcaaacagatagtctccttgctcctctactacctgcagtgcattgtcaattcctgccatcaatacataggatgggctgctggactgataaatatgcaaaaatctacgcaggcggtctctgtcgatctgattgccgttcacatggagcaacgcactctgagtaagtgccggcaaagtcttatgcacgctgtgaatgaccagatccgctccgcactgacagctgttcttcgcaagtccttctgccagtcccagatgcgctccgtgcgcttcatccacgatcagaggaattcccttgctatgcacgatctgcgcaatcttctctatatccgcaatcctgccttcataggtgggcgacaccagaaatactgcatccggaacgggttccttcgccagtgcttccgcgatctgttccggagttatcgcatcacaaatatcatactcctgcatcatttccggatacagataagatattgttaaatttctcaggtatgctgcatgatacgctgacttatgtccgcctctggtcataaggagccgtccgcccttcggaaccgctgcgctgatagcagccaacacaccgcaggtactgccgtttaccagataaaaactttcctccgcaccatacagtctggcagcttcttcctgtaatcttagcaggatctcttccggggcatgtagattatcaaatccatcaatctccgtgatatctatattcatgatctcctgcggtaattcaccacagacctgcctcttatgtcccggcatatgataggggtattcatccgtttcgctatatgccttcagtctccggtacagttcacccacttattattctcccgtccggggaatccttccccgtttattttttctgttcttctctcgtctcccgaagcttctcgatcaacgctccgtgacccttgtgtacatgaaaagtctccatgagagagcaccatttatctgccatagtaacgatccatgcctctctgcacatgggcatcgccgaaattgtcaagggccacatatgcttttttataatgtctctctccctgggtgtcagctgatattcctgctgcgcattcttaagtgctctacctggatgatagaatccgtgaagcttatgagggctgacataatcctgcgtatgccagtcatacaggaaataatcatgcagtaatgctccgcggatcagctctttcttctcacagggaatatgcagtttctcactgatggcaagactgtattttgccacattcatgctatgatcattcacggtcatattgccatgctgcacatgagacctggtagatctgaagttcttagaacgcagaatatccggtgctgcagcccggatctcctgtctaagttcacgttctctctcaaatttttctttccattttcttattttctttgccgaacgttgtttcatagggtcgccttccttccaattgtcccctcttcagtaaagaattagtaataatagcatactaccgggaagccggtggatacatactcatagatagatgctgccatgtgtaaaggcagattgatacaaccgtgagaaccggatgtcaaataaatggttcctccgaaatctctccgccatgttgcatcatgcatgccaacattaccgttaaacggcatccagtaattaaccggtgtttcataatttgcaccacgcaatattgcatttctggtcttataggtcaggccgaatactccgggcggtgtcatgcagtcagctttactcatattgccggatacaaaatctgtctccagaacaatatctccatccttgaacagatacagatgctgattcgtcagatcgatctcgacataagaattgccgatatcattgcttcctttttgagcacctttgctgatgtatgccggttccttatccacagtttcaccattttgaatggcttctgtcaatgctttgatctcttcctcacggtctgtcttccaaccgtatgcaccgcttggcaggttcagttcaatgccctgtacagtggtaaattttctctttttgccgtaagtatcgttctcttttgcctgctccgctacaaactcggcgacagcttcctcatccaactgcggatccctgtcacccacctggatccattcgtgaatagtatctccgtctacaacaactttattgccgttccagtcataggtgatctgcgcactgacccacttattcatagtatcgcaggcttttaccagtgcggtgtcctctgccgttacccttgcggtctcataacatccctgttcttccagatctaccgaagtatctcccgccataatcgctgcggataccacatcctctacctggtccagatccagtgtcgttcccagtgtctccggaacgatctcatagctcttcgttttttcagaatactcactgatatatgcatcttccggctcaatcatatttttcttctgtaaagcaggcatctgggccagctgctcctgcaatttatctgcatcgtaggctactccctggaccatatcataattctgtgcgctccacagcatctcgatccacaggaattcattctgtatgttcaaaagctcctgtgctgctccctgcgtgtccacccagttcattccgatctccggtgctgtcactgttccgatctcttcctgtacgccgttctcatctcttccaaatatctgcaggctgtactgctgggactggctgtccatgatcgctgccacttcggctgctgtcagattactgcaatccgtatcatttaccgatgtctgatacaggaaatgggagtgatagtaaaaagctacaactccgtaagctaccaggagtactactaagattccaagtccgatccagagacctttcttactttttttcggtttgtcgttggtctcttctttagtttcttctttggtttcttctttggtttcttctttggtttcttcttttacttccagtttagtttcttcttttgtcgtttcttttatttcctctttattttccttctttgtttcttcggttacatctttgttttcgttttccattttatcttacgtttctccctcatattgttcctattgcgctcattatagcatttaattttataaaaaaacagtgtgaaaagggcgaaaaattgccctttcacactgatttagaatactacttgcactaatatcatgtatagtatcgttccagcagctatactcaacaaagtattccgcttccagatatgaagtcccgcaaccactgccacagacagtaactccggaattccatgattgccggtaaacaggtcaatgcccttcacacagtatacaacgagaatgaccataattgccggtgggagcacttttcccaggtagatcacggtcgccggaacttctctcttccctccgaacagtacgaagggaattgcccgtatgaataaagtaacaatagctgcaactgctatgattccgatggaatgtaacattttttcttaactcctaataaaataatcgccgtaatcgttagtgccggcagtaaaaaggccccttcccccagcagaatcaggcataacactccgactacacctccgatgatcgctggcttatgttctttcgtatccatccactgattgattacgatgactgtaaaaagcgctgtcatggaaaagtcaattcccgtggtattgatcggcagcacacttcctgccaccgctcccacacaacttcccaggagccagtaacaatgatccaacagagatatgtaaaagctgactcgctcttctcgcatcccctccggaactttcagattgcataataaagaaaatgtctcatctgtaagcgagaagatcatgtacgggtaagttacacccatttttttgaatttctctacaaaagaaaggccgtaaaacatatgtctgccattgacaaacagtgtcatgatcaatgtataccacaggcttgctccggctgtaagtaacgtaaccaagacaaattgcatgcttcccgcatatacaaacaggctgataaaaaaggcccaccagaatccatatccagcatcatttagcattaatccaaaggcaaatcccaggaaaagatatcccaacatcaccggaacggactgcactattgcataacgtaattcttttatcttgttttccattggtaaatccagtctctttcgcaatttcattgttctcgacgaattattttagcataccatgatttgtcaaacaatagtctgatataggttctatttttgtaataggcattaaaaaagatcaatatacttacagtatattgatcttacccaatgagacacgggggattcgaacccccgacaacttgattaaaagtcaagtgctctaccgactgagctagtatcccataaattatttttgcatattacaaatgcccagaaccggaatcgaaccagtgacacgaggattttcagtcctctgctctaccaactgagctatctgggcattttagatctgaatttacactcagatcttagtagcggggacaggatttgaacctatgaccttcgggttatgagcccgacgagcttccagactgctccaccccgcgatattatgttgtatatgatatgttctcttcttcgaaaatattcccgaaaaagaaaatggatggaggtggattcgaaccaccgaagcaatttgcagcagatttacagtctgtcccctttggccactcgggaatccatccatatggaattgtgttccataaagccgatgatcggactcgaaccgataacctgctgattacaaatcagctgctctgccaattgagccacatcggcgtactacataaataaaatccgttttcacgataaatggggcctatagggctcgaacctatgaccctctgcttgtaaggcagatgctctcccagctgagctaagaccccacaaggattaaataatcctttaacgacccagatcggactcgaaccgacgaccttcgccgtgacagggcgacgctctaaccaactgagccactgggccattcctgaaaatacattgtttgtaccttcaaaaccgaacactgaaatctaatctcttatatctctaacttacatcctgctttcctatccaaaacctttggtcaagccctcgaccgattagtaaatgtcagctgaacacattgctgtgcttacacc

SEQ ID NO: 11296 - DNA, 11975 bp, Unknown
  gut microbiota DNA sequence
agacgcaggtaattgtcatggatctgctgggtcgtcttatccggtccactgctgatgatctgcatatcgcagaaatccctcgtaccggcttcgatcccccggaacagctccggacgcaaaaacagattctctcctgccgcataattccagtctaaaataaatcgcacctggagccccagtaccgcactgccgcggatccgcaggtgggtatctctccagtggccgaacttctcatccagatcaatgtactccttacctacattaaatcctcccacataagccactttattgtcaatgaccactattttcctgtggttgcggtagttgatacgaagctgaagtctccgcaggatcgccgggaaaaattcagcggtctgcacgcccttttcattcagccatttccagtagctatgccgcacggaccggcagcccatggcatcgaacagcacccggacctccacgccctgcgccgctttctcgatcaaaatatccttgatctgattgaataatacgtcgtttttaataatgtagtattggatatggataaaatgctccgcattccgcagatcttccatcagcgcccggaacttctcattgccgtcaatgaagatatccacatcgttgtccttcgtcagcaccgcctcccctgcttccaggttatacatgacgaggtcctcatatccccggatattctcgtccagctccccggcatcccgggaacgcagccggtactcctgctgcctgatatctttactgatgtgatcctccacctctttgatccggaacattttccgcttatgcatatcctgccccagtaacaggtaaaatacaaaacccagcaccggaataaaatacaaaagcaaaagccacgcccagacactcttgggatcgcgcctttggaaaaacacgatgacaatagcaaacagcagattaaaaaataccaagtggctgccaaaaaaatctattcctgtctttatgatctcaaatgcttcgtccataattaccctccggatatagtataacataccacggtgaacagaaaaagatgatttaaacggaaatcgccaaatgtatggttgcgtatttcatcacatctatgttacaatgttttttaggaatttgttcctattaactgaaggagggactgaaaatgagtccggttgcaattacattattagttatcgtgatagttctggctatcatcattgcagtattatatttcttaggcaagaaagcacagaaaaagcaggcagaacagcaggagctgttagatgccaacaagcagaccgtatccatgctgatcatcgataagaaacgcatgaaaatgaaagatgccggtcttccccaaatggtgatcgatcagacaccgaagatgatgcgtggctccaagcttcccatcatcaaggcaaaggtcggaccccagatcgtatccctgatctgtgatgagaagatcttcgatagtgttcccgtgaaaaaggaagttaaggccgttgtcagcggtatctatgtactggatgtcaagggactgcacggcaaaaccgaagctgctccggagaaaaagaagggcttcttcaagcgcatgatcgcttccgcacaggaaaaggccggagcaaagcctgtcaagtaaataacgattcagaaccattaaaaaatagcagatatgagcatctgctatttttttgcatagaattccgaatcgttactgtttctccctgatatatagctttaaacaactctcactgaaaggttctccctcctggtccaagatatattccaccgtcacgcagatccgatcttcttgttcttctacctgcactctgcgggtctcgatccccagcagcagctgtccgtagggcgtattatagggcaccacatgtcgcttattttcctcgaagatcatatgcatctccacggctccctgcctggtcagctccagcatgttatcccggaacttgatccggctcttacaggttccgtcgaatccctctatatcctcctcatagagaagataatggctgtcgtttctcttaaaatattgtgctgcctgtgcggtctccactgcatccttatccgaagcgccctcagcatcgtgcagaccggacaggacgagttctacttcccgattcatcttcatctgtccttttaatactcatcaatcttgatcgtcttggctgataaaataccatatttaataatagagttggcaaaacgtttgaacttctccgcaccgtcgctgacatagaactgatatttattttctcccagatgaggttcctcctcattgagaatgtcatagtgctgtaacagctccttcagttctctggcggtctcgtatgcagggttcaccagtgtcacctgatctcccatgatccgtcctaccgtagagcggatcagcggataatgcgtgcatcctaaaatcagagtatcaatatctatgtcaatcaattctgtgagataccgtcttgcaatctcgtccgtcacgggatcctcccacagtccctcttccaccagcggcacaaacaggggacaggctttcccgtagatggtaacatttttgttcagttcctgtatgtatttattatacatctggctgccaatggtagcctcggtggcaataacgccgatacggccgttgcgggtcacttccgctgcggtcttcgctcccggcttgatcacaccaatgatgggaatatccagttccttctccagttcatccagtgcataggcgcttgccgtattgcatgccaccacgatggtcttcacctgaaaagtttccaggaaacgcacaatctgtttggagaagccggtgaccgtttccttggacttgctgccgtagggcattctcgccgtatctccgaaatatatgatcttctcattgggaatctgccgcatgatctcccgggctacagtcagtccgccgatgccggaatcaaataccccgatgggggcatcttttttcagtgcagttatattctcctgatacatgggatttctccttctatctttttaacatcgtaagcagtctgctcttgaagtggatctgttccggatccgcctccaggatcttccagtagatctgactgtcggaattccattctaccacttccgcatctttctgtacagtcttggtcttctctgcctgctcctcgtatacgatctcataagtggacggcagcatggccagttccgggtagatcactccccaccagccgtagcaggctgtgcagaccgccgacacccggatcccctgccataccactctccgcaatttttcataaaaaacacataatctatccatcagtgaacctctttccttttatggtttatggaaagaatttccactttccggatagattatacgattccgaagttatttatttttctcccgctccagtcggatctggcggatgatggcctttttctggttgtcgatatgcaccttggccatatgtgatgccgtttccttatcctttttgacaatgctttcgtagatcaccttatgttcctccacgaggcgttcatgctggctgctgtctttgatgtactcaaaccggtaacggtacatctgctcagacagattattcaccagctggatcaggcgctggttccccgtagcttccacaatgatatcatgcagtgccacatccgcctgtgcgatctgtttcacatctttggtcttcaccgcctcttcaaaggtatcacatgcctttttcaaatgctgcaattcttcctgtgagatacggtcacatgccagttccacgcagagagcatccagtgcacgacgcacttccagcacatcgttcatgcttttctccgtgatctgcgctacttccgctcctcttctggggatcatggtcaccagaccttccagctccagcttacggatcgcttcccggatcggtgtacgactgactcccagcttattggcaaggtggatctccatgagtcgttctcccggtttcagttctcccgtaagaatggcctgtcgcaaagtattgaataccacatcccgaagcggcagaaattcatccattgtcacttgtaaattatcctgcataaccttttttgccgttactcacagaattccgtcaggaatatctgcttagccagctgttcctcctccaatttatcatatgccctgcgggccatgtctttttctacaaaaatgccgaataccgttggaccgcttccgctcatcaggctgttgatggctcccagttccttcatccggtctttgatcttctgaatgatgggatatgcactgacagtcactgtctccagcacattttccatccggtccagaattccctgtaagctctcctcggcaatcgcctccaccatgccatcaatatccggatgtttccggatctcctgcgcatccagatgttcatacacatatttcgtagatacgttaatatccggctttgccaccaatacataacaatccggtgccggagccagcggagtcagcttctcaccgatcccttcggccagagccgttcctcccataacacaatacggaacatctgcaccgatattcacacccagctccatcagatccttcaacgtacatcccagatcaaacaggcggttcattcccttcagtgtggctgcggcatccgtacttcctcccgccataccggctgcgatcggaatatgcttctccaggtggatcttcacgccctcggtaatatgatatttctctatcataagttttgccgctttatagatcaggttatcctcattcgtgggaagctccccggaatccgtagtgatgacgatgccgccggctgtccgctgaaaatccagtacatcataaataccaacggtctgcatgaccatcttcacttcgtgatagccattttccagtcttctgaccacatccaggcccagattaattttggcatatgcttttatccgatattcgttcattttgctctgctccgttttgtatacaatgattgtacttaattttatacaatccatttctctttgtcaatggttccctaaagtatttgccgtttttctccgatataatggatgtagtaagtatcactaacagtcaaggatgacaaaaggtacgggcaaaaaccgtaccggaaaagaggaaattatgagtgtaaacggaattacatcaacacaggccgttgcagcctacagctacagcagcacaagtgcagcaaaagaaaaaacttccgccgaggaagtaaaaagtacaaagaccgcagaggacaccggtgtcatctatgaacacagtaccgacaccaagacctcttccacgaagaaaacttataaaccggacaccgctttgatcaataaattaaaagcggatgcagatgcacgtaccagccagcttcgttccctggtagaacagataatgggcaagcaggctgacacctacggcaatgccaatgacatctggtccttcttacgttccggtaattataccgtagatcccgccaccaaagcacaggcacaggcagacattgcagaagacggctattggggtgtgaaccagacctccgaccgtatcatacagtttgccactgctctgaccggcggagatcccgacaagattgaatccatgcgtgaggcattcaagaagggctacgcacaggcggaaaagacctggggcggttctctccccgagatctcccagaagacttacgatgccgttatggaaaagttcgataaactggctgctgacgccggtctgaccaccgaagcctaaagaccttttaccagcagaagtttccggccgggttttaattcatcgctttccagcgcattcagttcccggaccgcttttaccggcatatgatatttacggccgatactccacagatcatctcccggcgcggtaatatagatcaccgcgctgggaagttctgccagtacggcactgtcaatctcccgttccgtcacttcttcaattgccatgaactctgtgcttttcataactgtcgttgaaaaagacagcaccgcttttacatccacttcttccttatcgatcagatttacctgtaattgttccatttcgcagtgtacctctgcctggtcagtatccccgattcccggcacactcagcagatattcataaggaatctgtatccgggtgcttacataaggtgtctcatccttttccgtaatgcacaataccgtgagatcaatacttccctgcagccgtattccgtcctccgtaatatcccggtgatcgatggaagctgttccctcgctgtgcaatatctgcaggatcggaccgtcaatatttgtccctgcatgatctgttatcttggtcttgccggtgatccgtgtcagcagctggcgcacactggtctgcctggtatccgggatcacttcattcttcacaccgtagatatccctcaaaatatcgatctgttcctcttcatagagccggatattcaactccagcgcgcactccattcccaggattctctcctccccatccagatcaggctgaatggtcaatgtctgctgtcctggttcctgccgcagcaacgtataccggatatccggcagcagattctcccggcatccctggcattccaggcttccgtttaatggaagtgtcgtctcataagaacggatcgccctgtcctccccctctgcttcgtagagcacgaaaatctgaatatctccctggattgccagtttttcctcctgtggtttgaattctacgtcccgcagtgaaatattgctccaaaggatctgatagatgttggggtagctggaaggcagcggaatttcttcttttttacggaaaatatcatttttacagatagcaagctgtgtcacttccatcggcgcgatccgatattccacgccggcttccgtatcttctccctgaattcccacgggaagctcttcatcatagatttcttcgatacgggcggagagaaggatcagcgcctgtaaactcagtttgcgggaattgatcatatttaccgtgaaatcttccaccgttccttccacggtcaccgtatccgatggtaatactccttccatgcggatcctctcctcaaaaggcagagcgccgcccaacagtaccagactgcttccggactcccgcgtgtgatacaaaatcgcataccccagttttccccggacggttacttcatccgtacccggacagatctcttcgatgacaacctctcctttttccagattcagggtactgatatccggcttatcctccggaagattcagatcttcttccatggtaaactgcatgacggtggaccgttttacccggtccatatgtatatttctcttgatcagttccacaataacagacctccatatatacagatatgtctatatatatgaaggtctgtgctgttttataccgtattctgttctctgtccgtttattccaccgcgccgatgagatctgtcaggttctctacgtgataggtgtgcatgtaatcttcaatgccctccacgacttttaccgtcgtatagggatccacgaagttcatggcgcccacactgactgcactggctcccgccagaatgaattcgatggcatcttccgccgtagcgatgccgcccatgccgatgatgggaatcttgactgcctgtgccacctggtataccatacgaaccgcaatgggtttgatggcaggaccgctcatgccgccggtcttgttggcaatggcgaacttcctgcggtgaatgtcgatcttcatgccggtgatggtgttgatcagggacagtgcatccgcacctgctgcctctgccgctttcgccatttccgtaatgtctgtcacattggggctcagtttcatgatgatgggctgttttgcatgttttttcagttcggaagtaatgttatacagggcatccgctttctgtccgaaggcaatggctccttccttgacattcgggcaggatacattgatctccagcatgctgactgccggctcgtctcccagacgttccaccacgtccacataatcctccacggacttgccgcagacatttacgatgatcttcgtgtcatattttttcaggaaaggaatgtctctctccatgaacacatcaatgccgggattctgtaatccgatggcattgagcatgccaccgtacacctccgccacacggggcgtcggattcccgggccagggtacatttgccacacccttggtcaccaccgcacccaggcggttcagatctacaaattcttcatattccataccggatccaaaggtcccggaagctgtcatgacgggatttttaaaggtcactcctgcgatcgttgtctgtgtattcatcagatctctacctcctcagcatcaaatacgggaccgtcggtgcagattcttgcattatgcacatgcgaatgatgatccacttcctttgtcttcacaacacagcccaggcaggcacccacgccgcaggccatatgctcttccagggagatatatgccttgatcttcttttcttccgcgtattttttaatggcacgaagcatcggcatgggaccgcaggcgaagatcacgtctgcctgcagatgattctcctcaatggcgttcatgacattgcccttcgtgccgacactgccgtcttccgtagcaatatatacggttccgtttttctccaggtcctcttttaagaacagctggtcatcacgataacccacgatgatctgcttttctgtggatgccggaagctctctggccagctccagcatggggggaataccgataccgccgcccatgaggaatacctttttgccctccgcggcctctgtggggaagccgtttcctaaggttcccaggatctctacgctgtctccttcctgataagaggaaaattccgcagtgccctgtccggcgatacggtacacgatgcgcagggcatcttttttatcgcttacctgacagatactgatgggacggggcagtaaggtgctacggtccttaggatagacgccgatgaactggccggcttttgcgcatgccgccagatctgtagcgatccacatatcaaaaattctgggtgcgatctctttctgagaaagcacggttgctgtgattttctttttcattttgttatccttttctattctatacataagtgacaagcgttatctgcttatatgcgctctctaacgcgcacgctatgcttcgtataccattttaccaccgcagatggtcttcttcacttcaccttttaatttccatccggtaaaaggagtgttcgttgccttggatgcatactgctccgggataaactctgccgcagtatcgatcaggatcacatccgcaggacctccctccgccagatatccggcatcgagatgatacatggcagccggattcgtactcatgaggcgaagcagctgcttcatggtgagatatcctgcatctaccagttctgtaatgcccagtgccagagaagtctccagtcctgtgataccactgggggcttccgtgatgggttttgccttctcctcagcggtatggggcgcatgatcggtggcgatcatgtcgatcgtgccgtccaccagtccccggatcactgcctgacgatcctcttcttctctcaaaggaggattcatcttcgccagcgtgccgtatttgatcacggcatcttctgtcagggtaaaatgatgtggtgtggcttccgcatgaatattagaacatctctttttcgcctgacgcaccagttctaccgcttccttactgctgatatgctgaatatcgatgcaggctccggtctcttccgccagcttcagatcccgttccaccagtgcgatctccgcctctctggaagagccgccgattccataatgttcactggcctttccgcggttcacaccgttgttctcgatatatttcgggtcttcttcatggaaactgatgggcatatccagctctgcggagatctccatggcatggcgcaccagttccgcatccagcaggggcacaccgtcatccgtgaatcccacagcacccgccgctgccagcttcttcatatccgtcagctgttttccctgcatgcccatggtcacgttagcacaggtagtcacatggatccccgtcttcgctcccttgtccaggatatacttcagggtctcctcactgtccacagtgggcttcgtgttcgccatcagcactacggtggtcacaccacccttcgccgctgccgcagctccggtgttgatatcttccttcgctgtaaaaccgggatctctgaaatgcacatgcacatccaccagtcccggagcgactaacagcccttccgcatggatccttgtcaccttacccttcggttcgattttttctgcgatcttgacgatcttgtctccgtcgatcaggatatcgaagttaccttcttttcctgacttgggatcgatcatataaccatcctgtatcagtatcatatcgtctccgttcccgggcttttgcagcccgcttccatgacctgtttctcgaaaaagtttaccatgttttcatagaaaagaaaagagtgttataatagaaaaaaaacggaggaccgaagacatgaaaacacgagaagaagcgctggaatacggattatcttttccggatacgtatacagaaatgcccttccacgatcccaactggcagctggtacgggtgaagggcagtaaaaaagcatttctatggacttatgaaaaagacgatgtgctgcatctgaatgtgaaaaccgatcctgcctggcgggacttctggcgcagcaccttttcttccgtcattcccgcatatcatcagaataaagaacactggaacacccttatcttagacggcaccatccccgatgaggacatccggcgcatgatcgctgagagctatgatctcgtcacctacagtcccacgaagcggatctatgatgcggtgaaaaagattccgaagggctgtgtcgccacctatgggcaggtggctgccatggcgggagagcccaaaatggcacgcgccgtgggaaatgccctgcataagaatccggatcccgaacacatcccctgctaccgcgtcgtcaattccaagggagagctctccggtgcctttgccttcggcggtgccgaggaacaggccaaccgcttacgggcagatggcattgcggtgatagataaccgggttgatctggtaaaatacgggatgaagctttaaggctttaactatgccgttttatttccggtatttattttgacattgacaatacagataccaatgcacaccagaaccaaagcgatcagtgcattccagcccagttccgcggaaccctctcccagccaccatgcggataaaagcaccccgaataccgggttcgtaaatccgaagatagccaccttggagacgggattgtattttaacagaatgccccggttttctgtaggatttctgtcttttttcgccagtctttacgttattttttctcgatctgggaacgaatgtcatcctccaggatgtgttccacatccctggcttctttgcggatgtttttcagattatcccggatctcctgttcttcttccatgatctcgggatgttcctctttttcttccttgatgaacatgcataaaaagctgatcagcagaatcgtacaggaaatccagattgttttcgctccaatgtatccgatcatatgtccacccaatgccgcgccgacagcaaacaggaagatgattccgaaataataaccggattttcgcaatatctttttatctttcgtttttccataagcacataaggattccataccactgcgcaggttgccgatacacatggtgctggcgaaagcataaccgttcaccttgcggaacgcctgtacctgcatggcgcaggcgaaagataccatggcattggccagcagatctatctcattcggtataaaaccgactgcaaacaacaaaagtatttcgattgcaagtaccagctgtctccagtggatcttctgtgccttctggtatttcatacggatgcattctg

SEQ ID NO: 11297 - DNA, 14700 bp, Unknown
  gut microbiota DNA sequence
gacggcaaaagctgatgaaaccacagctcttttaactggactgattgtaggaaagacatatacgatcagcgtagtagctgtacgtggtgaagataaaacgaaccccggaacagcaactgttacagtaacggctgaggcacagcgagtatggagcaaatccacatacggttccagtacggattctaagaataatggtgttatcggaaatgcaaatgacggtaaggtaacggtatacagtgaaggtggcaaaggtaagattgtacccggatctacggatggactaactttctattatacggcaattgatcctgagactgagaactttactttgacagcagatattcatgtagacagttggacgctttccaatggacaggaaggcttcggtatgatggctgcggatgcagttggctcgaatggtgatggaactgcgttctggaacaatacttatcaggcgattgctaccaaggttgagtattactgggatggcgaggacgtaactactgacagctctgccaacaagatatctatgaagcttggtctgggtgcgatttccagacttggtgtaacagcagatgatgttgctgcaattaaaaatggaaccattacgatgcctgcgggttatgtaagtgagaccacaacactggagaccggtgcggcaactaagggccctggcacttataatcttgtgggtaactggaataaaaaggcagagcctaccggaaacctggagaatccgttgactgactttcgcctgcagattcagagaaacaacacaggttactacctgagatatttagataaagataacaaagtaatcaaagaagtacgttactatgatctggagagaacttctttgacccagattgataaagacaatatttatgttggattctttgcttccagaaatgcgagaattacggtaagcaatattgatctgaagacgattacccctgcggatgatgaaaaagcagaggaaagagagattgaatatgtatatccgattaatacgatagaatctcctgcgttctccaattctgcggattataatctggtatactatggcaatgctgacggtactctggtcgtgaaggatcagaacggaaaagaagtcctgaacaaggaattcaaagcattgaccaaggaaacggtagctctgaagttgaacagtggcaaaaacacacttacgatcaactttatcccggataaggaatacaaacccggcgaatttaagttaatgacttcctatgatccggtgactattaaccacactgtagagtataagacggtagagaacaacaatatttatgtgagtccgaatggtaaatcgaatgcagcaggtaccaaggatgctcctatggacatctacacagcagtgaagattgctgcacccgggcagaagatcctgatcaaggaaggaacttacaatctgtccggtactgtaaaagtagaacgtggaatcaatggtactgcagatgcgatgatctatatgatcgctgatcctgaggcgggctcaagacctgtatttgactttggcggaaaatgcgcaggtatgatactggcaggcgattactggtatttccagggattcgatgtgaccagatcggcagatgcccagaagggtattcaggtatccggtaaccataatatactggatcggatcaaagcatataaaaatggtaacacaggtatacagatcagccgttatcttggcactgatcaatttaatcagtggccagctcataacacaattttgaactgtagttcctatctgaatgcagataagggttatgaggatgcggatggattcgctgcaaaactgactgtaggtcagggcaacgtattcgacggatgtatcgcagcatacaatgccgatgatggatgggatctgttcgctaaagtgcagagtggttccattggagtggtaacgattcagaactgtgtggcattcaaaaatggctatattttagatgagaatggcagagagatcaatgccggcaatggtaatggtttcaaaatgggtggcgacagtatgccgggagctcatgtgctgaagaattctgttgcttttgcgaataaggcaaagggtattgactctaacagctgtcctgatattaaggtatacagtagcacaacattcgataatgaaagttacaatgtagcattttacaccaacaccgctgtaaatacagcatttgcagcagacggtattttatcctacaaggtatccaacaaggtggctgagcagtttaagctgttgggaacacagaatgctgcagatgtcaaaggtgctacgaattactattttgatggcagtaagtctgtcaataataatggtaaggaggcaactgcttcctggttcaagagtctggatacagcatctgcgctgaaggatggtggtatcacccgaaatgcagacggtaccgtcaatatgaatggcttccttgaattgaccgatgaggtacccgaaggtgtaggcgcaagaatgtccgggagaatctccggagacattactgtaataccggatgaaccgaagcaggatgatagtaagcctgaaaataataataacaatagcaatgataatggctctgacagtgcaggcacttcttccactccggagactgtgaactggaatgaagtaagcagttctgtacaggataaggttacagaaattgcacagaaccccgcgattgcaacggttaacatgaacgtggtatgtaccggtgaggtacaggttccgcagaaggtactgaataccattaagggtaccaatgtaacggttgcattccatagtggaaatggtgtagcgatgagtatcagtggtcaggatctgaagaataaagatctgtctaagattcagaatattgacctgacagtggatcagacgagcaacaatattcctgcaaatgttgtagctgctaagacatccgtacctacaagacaactggtgattaaggataccggcagctttggcgtgaatgtgaatattcatgtaaatgtgggcaaggaaaatgcaggcaagactgcaaatctgtaccgctacaatgcagaaaagggtcgcctggagtactgcggatcctttaccgtaacttctaatggacagtccatgttcgcgttaaaacgcggtggtaattatctggtaacagtaacggagcgcagaccgtccgaaagcgtatggtttgcagaaggtgattacaccattaagccgggagatacgctttccaagatcgcacagaggaatcatatgaccctggcagagctgcttcgcagaaacgcacagatcacgaaccggaatgtgatcaaggttggtcagagattgaatctgaactaagatgcgggcacaataaaaagagaaaaagtataagacgggaaattgaaaacgaaaataaaaacgaatggtttgggaggaccattcgtttttatttttccgctgacttgaaattttgaattccagtgcataggtaaattccaccgtgtctttaaaagttgcctgaaatcgaatgattttagagaaaaaataatggatttctgttataatcatagtaattcgtggcgaaattctctgtttttctgtatagtaaacaagccactggaatgtagtgtgtcagactaaattccactgttcgaatatgatgcagttatgatgcagagatggtatatattgatattgggaggtaaataaaatgaaaaagaaaatattagcagcattacttacaggactgttgtttacctgcactgcatgcggaagtccggaatccccggtgatcccggaggtgaccgacagcccaatcgagaatacgcaggaaagcgcacaggaaaatgcagaaacggagactgcatcgcagcaggaggcacagaccgagactgctgcaaccggcaaagtggagattgccacagaggattttgaaggcagcagtgatccggaaaatgcggaacgaaaatacacctatacctatcaaatgccgacgatcacgatagaaggtaatgaagaagcgcaggacaagatccaaaaggatttgaacgcgtatgtggaaacttttttggatagtatcaacaatagtgatttcggtacagtttatgagggcgagatgtcgggaatgactagctatgaagaactttcatttcaggtaatccgtgcagatgacaaggtgatcagcgtggtatggggcaatgagggctataatcagggagcacatggctggtacatacaggattacagaaactattatacgcagacaggagaaaaaattacctttgacagtctcggaaacggcttccgtgacaaagcactggaactggtgacgaaaaaagctgccgagatgcaggcgacggatgactgcttcttccctgattatgagaagagtattaaactggtagtgttagatggtacggaaaatatggatactatctatcaggaaatctatggtgcggacattgcaggtaccggcaatggtccggcaagcccgaccttcagcattacgggagatggattcgtctttgaatccgggcagtatgtactgcagccgtatgcagtggggattatagattttgaaatcccggcaagtgatttcggggatgctctggcagcagatatttttaaacaaaatatccgataaaacactccaaaacgtcctgctgcgagaaaatggaggaaattttatgcttacatcactgggactgatttttttgctgggacttcttatggcagcaatctgccagaagattcacctgccacgcattattggaatgttgtttaccggaatttccaatacaaaaccccgacagttatcataactgccggggttttaaggaggatagaaatcgttttgaaaggaattagcccatcgtaataactacgttgtactcttccttgcccttttcgtaagggatgatgtgtccgtcaacagccttgccatctacggtcatggataccacacccttctccacgttctgaggattcttcacctgaatgtgataggtgccctcacggaacttacgggtgatggagaaatcgccgaagcccttaggaatacaaggatctacggataatccctgatgggtaggatatacacccaggatgtactgggagatatttacgaaagtccatgccgcggtaccggtcagccagctgtttttcgcttcgccgtggaattttgcatccttaccggctaccatctgggagtatacataaggctcggtacgatggatctcgctgatatcctcaatgtatgcgggacaggtcttacggtagatttcgaaggctctgtcacctctgcccagaacagtttctgcgatggatacccagggattgttgtggcagaagataccggcattctccttgtatccggggggataagaggatacttcaccaagttcgaggtgatactccgtgtatgcaggttgtaagatcatgacaccatacttggtatccagtctttcttttacggaattcagtgccttctcggcaagaccttcctttacaccgacaccggcgagtacacagaagccctgaggctcgatgtagatctgaccttcgcgacattccttggaacctaccttgtggctgtaagcatcgtaagcacgaacgaaccagtcgccgtcccagccatccttcaggatcgcatcgtacattgcctgtacttccttgcgtgcgcgggcagcttcatcagcatcacccatcagctcacacagctgggcatattcttcgccgtattttacgaacataccggcaatgaatacggattctgccacgggtccttcactcggaccgaaggtttggaaggattctccgggatgagcggagaaacagttcaggttcagacagtcattccagtcggcgcggccgatcagaggcagattgtgaggacctttgtggttgatgatatagtctaaggagcgttttaagtgatccatcagaggagcagctacgctcatatcgttgtcgaaaggaaccatctgggtcaggatggaggtatcaccggtctctcttacgtaagcactggtacctgcaatgagccacagaggatcatcgttgaagccgctgccaatatcggagttgcccttcttggtcagaggctggtactgatggtaagcgctgccgtcctggaactgggtggaagcgatatcgatgatacgctctcttgcacgatccgggatcagatgtacgaagccgagcagatcctggcaggaatcacggaagcccatgccacgaccgattccggactcataataagaagcggaacgggacatgttgaaggttaccatgcactgatactggttccaggtgttgaccatacggtttactttttcgtcagcagaatctaccgtgtaacgggcaagtaactgtttccagtaagcctgcagcgctgcgaaagcttcttctacctgggcgtcggtctggtattttgccagcatttccttcgcgcgggtcttgttgatcacaccgtaggactcccacttctcgtcttcgggattctcgatatagcccagtacgaagatgaaagtcttggtctcgccggctgccagatccacattgatctgatgagaagcaatgggagaccagccgcttgccatggagtttgtgcacttgccgttctcaaccgcttcgggagaatccgcacctctgtacgcaccaagaaaagcatctctgctggtatcgaaaccatcaatcttcgtatttacagaataaattgcgtaatgattacggcgttcgcggtactcggtcttgtggtaaatagtcgaatcctgtacctccacttcgccggtgcttaagttacgctggaagttcttcatatcatcgtcggcattccacaggcaccattctacataagagaatacggacagcttcttgtcctcggagcttccgttggtcagagtcagctgggagatctcacagttatcattcagaggaacgaaagagagcacggaagccttaacaccgttcttggaagaggtgaaacggctgtaaccgataccgtgacggcactcgtaagagtccagttcggtcttcgtaggctgccagccgggattccatacggtatctccatccttaatatacagatatttgccgttgatgtctgtcggtacattattgtaacgataacgggtcagacgcagcagtttggcatccttatagaaagtatatccgccgcaggtgttggatatcagactgaaaaactcgttgcaacccaggtagttgatccagggaagcggagtcttgggagtagtgatgacatattcttgatgcacatcatcaaaatgaccatacttcataagaaaatctccttctttcatgttgttgtatgttgagtgtttgctttttcgctgcggactgcttaatgctcagtaaacgattaagtaatccggaattctgatttgtattatacagaagcagtgctgaaaatgcaatacgaatattgaaaaagcctgtaaaatgcgcaatatatacaaatacgcaagaaaaacatggacagaagatacaaaacaaaacggatcttgaaaaaagcagatttacgaaacaaaatagtagcaaacgttatcgcatactttgccattatatagaagaaacccaattgctgcacaagccaaatgtacaaaaatacttatttgaaattgttaattatagacaaagtggatattttttagaaaaaaactgcaaaaaagtattgcaaaatgctcaaaggtggtatatattaaaactacgaaaacgattaagttacaaaacaggtcggatgaaatgacgaagacatgaaacaggagaacggtatggcatcattgaaagacatttccaagatttgtggagtctccgttgcaactgtcagcaaggcactgaacgaccacaaggacattggagaagaaaccaaagcaaatatcagacgggtagccaaggagatgggatattccccgaacctttccgccagagcactgaagacgaacagaacttatggaataggagtcctcttcgtagatgaagcacaaagcggtctgacccatgattacttttccagtgtactggacagcttcaaaaggacagcagagaagagcggttacgacattacctttattaacagctgcaagaaccgtccggatcggatgtcctacctggaacacagcaggtacagaggctttgacggagtggtgctcgcctgtattgatttcgcagatcccgaagtcatcgaattagtacagagttccatcccggtggtcaccattgactatctgtttaataatcgtatcgcaatcatgtcggacaatgtgacaggtatgaaagaactgctggaatacatatatagtagaggacataggaaaattgcctatatccacggcgcaatgtcagcggttacctcggggcggttatccagcttctaccggacggcagaacgactggggctacagattcccgatgagtacatcagagaagcagcttacagagatactgccacgacctatcgtgtgactaacgaattactggatcttccggatccaccgacatgtatcatttatccggatgactttgcttctttcggaggcatcaatgctatcagggagagggggttacagattcccgaagatatctcggtggcaggatatgatgggattcagtccgcaagacagctggagcccaggctgaccacagtccagcaggataccgaacagatcggttgcctggcagccagagaactgatcagcctcatagagagacctaagaccaccattatcgaacaggtcatagtacccggtaaggtagtggaaggcaagtcggtagcacagattccgacagacaaataatcaggcatttatatggaagcgccgcaaccgcaaccatatgaagataaatgcaacaagcacttacaacaaacattcaacaaaaaatgggaggaaacaaacatgaagaaaaaagtacttagtgctttacttacaaccgctatgcttgccagcatgctggtaggctgtggcaacagcaacgatgctcctgcagcagcttccagtgaggcagcacccgcagcatccaccgaagcagcagcttctaccgaggtagcttctacggaggcagcaacagaggaaggcaaagtcttcaacatctactgctggaacgaggagttcaagagccgtctgacagatcattatcccggatatgaagaagtagacggaaccaccggtaagatcggtgacatcactgtaaagtggaacatcactccttctgatgacaacgcttatcagaacaatctggatgcaacactgttaaagcaggctgatgcagcagctgatgacaagatcgacttgttcctggttgaggctgactacgcattgaaatatgttgataccgactacacaatgcctgttaaggatctgggcatcaccgatgcagatctggctaaccagtatcagtacaccaaggatgttgttaccgactccaacggcaatctgaagggtgtttcatggcagggctgccccggcgttctgatttataaccgtgaagctgctaaggctgttctgggaaccgatgatcctgcagaggttcagaagtctgtatctgattgggataccttcaccgcaaccgctgagaagatgaaagcagccggttacaacatggtatcttccgtaaacgatacttatcgtgtatactccaacaacgtatccggcaaatgggtacaggatggcaagatcgtaatcgatgacaacctgatgaagtgggttgatgactccaagaagatggttgacgctaaggaaaccggtaccttcgatctgtggtctgatgactggagcaaaggcttctatcccgatggcaaagtattctgctactttggacccgcttggctgatcaacttctccatggcagctgataccgatggatctatcgcaaatcagggtggctggggcgctactgaaggacctcagggcttcttctggggcggtacttggatctgcggtgctaccggaaccgacaacgcttctctggttaaggatatcatcctgaagatgaccactgatgaagacatcatgaaagagatcgttgtagctgatgatgatttcgtaaacaacaaacccgctatggaagctatggcagcagatacctcttatcagagcaaggtactgggcggacagaaccctctggctatgttctgcgcaggcgctgagaagatcgatctgagcaacctgtctgcatacgatcagggatgtaacgaagagttccagcatgctatgaagaactacttcgatggcaaggcttctctggatgatgcactgaatctgttctacaaggctgtagaagagaagtatcctgagcttactcactaatccgaaatgataagcgaatagcgaaaaaataaggaattgagaaccgtgcctgcctggctggtcaggtaggcacggtttttctctcaaaattcccggttggcagaagcttttttcagaagaagataattaagaacaaaaagaagagagctgctgcgagcctgatcggaaacaaagaaaggcacgaaaaacgtaaagtcgctaagagagcatgacggcaaaagggaggaatcattatggcaaaggtaaaacgcggaaaggtggtacgctataataagtggggttatatttttctgatcccctttgtagtagtgtatgtattattccagttgatcccgttgttcaggacattttattacagcttttttgaaaattaccgttccggactgacacagatcggaccgaatttcatcggagttggtaactatgcaaagctgttgtccaatccggacctgtggatgtacaccaagaatacattgatcatgtgggtactgggatttgtaccgcagatcatcatatctctgcttctgggtgcatggttctcggatcccagccttagattaaagggacagagattcttcaagacagttatctatctgccgaacctgatcatggcttccgcatttgcaatgttgttcttcacgctgttctctgatggtggtcctatcaatgaaatgctgatgcagatcggaatcttaaaagagccatatcagttccttacaaacgtatggagtaccagaggtctggtagcattgatgaacttcctgatgtggtttggtaatacaacgatcctcctgatggcaggtatgatgggtatcgatacttccctcttcgaggcagccgaggtagacggagcaacctctacccaggtattcttcaagattacattacctttgttgaagccgattctgatctacgtaatgatcacatccctgatcggtggtctgcagatgttcgatgtacctcagattctgaccaacggtaagggcgatcctatgagatccagcatgaccctgatcatgtacctgaacaaccatttgtacagtaagaactacggaatgagtggtgcgttgtctgtaatgttgttcattatcacaggtatcctgagcttgatcgtatttaagttctcgaacggcaaacaggataagtaggaggtggcagaaatgttgagcgtagaaacaaacgagacaaaaaaaggtctgggcattcatgccagaagagcacttgcatatatcgtactggttattatgagttttctctgcctgttctggttctatatactgtttgtaaatgcaaccagatccaaaggtgagttgacacagggatttaccctgctgcccagcacgcatctgatccagaactggaagggtgtcatggcaggaaccctgccggtagtcagaggtatgatcaacagtcttgtagtagcaacctgcagtgctgtgctgtgtacctacttctctaccatgaccgcatatgcgatccatgtatatgattttaagttgaagaagttcatgtttacctttatcctggcaatcatgaccattcctacccaggttaccgcactcggatttatccagttggtagctgatatgaagctggaggataactttatccccctgatcatcccggcaatcgcagcacctgctactttcttctatatgaagcagtacatggaaagtgcattgcccctgtctctggtagaggcagccagaatcgatggttccggtgagttccgtacatttaattccatcgtattgccgctgatgaagccggcaatcgcagtacaggcgatcttcactttcgtagcgaactggaataactacttcacaccggcactggttctgcatgatgacaagatgaagacattacctatcctgatcgctcagctgcgttccgcagactttctgaagtttgatatgggtcaggtgtatgtaacgattgcattctctatcttccctgttatcatcgtatacctgttcctttccaagtacattgtccagggcgtggcaatgggaagcgtcaagggttaatatttcgccagcaacattcaatacataaatctctcctaaaagcgtcactcttccccggagcggcgcttttcgcttgcaaaaaaataaattatacccgatgaggtataatttaaaaagaaatggataaaatataccttatcgggtataaaaattacgagagaacttgaaaatatacccgaacgggtatataattggtgataattaggatgggtattataatgaataagattgcagaatttataaaagaaaatagaaaagcagccggactgacacaggaagattttgcaatgcgttcgggattggggcttcgctttgtcagagatctggaacaggggaaagagaccgtgcggatggataaagtaaatatcgcattggcgatgttcgacatggaagctgtgccgggtagaaaggaaagagggtaagaatattatggagatattcagaagtgttcaggtatatatccggaatgtgtatgccggagaactttccgagacagatgaaggctatcttttttcctatgatgaaaaatacagaaaaagagaagatgccagtgcggtatctcttacaatgccgatccgacaggaaccataccagtcgaaaacgttgttttctttttttgatggtctgattccggagggatggcttctgggcgtggtaagcagaaactggaagattgatgtgaaagatcgttttggactgttggcggtagcctgccgggatgcgattggcaatgtcagtataagggagaagaaggaatgaattgtctgtgctgctggaaaaaattgcagacggtagaagatgagaagcggggatggcataaaagctgtgtcagacattttttcggaagcgacaggatgccggagctggagctggatgaagaaaaattgaaagaacttgcaaatgaaacggtaaaccgtggatatacagttcccggagtgcagcggaaaatgtcattgcaactgttctcggataagaagaaaacgaggctgactttggtaaactatccgacgggatatattttgaaaccgcaggttccggaattcagagcgttgccggaggcggaacacctggtaatgtgcatggcagatgcgtctgggattgttacggtaccacatgcgctgttgcagctacaggatggacttgcttatatcacgaaaaggattgacagagtgtttcaaaaggacggtgtcaggatgctggcaatggaagatttctgccagttggatctgaggctgaccgaagacaagcacagaggctcttatgaaagatgtgaaaagatcgtagaacgctattcaacaagggtgggactggacagaacagaactgtttttacggatcgtgttttcattcctgatcggaaattccgatatgcatttgaaaaatttttcccttttggagacgcaggagggaagcggagagtatgcgctttcaccggcatatgatatgcttccggtgaatctgatcatgcctgaggatgaagaggaacttgcgttaactctcaatgggaagaagatgaaccttagaaaaaaggatttctatatttttgcggaaaaatgcggtatagcacataattctgcagaaaagatgataggaaaactggtatccatgaaagatgtttatcaaaaaatgaacagggaatctatgctgccggaagagataaaagaacagtttgagaagttaatagaagaacgatgcaatattttggcataattgtatcggaagagaaagaggtaacaatcatgcagatgtatgaggtgacggcgctggcgccggaggggtcggaggaagtctatcaggcagtcatatttgcggaagacgaagacgatgccctgaatcagctggaggaacagctgcaggagcaggggattgcccatggaatgtgcatggcagaagaagtgtgaagtgtgaaaagaacttctaatcactcagagcaagggctctttcgtgaagaagttctaagtttcacacgcaaatttgcgccaatgcgcaaactttgcaggttatggaaggatgtgggtattgaaaatggaaaattcttatcgcttttttgaaaataaagattgtaaatatttcccctgccataagggccttacggagttcaactgcctgttctgctactgccccctgtaccgcctggagcactgcccggggaatccccggtatttcgcgaaaaacggcaggcggatcaaggattgctcgggctgtaacttcccgcatgatccggagcattatgatatgatcatgcagatcctgcgggagacgtaacacatttttctggaaaataaacacatattttgcacatttttctaaaacgaaaagccgatagtctgttttcacagattatcggctcagactgtagacaaaacgcttttggtcag

SEQ ID NO: 11298 - DNA, 8400 bp, Unknown
  gut microbiota DNA sequence
gttctgcagttcatttttttcctgctgttccttctgaatctgttgccaggtactactggtagcttctactttgatgtcttctgaagaaaatgctcctgcaaggatcaccgctgcaagcagtacagctgtcttctgtaggcgcttcaaccgttcatactcctttaatctgtcgttcagaccccgatatgtatcgtacgtcctgtccttctgtatggaacgcactccactcccgccgcatcaaacatccgcctggctgcccggttggagggtgttccccgatatttgtcgctgtcatatactacggtatggatccctgcctgaatgatggctttcgcacactcattgcaggggaaaagggacacgtacagcttcgtgccctctaaagatcctccgcggtaattcaaaattgcattcagttcactatgtgtcacaaagggatattttgtcagattactatccttgtcattctccctctcccagggaaactcatcatcggaacaacccttggggaacccattgtatcccatagacagaatcttattgtccgggctgacaatgcaggctcccacctgggtattcggatccttggaccgcatccccgacaggtgggctacccccatgaaatattcatcccaactgatatagtcactgcgcttggcactcattggtgtctcctttatttggtaccgaaaatacggtctccagcatctcccagtccgggaacgatatatccgtgatcattgagcttctgatccattgctccgatatagatatccacatcgggatgtgcttcctgcatagccttcacaccttcgggtgctgcgatgatgcacagcagacggatgctcttgcatcccttgtccttcagcagctggatggctgcgatggaagaaccaccggtggccagcatgggatctacgacgaatacttcacgctctgcacagtctgcaggaagtttgcagtaatattctacgggctttaatgtctccggatcacggtacagtccgatatgtcctacctttgcagccgggatcagggacagcattccatctaccataccaaggcctgcgcgcaggatgggtaccagtgccagttttttaccctttaactgttttacggtagtcttgcagatgggagtctcgatctctacttcttccagtttcagatccttggtagcttcatagccgatcagcatggcgatctcgctgatgttctgtctgaaatccttggttcctgtttcctttctgcggatgattccgatcttctgctcaattaagggatggtccataactactacttttgacatatgattgtcctcctgtgttttagtgttgttggttgtattttgcgccccagttcagatctcttcgatcaggctgattctgcgactgtgtctctcttctccggaaaagggtgtgttcaaaaaggtctcaacgatctccagtgccagattctctcctacgatacctgctcccattgccagcatattggcatcattgtgcagcctggtcatttttgcagagagcggctccgaacacaatgcacaacggataccttttactttattagctgaaatactgataccaataccggtcgtgcagatcacaatgcccttttcgcaggtaccggctgccacagccttcgctgccgcatgcccgaataccggataatcacaacttgccttgctgtcgcatccaaaatcctgaaaaggaatattattctcctctaaatattttttaactctttctttcagatcatatccaccatgatcacttgcgattgctatcatttttattctccttatatttaaaatgaaatttaaagctttacaaccttatgccccgccgccttcagcagccggttcataatagcctgtccgaaaccatccgtggaaaatccctcagaatagattttggtgacaccttcatcatcgaattctctcaggatcgtatacagatgtctggcaatgctgtcttcatccctgcggctgccgacactttttaccacatctgccgtatacccggaaaacatttcttccgttccgataataccggtcttctctcctgccgcatgatccgctgcagcttcccggttgatatattctctcacctgttccggcgtaccttccacaatggtgagttctcccctgggggcataatgtctgtatttcataccgggcgccttgggggcctgtccactatctgcccgcaggatcgtggcatctgtgtccaccgttcccaacaccgcgctgagcttttcccgggtgatatatccggggcggagaatctgcggcggactcaccgtcagatcaatgatcgtggactccagtccgattcccacttctccaccgtcgataatggcatcgatccggcccatcatatcttccacgacatatttggccacggtaggactcggtttcccggaagtattggcactgggtgccgcaatatatccgccgctgtactcgatcagtttctgtgccgccggatgtgatggcatacggatggctaccgtatccagtcctccggtggtctcgtaaggcactgcatctgacttcggcaggatcatggtaaggggacccggccagaaagcatcggcgatcctgcgtgcttcttccggcacatcccctgttattttgtaaatgtcttcaaaccggtaaatatgcacgatcagtggattatccgagggtctgcctttcgctgcatagatccgctttgaggatgtcgggttcaatgcatctccgcccagaccgtatactgtctccgtaggaaatgccaccagacctccccgccgtaaaatctctccggcagctttcagttttgcatcatcttcctcactgaccggaccgtctccgggttgaatcttgatgatctctgtattcatattttttaccttctatgttctaatgcatttgggaatagtatatcatagatacgataaaatggaaagatactgtttcaggtaccgcagaattcccttatggatcagccatgcaatacgatcctgatattcttcatcgcaaagcttttccgcctccgcttgatttgacaaaaagccacactccacgatcacgatggttcctttggtcttcttcagaagataataactgtcgttggccttgactttgcgatgattctccgggtccagtccccgtaccagctgatcctgaatgccggaagccagtgtctcgcttcccatacttccggtataataaaacacctgcgccccatgtacgtattcctccggataactgttctggtgaatacttaccgtcaaaacaggatcggttttttctatgatttctatcctgcgtttcatatcctgtacctttttattggaagcatgtgcatcatacaatccgtcctccgtctcccgggtcagcaccacttccacatcttccgcttccagatattttttcagtttttgagcaatctgaaggttgatatccttttccggtgccccattgatgccgatcttccccggatcgtctcctccgtgtccggcatcgacgaccacgcagagtctcccggagtcatctgcccccattcccgtctcccgcaaagcatttaccgcatgcatcgcaccaacatattctgccgcttccctgccggtcagcgccatcgacagaattaagagccctgccatgatcagtttcaatgccttctgttccattttttcagccgccttattgtattctatatgattttatatgcattttccgcaggaaatatcttcccgatgcaaaatcttccaaaattaagaaatccttttgttttaacctattgcatcctgttgcctgttcagcgtataataaacacatgaaatcgaatagaaaaacactttccgtaatcttatttatattggccggaatttgtatcctggcagcaattattctcttcgtgaggggtcacatggaggaccggcacatggaagaatccctggatgctttaagacccactgagtctccggcagagaccgttccttcttcggaacctgagaccattgcaactgctacgacggaatccaccgcggaagaagcggttcccgctccggaagaggtcaccagggttcccaatccttacgccgacagctttcttgccaacgaagacatgggcgcatggctgcagattcccggcaccgggatcgattatccggtgatgtggactccgagagatgagtcctattatctgtatcgtgctttcgacggcagtgagaataagaacggctgcctcatattagatacggacagctgcctggatcccctttccacgaatctcatcattcacggtcacaacatgaaatccggtgccatgtttggcaatctaacggattatgaggatccggatttttacgaaaatcacaaaaatattatcctgtacaccgaagaatgtcagcgcaattacgaagtcattgctgtctttcgttcccaggtctaccggaagaccgatcaggtatttaagttctacaaatttttccaggcggatacccaggaagaatttgatgacttttataacaatatcaagcagttatcccagtatgataccggtgttaccgcacagttcggggatcattttctgacactgtctacctgcgtgtatcacgtagaacagggccggtttgtagtcgttgccaaggaaacggaacccggcgatcactaccttcccatacaggaataaccaacaatctatcaggaggattttcttatgaaaaaactgaaaaaaatcgttacactgcttacgcttgcagctgtgtgcctgaccgctcccgcattcgggaagatcacagtcaaagcagcagaacccaacacctatgttctgaacttttccccctccaaaggtgaatggcgcttcaagcctgcatcctcatggtccgaagaagttcaggaccgcgagctttactatatgatgcaggaaatcaaagacggtgattacatcgtagtccagaatgatgttgactgtaaccctctgaacctgaatgttcccgtacgtctgggtaacctgacgatcaagaacagtgtcaagactcctgtcatcactgcaaaaggttatgacaatgtttatgttctggacggtactactgcagcaattaacggtgatgtatctcatgcctatgtatacggcggtgcacgcgttaatttcaataataacgttgacactttggaaatgtacggctacggcaatgaatacaacaatctgcatgcctatatcaacgttgtcggtacggtaaatcatctgtctgccaaagacggtcagaccatggagacttattatgactactacaattttgcagccaataagctgtacaccgaggatggcgccttaagaaccgatgcacaatattacagcaagaccgctcccgctgccaccactgaagctgcacagcctgctgcagccgctcagcccgctgcaactgctcagcccgctgcaactgcacagcccgccgcttcctcttccgcatacgatgatgtgcctaagaccggtgaaagcgctctttctatttatctgatggttgccgcagttttctgtgttgtatccggatatgcacttcgtaagaaaaacgcataattacattataagagcacaaaatgcctggccaaaacggccaggcattttatattacttattattgcaggtaggcgttgatcagttcccaggctgcctgtgttccgtagccgagtctccatactgccacaccaccgatattcttggtagtcatcatattcagcttcacagcaatggattccgcatcctccagccagatctgataatttacgctaccggaagtccattccgcataattctggcaggtcacttcatcccattctgcactcacgcctgctttactcatgaagtctgcttcattgcgcattgtgatatattcgtctgtcacatccgttccttccgtcttccacaggatcgtatagaagggaagtgcattcactactttattcgccggtacttcctgaagcgttctatccagtccgtccgatacatagctgatgcttgcaacacttccgggatccttgcttccgtgccagtgctcatcatatcccatgatgatcacataatccgcaacttctccctgaatatccaggcgatagtagtcattgaaattaaaaggtacataattatcgattgacagtacaagtcccttattgcggcactctatggacagttctcttaagaactccacataatgcggtccgcagtcactgctcagctgttcgaaatccacgttaatcccgtcaagtcccagtcccactgccgtatccgtcacatttttcaccaggttctgtctggccgtggtggatgacagcatattcaatgtactgatagatatgccgttttcattcgcataattaaaattatccagcacaccccacacctgcagtcccatctgatgggcggtcgttacataacccgctgttgcaaagcttcggaacgctccgttttcatccgtcatactgaaccaggtaggtgcgatcacgttcattcctttcgtgccggacaccatagagtataaggtatcattacctgcgacacctcctatggaatgccagccgaggcagatcttgctgtctgcggtaagggatgtatactccggtgcctgataatctgtcaccggtgtttccgtctcctccgtgatctcacccaggcgtttattttccacatatccgatgactgcatccactgtctttaccttactccaggtctccatctgttccagtatctcaagggtatctcccttgactgcctgtgtcaggatcgggctctttacgccgcctctcagccggactgcggtatcctttttcagctgtgctacctgtctggttccccattcggtattgacctgtacatgtctgtcataacattcataggaataattcgtaaacagttttacatagtcagctgccacatatacgttatctccgtccgcgaagctgatcacataaccggcttcctgtgttccttccgttgtcgtatatacagtctctccgaatgttgtccggatcacttctgtcggagtagcatataacaacagattctctgtcatatccgcataaaatacttcgttcatatatttatgaacagttgccagatcgaaatagcacacaccgtctttgatcagtgcctgttcctccaccatctcattctgtaaaataatggcactcctgtcgttctctgacacctgatagaattcattccagtcggcttcttccttgctgtaggaatatttatccaacagcactttgcccagtgcgcagccaccgatcacaaggatcagcaggatcgccacgatcaccggtaatacttttttcttcatatgtgctcccatccgcagggggttccccgcattgttcttgcctcttctttcgttccgtccgtctcccggcagaacagtcttattctatcacaattcccgcatataatacaaggaacaatactcattcagtcacacactgcaggacacagccagagaggcaatcccattttgcggtcccgcagcgtatgttccttcccctctgaccgttccggccatacgggcgctgacacctcctaaatgacagttccgggccatccacagcagttttggaccaaaagtattcgtgaaacacttatccctctgctgcgttttccggtactttatgaacataaatgcctctgacggtacttctttaaggtagttcaaataaaacattggaattatgattgtgaaaaatttcgttgaaatattatgaccagacacgtatacgcctgtaagacatctccatactatattttacaaaacaataaatgctctccatcgttttgtgaatacaaataaaaatgggatgaaacggaacgaatcgttcctcgtaaatcaacaagaaaataagaaatccgtcagcctcctctccgtaccggagtatcagaggcatctataggtgagattatatactgtaatgtcttgtttgacaagctcttttattaaatttttttaaactgtgaaaggcttctattgactaaaatatagggaaagtataagctatataccataccaatgcgaaggcagaaaggaagtgttgtcgcatgaaaatagaaaaagtaaatgaaaatcagattcgctgcacgctgacccgcgaggatctcgccagccgcgaattaaaaataagtgagcttgcctacggtacggaaaaggcaaaatccctattccgtgacatgatgcagcaggccaattttgaatttggctttgaagccgaagacatccctctgatgatcgaggccatcccgctgaatgcggactgcatcgtgctgatcattaccaaagtagaagacccggatgaactggatacccgtttttcccgttttgctccttccgttacggaagaaagtgatgaggacagtgatgagagcactgcag

SEQ ID NO: 11299 - DNA, 9415 bp, Unknown
  gut microbiota DNA sequence
caagcattccggggcaggtactggattttatcgtggtactggtgggtcttgtagtgatctttaaagaaaagattacggagatcgttaattctattttcagtaaaattaccagccagacgaaaaaaatataagagcatgaccttatgaaagaaaacggatacatgacaatatatcttgcgcttacacttggtgtgatgatttcactgtgccttgcgttgatagaaggttgccggtaccggggaatctgcctggaaacagaatgtgttatggacataggaatggatagtattctggcggaatatcacagagagttattcgcacagtataatcttttcgcagtagattgttcctatggaaccgtgcatgggacgacaaaattgacagaagaacaccttctggaatatatgaatcacaatttttcactggaagatattttcctcgataaatttctgtatcgtgatttttttgcgctggaagcagaaaaagcagaaatgacaaaggctgcttttgtgaccgatggggatggagaagtctttcgcagaatggcggtggacgcaatagaagatgatgtcggcatcggacttttgcaacagataaaagaatgggtgaagaccataaaatcccgtggactgttggaacgcagtgtagaagaagaaaaacagaccgtggatgcgcagatccgggaatacgacggaagagaaacggctgacggaaaagtaattcatatcgaaaatcccacagaggcattggaggaaaaaaagaaaagcggaatactttcactggtgcttcccgaagaagagatttcagatcgcagaatagaaacagaacaattcatagaagcgagagaggaacgagatcagatcaatcggggaaatgttgcgctgcaatcccagacggaatgggaaaaagagaaggaaagaatattatttcatgagtatctgctgaaatatatgggaaggtatagtactgagaaaaaaaccagtccgttgtggtatcaggtggaatatatcatcgcaggagaagaaagtgaccaggaaaatcttcgttatgtgataaacaggatatttgcgatcagggaagccgtcaatgccgcttatttgttcggaagtgaagaaaaatatgcggttgcggaagttttgggtgaagcgctggcagcagttatgatggttccggaaataggagaattgtttacaatctcattgatacttgggtgggcatttgcggagagcgtgtatgatgtcagaacaatgcttgccggagacaaaatacctttactgaaaagtgacagcacctggcactgcggattacagatgatattacagggaaatctgacggatgagggacgttccggagatgcggatgctgtgacggatctgggttatgaggactatctgagaatatttttgttgctttgtgatgaaagaaccgtcacctacagagcaatgaatattgtggagcaggatatcagagttacccccgggaatcagaacttttgtctggatgcatgtattgcggaacttcaaatgaatgtaaaggtgaagagccgatatggatatagtgttgagatagaacgccagaaatcctatataacgtccttcgaagcggcgacgggtatgtcggagtaaaaaggaggtgggcggtgatgtcctctttatgggaacaatgcaagacaactatgaaacaaaaacacatgagaccttctccgaaaataagaaatattcttaacccatgtaaaaaaattctccccgcaaaattatcattagtcattgaatacataaagaggatatcactgcccatgctccaaaggacctgcgtcaggggaagtatgacggtagaagcagcgctggtgctgcccctgttttgcttttttgtgatttctatgggtaatgccatagaaatcataaggctgcacggaaatctggaagtggcattgtggaatgccgggcggcagatcggtgtctacggtgcattaccggagggacagcagggttctgcagatcacagactggaggcagttgccgtatcttatacttatgtcaaggaacagatcgaagaacagctgggagaggaatatctggaaatgtcacctttggacggaggaagtgatggattacagttcttggagagcgatattgaaggtgacatttatacaatcaatatgacttataggattgtgggaatatctcaactgtcaggattcaaaaaatttcgaatggccaatcgttattatggccatatgtggaacgggtatgaaattccggaggcggaagacgaagagtatatatatgttacggaaaacggtagagtatatcatacgaacagagaatgtacgcacattcggctatccgtccgtgtggtggaagcgacagaggctctgcgggagtacagaccatgtgagaaatgcacagacaaaataccgcatccgacaggaggactgctatttttcgtttcggaaaacggagaatgttatcacagccggcgggattgccccggattaaaacggacagtacaaaaaattcccaaagaggaagctttcaaatatgaagtgtgtagcagatgcaggggaaacaattcgaaagataggtaaaacaaaatggtattttgggtggaaaaaatcatatggagtgtttatctcggaaagataagcctgtgtgatattcggaaaagaacaattccggtatggctgctgtttttaggaagcttacttgtcataacagatatctgcataatgggctggaaaacagggattattgtagaaacggtaccggggataatattgcttctcctgacaaagatgacgcaagcaatcggcatggcggacggcattgtattgatccagttgggaagtatatgcagagatggacaggcattgcttatattttgtctgagccttatttatatatttctgtattctatgattctttatatgtttagacgggatcgaaaaaggcgtattccgtacattccttttttatttttggcttatttaaccacctggatgatataaaaccggaggaaatgtaattatgaaaaaagagtctgatgcgtattttacagtagaagctgcaattctttacccgataattctgtcagttattttattaatgacctatttgttgctttttcaatatgacagatgcctgttggaacaggatataggaaaagcgaccgttctcagcggaagtaagtggacactcacaaaagagcagctgaatgactatatgcagaagaaagcattgcattttgacgaggagaaatatattgcgtgggagaatgaggacccattgtggaatctggaaaaaaacgatgtcattcttgaaaaaacaggacgactcagatatccttttgccggtatgggaacgcaagaaaaatattggagtgccaaagcttcttttcaagtggataggatttcgccggtattttggctgagaagaagcagaaatgtacagaacaaaagggataatacggaagaaaataattaagaagggaaagtttagctatgataaatacagaatatattcgaagcctgaatgcaaactatgaaagaatggctctgggagaaaagccagaggaaaaaagatatcaatattgtatgatcagccggggaggaatcaagggattgctcccatgcagcctgcgatatattgatggaaatgcctatctgtattatgacattacatctagacagaatatagcacagctttttgataaaaaggtgataaacagacagtggctgactgattttttgtggagtatgagaagagtccgacaggaaatgtcccgctttttattggaggagagcaatatcgtatggtttccgaatcatatctatcaggatttggaaaagaatgatttctatttcatatacattccttattgcaggcaggagaccggttttcatgaattactggaatacctgatagaacatattgattaccaggatgaagaaatggtggaatatttgtataaggcatatgaacagtatgagacggccggagaagtgtatctgcagcagaaaatttatgaagatgcggaatgcctgcggatctccggaatcgatccgacagaacatacaaaagaggaaatgatacaacagaagacggaggatactttgccggcagaagaaaaaatagagaataaacgggaagaaaatcgaacgacaggtgagaaaaagagtttatttgcattatgggaaaaccgcaaaaagaaagagaaacaagaaagggaaaattatagcagaaatctgcaactgaccatgaacggatatgcggtagcagaggaaacggcatatgaagaggaagatatgggtcggactgtatatatgggagaacagtcggcaatgcgtgaaataaaacatcgattgttgacggaagaaggatcactgatcgcaacattggaccaagaagcttatacaataggcaagaaaaggggagaggcggatctggtactggaggatctgtcgatcagcagacttcatgccagaattgtaaaagaagaagacggatattatctggaagatatgaattctacgaatggaactttcaaaaacgggcttcgcatgcaaccttatgagaaaagaaaattggaagagggtgatgagataacctttggaaaaagtacattgatataccgttgatataagtatgacatccttttggttgacgcaatgccggaaacagtggtacattttagatattgatattaaggatgatcatttccggaggaacaggatagatgcaaaaaagacagaaccttcctattgtgtgcggaacacttgtggtaatcaatgttattgcgtatctgatatgtacttttacgggggatctgttatataatataggcgaactggacgcagtagctgtgttgcagtatggggagtatggaagaattttatcatccacctttttacatgcgggcatagagcatctttttaataatatggtaatcctgttttttctgggagcaatgatagaaaaagtaacagggcatttacagtttttgattctgtatttattatccgggatcggcgccaatatttgttctctgatttataaggtgatagcaatggaaagaattgcttcggtaggggcgagcggtgcgattttcggcttggacggagtgttgttggcatggattttactggatcggagatctatgccggatgttacacccaaacgagtaatactgatgatcgcgttatctctttataatggattcacggcgcagaacgtggacaatgcagcgcatgtgggcgggcttttgaccggtttcctggcaggggcattgctctgtatgataagaaagcaaaaaagaaatcgagaggtgtagacttgaatatcaatatctattacggaggacgggggattattgatgatcctaccatttatgtcatcaacaaaatgcaggaagtcctggaggagctgcgtgtacacgtggagcggtataacctctatgacggcaagaccaacattacaacattgccgcagacgctaaaagaagcagacggtattatcctggcaactacggtggaatggtacggtattggcggctatatgcagcaatttctggatgcttgctggctatatggtgataaggaagccattgccggtatttatatgtgtccggtagtaatgtctactacatatggagagagggaaggtaaactgaacctggctacggcatgggagatcctgggtggactgccctgcagtggaatctgcggatatatagagaatacagtgtctttggaaatgaatgagcagtatggccatattattgagaaaaaagcggagaacatgtatcgcaccatcaatcagaaactggccagttttccggccagtaataaggtgatgagacagaaaattacaattccgaaatccattaatcttacgccgcaggagacggagcagctgtcggagtatgtgtcggatgacagttatgtgcagaggcagaaagaggatattcaggagcttaccagcatgttccgtggaatgctggataataacggagcagatggtgaagaagaatatctcagtgaatttaagaaggcatttgttccacaaccgggttttgaagcaatttatactattataatagaagaaaagaaggcacctatgtggattgcagtgaatggaacctctgtggaatgcggctacggagaaaccgaaaaacacgatgttgagatgtctatgaaccgagctgcaatggaagatattataaatggaagaatgacttttcagagagcatttatgtccggcgttatgcagcgcatgaaaggggatttccgtattttgagaaccttggatcaggcatttccgtttgaggaaaaggatagataaacagataggagcgagaaagatgaaaaaagaggattgtattttctgtaaaattgcgaatggagatattccttccaaaacattgtacgaagacgaagatttcagagtaattctggaccttggaccggcaacaaagggtcatgctcttattttacccaaggagcatgcggataacttatatgaattgccggatgagacagcatcgaaagtatttgtccttgcgaagaagcttgcgataaaaatgaaggaaaaactgaactgcgacggcttgaatattgttcagaacaatggagaagcagctggacagacagtacagcattttcatatgcatctgattccccgctatgtgaatgacggacagaagattttatggacaccgggagagagcacaccggaagaactggaagaggttcgcagaacaattacagaataacatggtgagagtatgagaacagtagatgtgagcgttttaacgcaaaatatcagtgaaatgtgtatcgaggccaatcattatctgtcggaagatatgaagactgcttttaccgaggcacaaaatcgggaacaggctcctttaggcagacagattctgagtcagctacaggaaaatatggaaattgcagagaaagatatgattcctatctgccaggacaccggtatggccgtggtgtttttgaaagtaggtcaggacgttcattttgtaggtggaaatgtggaagatgctgtgaacgagggagttcgccgcggatacgtggatggatatctgcgtaaatcggtggtaagagatccgatttatcgtgaaaataccagggataatacaccggcaatcattcattacagtattattcccggagaccgcattactgtcactgttgcaccgaaaggttttggaagtgaaaatatgagccgggtgtttatgctgaagccggcggatggaatagaaggtgtgaaaaacgcaatccttactgccgtaaaggatgccggaccgaatgcttgtccgccgatggtggtgggagtgggtatcggcggcacttttgaaaaatgtgctttgctggcgaaggaggctctgaccagaccgattgataaacattctgagatcccttatgtaaaagaactggaggaagagatgctggagaagatcaacagaaccggcataggtcccggtggattgggagggacaacaacagcacttgcggtaaatattaacacatatgcaacccatattgccggattaccggttgcggtaaatatatgttgccatgtgaacagacacgcagtcagagaaatctgatatcccggatgacaaagcaatggagaaaacagtatggacagatacgtaaatgtaccacttagtgagaaagatgcccactcattaaaggcgggggattatgtatatttaacaggcacaatatatacggcaagagatgcagcgcacaagagaatgcaggagactctggacagaggagaagaacttccgctgaaaatggaaaataatgtgatctattatatgggaccgtctcctgccagagagggcagacaaataggatctgcaggaccgaccacagccagcagaatggataagtatgcaccgagacttcttgatcttggactgaaaggaatgatcggaaagggaaaaaggtcaaaggaagtagcggatgcgatcgttcgcaacggagctgtttattttgctgcagtaggaggcgcaggcgcattattgtcaaagtcaattacctcgtcggaagtgattgcttatggtgatctgggcacagaagctattcgtagattgacggtcaacaatttcccggtaatcgtagtcattgatgcacagggtaataatctatatgagacggcgacgaaggagtattgccgggagtgaggcaactggagataacatatgtacagaattatattaatggtagtaagacttttttataaagtaccgtattatctgatgcgtatctggtggttgggaacccggaagaacttcaatctggaagaaaactatgcatttattaaaaaagtaactaaggcagccaatcgggccggaagagtaaaaatagaaagctatgggctggaaaatattcccaaagaaaatggttttatttttttcccgaatcatcagggaatgtttgatgcgcttgtttttctggaatcctgtccggttcctttttctgtggtatataaaaaggaagtcagtaacgtaatactgttaaagcaggtatttaaggctttgcatgcaattgcaatagacagagaagacattaaacagtctcttcaggtaatcaatcagatgaccgaagaagtaaagaagggaagaaactttctgattttcccggaaggaaccagaagtcgcatggggaatcagctgcttccgtttaagggaggaacattcaaaagtgcggtcagggctaaatgccccattgttccttgtgctttgattgattcatacaaaccttttgatgaaaagtccatagccccggtaactgtaaaattgatttatctgaaaccaatctgctatgaagaatataaacaattaaagactccggaaattgcagatcttgtaaaatccaggattgaagaagctattaaagaatatttataaacaatatctacaattaataaaaaaagcaattgacaaacacatagaccttatgtataataatttttgcgtcacgaaatgacgccaataacatattggtagagacgattttcagattatggagaaatactcaagaggctgaagaggcgcccctgctaagggtgtaggtcgggcaaccggcgcgagggttcaaatccctctttctccgtttactaccaataggaagtaaaagaagaatcttaagagattgagatttctttttttacgccttttatgtcattgtaaatgctttgaaaaataaatgtaaaaagttgttgacaaagcaggaaacaatatggtagtatgaaaatccaccgcagaaacgaaggtttttcggttggaaaaaagatttgaaaaaatcaaaaaagttgttgacaaacgaaagcggtcatgataagatatcagagttgccgctgagaacaacagcaacgaagaatcactgatc

SEQ ID NO: 11300 - DNA, 4617 bp, Unknown
  gut microbiota DNA sequence
gctcgcgtaaactttcaatctacctaatcatttaaagccatctgttttaattttgagaacagattctgtaccggtttcacggacaggatcagtaatgttactgccgcttcagcgaagatatagatcgcattgtaggcgagggaatagggcaggggatcccagccttcccaggcatacgccccgaagaagatccatccggagatcacggcgaacacatatctacccagcacagcggtgatatatcccttcagcagtccgaatttcgcattggagaagagtccggacaatcccaaagcaccgaaagccaaaatgtaatcaacgatcaactgcatgggatacaatacatagggatcaatgagaagctgtaacacaccgtaagctactccggtggcgatacctgcacccagaccgaaccagtaaccgggcaggcagatcaccagcatggacagaagcgtaatggagccgccggtaggaaaatggaacagcttgatgttagacagcacggttccaagagcgattgccatagcgcaaaaagccaactgctttacggtcagcttactgtgagccattttctgatcaacgtcgtcagccccggtcttatttctctgcttacgggcaaatacaacagccacggccagcagagcgatcaggacaaccactaacagaacattgcccagagcagtggggacataagtagtctcgccccagtcattcacaacaacattgtacaacataaaaaaatcctccttcgtatgcgcgaggagggacaacatcgtatccatgcaaaaattacagccttgaacggcactcttataatgtacggttctcatacactgttatcagcagtgtatacgtagacaataactgcatgaaatctatgcttccttacgccggtattatccggttcaagtagtgagggttagaagtgatggcatagtcttgcaacacttcagtctcagcgatgtgctcccctagcggaatataatatttacctgtttactatagtgctttattgtgacagtgtcaagcttacagaaaagtttttaatacctgcagcacgccgttttcccaataaggcgcacaggttctctttgcggcagcgatcacttcctctcttgcgttggatacggcatagctggttccggcgctctcaagcatttctatatcattcagattgtctccgaaagtgcaggtttcatccggggcaatgccaagatattcctgtaaaaaccgaatagcggttcctttgttcacacctaacgggttacagtccatccattctttgccggaggaagcgattttagccttggtctgccaggtgggagtgaaaagcggggcacacatttcttcacatgccgaagggtgatatacagtgaatttgatcacgttgtccacaggtgcttttaacaggtccggtacttcacggatatcatatccgtaagaatccgtaagccatcggaacatgcggcttccggcatcttctgccagacaataatccggagtagcaataaaataatcacagtccggtaattcattgcgaaccgtttcacacattccatgccagacatcttcgggcagagtgtggacttttaaaattttgtgaggggtacggactaccgtgccgccgtccgtgatatagagaagcttatcgcaaacgggagcgaaaagctttcgttcactgatgaattgtcggccggagcaggcgacgaagatgatttcttttgaagtcagtttttcaattacggtcatatattccggatcgatcatcagcgtaccgtcttttagaagggtaccgtcgatgtcggttgcaattaatttaatcatagctcctcctgttaatggaaagatggaaagtatgctatgattatagcctacctataagaggatttgcaatgacaaccgcaagataaaacagttggaaaatcggcgaaaatatagtatcgtagatagtaaagatcagaaagcggtagaaacctaaggaaacagcagaaacttaagaaagtggtagaaacctaagaaaacagtaagaagcctgaagaagcagcaggaactggtcatagaagggttagcaataggaatgaagaaattaatcataggaattctggcacatgtggatgccggcaagacaacactggcagagagccttttatatacctgcggaacgatccgcaaggcaggaagagtggatcacggagatgcttttctggacaatggggacatggagaggaagagaggcattaccatcttctccaagcaggcgagaatccggtggaaagatgtggatatcactctgttagatacccctgggcatgtggatttttccgctgaaatggagaggacactgcaggtactggatgcagcaatccttgtgatcgatggcagtgacggcgtgcagggggatgtctacacactgtggagattattgaaaagatatgaggttccggtatttttattcgtaaataaaatggatcagccgggcaccgagcggggcaaaatactggccgaactgcaaagtaagctggatggcaatattgtaaccgttgaaaatatcatggcccaggatgaatccggagaggaccgtgagcaggaactggaacatgccgccatatgcagtgaagtactgatggaggaatacctggagaccggagacttgcagccggagagcatagcattcactgtggcgcagcggaagctgtttccctgcttttttggatccgcattaagacaggaaggcatagaaaagctgttggacgggctgtctttctatctgccggaaccggaatattcacaggagtttggagccagagtctataaaatcggcagagatacgtcggggaaccgtctgacgtatctgaaagtcaccggagggacgcttcgggtcaaaatgatgatcggtaatgagaaaagcggtgccggagaagagatctgggaggagaaggcagatcagctgcgcctgtacaatggaggaagctatgagaccgcagacagcgtgccggcgggagaagtctgtgcggtcacaggacttacgaagacatttgcaggacagggactgggctatgagtgcgagaatctggcaccggtgttggaaccggtattgacctacaggctgagttttcccccggatgtggatccggtgacagcgctcggaaagctcagacagctggaagaagaggagccgcagttacatgtattatggcaggaggaaaagcgggagatccatatgcaggtcatggggcaggtgcagatggagatcctgaaaaatatcctgtgggagcgtttcggactggaagcggaattcgatgcgggaagcattgtctataaggagacgctggcggaaccggtggaaggcatcgggcattttgaacccctgcgacattatgcagaagtacacctgctactggaaccgggtgagcggggcagcggcttgcaatttgcctctctgtgcagtgaggatatgctggatcggaactggcagagactgatcctgactcatttggaggaaaaaaggcatgtgggagtgctcaccggatcggagatcacagatcttcggatactgttgatcgccgggaaagcacatactaagcatacggaaggcggggatttccggcaggcgacttatcgcgccatccggcagggactgcgcagtggaaaaagtattctgcttgagccgtggttttcctatcgactggaagtgccgacagaaaatctcggcagggcaatgtcagatatcaccagaatgaacggacgattcgatccgcctgtgaccgaaggaaacaacagtgtactgatgggcagtgtaccggtggcaaccatgcgggattacgccagagaagtggcttcctataccaaaggacacggcagactgtcctgcagcctgcaggggtacgagccctgccataatccggaagaggtgatggcacagacggattacgatccggaggcggataccgccaaccctaccggttccgtattctgtgcccacggggccggtttccaggtgccctgggatcaggtgtcggaatacgcccatgtggagagcggctgggtaccggattcggaggaaaatgcagagtcgggggatgacgccttacagggaatgccggcagtgaacagacggcagggagctgtacgtcagacgggtggcggcacagagcgtatcatatcccaggaagagatcgaagagatcttccgcaggacctatggaaaaggggcagaagatccgcatagattccgcagatatcatacatcctccggcagtcgcagcaactacacggaaagtccggcagacagtatgcggacaccgaagaccaaagcaggccctcaggaaaaaccggaagaatatctgctggtggacggttataatattattttcgcatggccggagctgcgggagctggcacagatcaatttagacagcgccagggacaaactgatggatatattgtgcaactatcagggatatcagggatgccggctgattttggtctatgatgcttataaggtgaaaggaaatccgggatctgtgatgaaatatcataacatagaagtggtctatacgaaggaagcggagactgcagatcagtatattgagcgcaccacacatgagctgggagcaaa

SEQ ID NO: 11301 - DNA, 6385 bp, Unknown
  gut microbiota DNA sequence
gtcaatactgacaacaattgcgaagggaaagcgaatacgccggagacgacaaagtagtaaaccaaggtatcagaaacacaataatgaaatgcataaggagagtaaaaacatgttagagaaagtagcagctatcatcagagaacagttaaaccaggagaatgtagaaatcacggaggcaacccgtttcaaggaggatctggaagtggattccctggatctgtttgaactggtaatggcatttgaggaggaatacggagtgtccattccttccgaggaattggaaaatatggcaacagtaggtgatgttatcagatatattcaggagcaggcgtaaggaactgcaacagaatatgtaatataacgcagaacgacgagaaggatcagaaagacaatgagaacaaagatcacggaacttctacaaatcgaatatcctattttccagggcggcatggcatgggtggcggaacataagctggcggcagcggtatcgaatgccggaggcttaggcatcatcggtgccgcttccgctccgccggaggtcgtccgggaggaaatccgtaaatgtaaagagctgaccgacaagcccttcggcgtgaatatcatgctgctcaatcccaacgcagaggaagtagcgaagattgtcgtggaagaaggagtaaaagcggtaacgactggtgctggaaacccgggaaaattcatggaactgtggaagaatgccggagtgaaggtcatcccggtggtagccagtgtggctatggcgaagatgatggagcgtgccggagcggacgctgtggtggcggaaggcatggagagtggcggacatatcggttctaccacaaccatggcactggtgccgcaggtggtggatgcggtgtctatcccggtgatcgcagccggaggtatcgccgatggcagaggaatggcggcggcttttatgctgggagcggaaggtatccagatgggcacccggttcgtcgcatcaaaggaatccatcgtccatgaaaattataagaatcagatcatcaaggcaaaggatatcgattccgtggtcacgggaatgtctaccggacatccggtgcgttccctgcgcaaccagatgaccagagagtatctgaagttggaaaaggaaaatgcagacttcatggaactggaaaagctgacgttgggatctcttaggaaggcagtgcaggatggggataccgtaaatggaaccctgatggcgggacaaatcgcaggactgatccgcagagaacagacctgccgtgagattattgaagaaacagtgcagcaggctcaggagtgcatagcggcacaaggacagcataaataaaatatagcgacaggtaaccgctgacaacagatttcgaacagcgacaggcagcgtagttatatggaaaacggtgcattataaaaaatgtgctgtaacctaggagaataatagcatcacatagtaataggagatgacaaaatgagcaaaatcgcatatttattcccgggacagggatcccagtacataggaatgggaaaagaattccatgatacttacccggaagcacaggcggtatggaagctggcggacaaggtacttcagaatctgtactggcaggataagcgggaaaagcaggcggatagcggacatccgtactctatggagcagctgacctttgaagaaaatccttatatcaacattacggaatatacgcagatcgccatgctgaccatggaagtggctattctgaaagtattggaggcaaaaggactgaaagcagagatggcagcaggcttaagcctgggagaatatggggcgctggctgccgctggtgtgatggaattgccggatctgttccgtatcatccggatgcgtggtatctatatgcaggaggcctatccggaaggtggagccatgacagcagtattagggctggacggagatgctgtggcagcaatctgcgaacagacagcaaaagaaaccggcaaagtcgtttccgtggcaaattataactgcccgggacagatcgtgatcaccggagaggcagatgcagtagaggcggcatcagaagcgctgaaagaaacaggtgcaaaacgctgtatccccttaaaggtcagcggaccgttccactcagccctgttaaaaaatgcaggagaacaattggcagaagaactgaaaagcgtcaagctgtcaaccccttggattccttatgtatccaacgtaacagcggattatgtgacagatgcgtcacaggttgcggaactgctgaaacaacaggtatccagtcccgtacagttcacccagagcatagagcgcatgatcgcggatggcgtggacacttttatagagatcggcccggggaagacactcacaagcttcgtccgtaaaattgacagaaatgtcaaagtatacaatatcgagaaaccggaggatctggaccgggtgatggaggaactggcatgttgacagggaaaagcctgataggacaagttgctattgtcacaggggcatcacggggcattggaaaagcagttgcacaggcactggcagcagaaggagccacggtgatcattaattataacggctctgcagaggcggcggaagcggtggcggcggacatccgaagctgcggcggcatggcggaggctgcgaagtgcaatgttgcggattttgcagagagtgaagcctttgtaaaggcagtaacagagaaatacggcagagttgacatccttgtcaataacgccgggatcacgcgggacaatctgatcgtgcggatgacggaagaagaattcaatgctgtgctggacacgaatctaaagggcgcatttcacatgatccggcatctgacgaagacctttatgaagcagagatatgggaaaatcatcaatatctcttctgtcagtggcatcgtcgggaatgccgggcaggctaattattccgcatccaaggcggggctgatcggtctgacgaaaagtgtagcgagagaactggcatccaggaatgtcagtgtgaatgccgtggcacccggatttatccggacagatatgacagataagcttccggaggcggtacaggataatgcggtcggacagattccccttaagaaaatgggaagaccggaggatgtcgcacaggcggtactgttcctggcaggaaatgcctcggactatatcaccggccaggtactgtgcgtggacggcggtatggcaatgtaaaaataggtccgaaacagtaaagcagaatagaaaatatgtccgctaacggtacagcaggatagaaaataagtcaggacgcgagggagtatatcacgtatgggtaaaaatagaagagttgtaataacaggcatgggagccatcacaccgattggaaacagcgtagaggaattctggaatggtatcaaagagggcaagaccggattcggtccgataacctattttgatactgcggattaccgttgtaagctggcggcagaagtgaaggattttgatcccacacaatatatggacaaaaaatccgcccgcagaatggaacagttctgccagttcgccgtggcggctgccggacaggcgatcgcagatgcaggtcttattatggaacaggaagatccgtatatggtgggctgcagtgtgggaagcggcatcggaagcttacaggccatggagcgggaatatgaccgcctgaaggagaaaggccccggcagagtaggacccatgctggtgcctctgatgatctctaacatggcagcaggtaatgtcagcattgcctatgggctgaagggcaagagcctgaacgttgtgactgcctgtgcaaccggtacacattccatcggagaagcatatcgtacgatccagtacggtgatgcagacgtgatggtagccggaggaacggaaagttctattacacccatcggcattgccggattttccgcactgacagcattgtcgtttagtgaagatcctcagagagcttctatccccttcgataaagaccgcaatggtttcgttatgggagaaggctcggcggtagtggtactggaagagctggagcatgcaaagagacgcggagcgaagatctatgcggagctgatcggttatggctgttcttcggatgcttaccatattacatcccccgcggaggacggcagcggagcagccaccgccatgctgaatgccttaaaagacggcggtgtggcgccggaggagcttacttatattaatgcacacggaaccagcactcatcataatgacctgtttgagaccagagctatcaagctcgcatttggagaacatgcttatgatctgaagatcaattctaccaaatccatggtagggcatcttttaggagcagctggtgcagtggaattcgtcacctgcgtaaaagaaattcaggaaggctatatccatcgtaccgtgggactacgtgagacggaggaggaactggatctgaattactgtcgggacggctacgaagaagaggtgccttatgcactgaccaattcgttgggcttcggcggacataatgcgagtctgttgctaaagaagtacatggaataaccggaacggaggaatcatgtcagtatataacacacaggaaatcatggagatcctgccccacagacatccctttctgctgatcgatactatcgaggagctggagcccggtgttcgggcagtgggacgaaaaaatgtgacctttaacgaaccgtattttgccgggcattttccggggaatccggtgatgcccggagtactgatcctggaggcacttgcacagacaggtgcggtggcaattttgtctctgccggagaaccgtggcaagacagcttattttgcagggattgacaaggcaaaattcaaacagatggtgcgtcccggagacaccttggaactggagaccaccattatccgcagcaagggaccgataggtgtcggggaagcgatcgccacggtaaacggaaaactggcggcgaaagcagaacttacctttgcagtaaaataaaaatagtctgcggaagttttttatgagtgggacagagagataagagtgacgcagaataagaggtgcaagtatgggaaatgtaacgatagaaacagagatcaaatgcccgaaatgtaagaaaatgataaacagagaccgggcagcgaaaaataaatatgtctgttacgaatgtggttattatttccgggtgaagacccacaaccggattcgcatggtggcagaccggaaaagctttcagccttggttcgaggagatagaagagagcaatccactgaaatatgagggctatgaagaaaaactgtcggaggccagggaaaagtccggcgtgaaagaagctgtgaccgtaggtgaatgcgagatttacggggaaaaggctgtgatcggcatctgcgaatccaaatttatgatgggaagcatggggcatgtggtcggcgagaaagtcacccgggcaattgaaaaggcgacagaattgcggctgcctgtatttttgttctgctgttccggcggtgcgagaatgcaggagggaattgtgtcgctgatgcagatggcaaagacctccgcagcgatcaaacggcatggagaagcaggacttctctatgcgactattttgacggatcccaccacaggtggcgtaacggccagctttgccatgctgggagatgtgatcatggcggaaccgggagccttgatcggcttcgcaggaccgagagtcattaagcagaccttgggacagcgtctccctgacggcttccagacagcggaatttttacaggagcatggttttgtggacggtatcgtccgccgggagaatctgaagaagaccttatatttcctgatcacgacgcatcggtgcagtgaggggaattatgcagattttaagaaaaatattgacttccattttgaacctacggagattgtgaaggaacggtcattcctgacactccccagaacggcatgggaaaaggtcaagaccgtccggagagtggacagaccggcagcgaccgactatattccctacattttcgattatgtagtggaagctcacggagaccgttattatggggatgataaagcactggtaggtgcggtggcattcctggacgggcagccgatgacagtgctggcagatgtgaagggcaaggattttgcggagtgtgccagacgcaattacggtatgcccatgccggaggggtatcgtaaggcactgcgcctgatgaaacaggcggagaaattcaacagacccattatcagctttgtaaatacgccgggagctttctgcggcgtggaggcagaggagagaggccagggcgaggccattgcccggaatctgctggagatgtcagccttaaaagtaccggtattatgtatccttatcggagaaggcggcagcggtggggc

SEQ ID NO: 11302 - DNA, 17403 bp, Unknown
  gut microbiota DNA sequence
ctgtttctgttttgactttgcatggctcgtaactctcaatttaatatacaattttacaattttgtaaatagtaaacggtttgacagaagggggagaaacgcttacaattcaagtagttatacaggctgtggcacaaaggagacgggcaggaatggagaatcggcgagaggaatttctgaaaacagtatgtcagatctatatggctgccgttctggtcgtgttgccgctgtactatattcccggaaatggatatgacaaattgggcgatagcaaatattatttatatcgcaatatctctctgatctgtatggggatttgtctggcggtacagatcatcgctgtggtaagaagctgccggatggaaaacagcagtagttccggtatgtatatgagaaaaaccgggggaaaaataatcagatggtgcagagagcatagtgttgtgacggccgtctgcttatatggattttgcgcattattgtctgccatttgtagttcttacggaaggaccgcctgggccggagaacgggaatggtacatgggcgctgtcaccatctgcctgatggtaggcggatttctgatggcagcggattacagcggacaatgcatccggattttatatctgggagaagcagcgtctgtcatagtggcactcataggattgttccaaaaattgggttatgatcctctgggactgctgaagggctatgtggtaggggactgggaatatacacatatgctcagtactttgggaaataataactggctcagcgggtattacagtgtgatgattcctctgtcactgtcacttttttgtaaggctgcggaagaggggagaagagctgcttccattttgcttggaggcggtaatgtccttgtggtgatgttgttgtttttacagggaagtgacggcggtgtgatggtggcatgtgtaacactgtggatatgtttttggagcagtcgtaaaaaaaacggactttgggagccgttgcttgtcctgttgtccggagcctgcgttggaatgttattgtggggaaaggtgatgcaatcccggggaacctatgatattttattacaggatggtattgcaagaaaaatggcagtatggcagggatggtttctgcttgcagtagtgtgtctgttattctgtgggatacattatgctcttccggaaaagaaaaagagggcgctacagatcggagcactgtgcggcagtctgttgttggctgcgggtgtgataatatggtatattttgaaactgcagggcagcgattttgtggaatggggcaatcgccggggaatgttatggcagatggcatggcagggtttctgccggggagatcttaagcagaagctgctgggggccggaccggattgctttgcaggttatttggaacaggtgttaccgggaggcacggtactatttgacaaaggttattttgccggttcgatttttacgaatgcacacaatgaatggcttaccacgttgatcaacctgggggtactgggaactgctgcttatgtagccgtatttcttaccgcattgcggaaataccgcagaaattccatggcgatcatgttgctttttacttatggaatgcattccctgatcagttttcagcaggtattgaatacccctttcttttttctgttgctgggggtatgcgaagctgaacagcgcatgaatcagcaatataatacagatacacatgaggagtctatagaagtcggatgaaaaatatttggaaaattttcacaaaagatgtcaaacaattagtgaagcagccttttgcactgatcataattattggattgtgcgtgatcccatcactgtatgcctggtttaatatttttgccaactgggatccttatgccaataccggcgggattcccgtagcagtggtgtcattggatcaggactatacgttaaaggacggttccgtggtaaatatgggagaatccgttctggagagtctgcattctaataccagtgtaaaatggatttttccggacacagaggaagaagcagaagagggtgtggaagcaggaaaatattatgctgctattgtgatcaccgataagtttacatacagtatgtataatgcattttcggatgatttcgagaatccggcgctgatctattatcagaatcaaaagagcaatgccattgctacgaagatcacggatacggtagcgggaacgttacagaacaccattaacgagacatttataaaagtggcagccactaccatttttgaagagagcaattccgtatcagtgcaggtgcagggcggcagttacgtggatgaattccgtgcggatctcgcagaacttaacgacaatctgaaagaatacagcgcgatgatcgactctttccgtgcgggaaatacccgactggaagctgcaatcacccatgtaaattatgaaatcccggcaatgcagaagaaactggatgcgacgactgccagcctgaaccagagcagtcagaatctgtcttcgacccgggacacgctggctgatttcagcaataatattgatacttccatggcaaatatcaacaattccctggaaaatatgaaaaagacgctggatgccagtaaactggcggatgatacagcgcagatgaccaaagatctgaacaaagtggcgagggataccaataccctgaacggacaggtgaatgatctgctggcagtactgttgcagcagaaattacagggcagcgtctccggaggggatgcttctgtctccggaggcaacgcaggtgccggcggcaatggaggaagtgcggcttctgacgcggccattgaggcactgaaggcaatgcagaaggaactggatatgatgaacaccgtggtgggcagtgtgctggaagctacagatgagcaggcggcggagaaggcaaaagtcaatgtcaacaatgccatgaataacctgaagagcgttatcgacagctgcgaaaataatgtaagcaatatgcagggcatttataaaaataacctggtaccgcagatgcagagagtactgaccaatatgacagattccctgaatcaggtgaccggactggtaaatactctgagtaacacggtgaaaaatgtgggtgtggtcatggaaggcgtaggcgacgcagtggacggcaccagtgaaagccttggccagattcagagcgtggtagacagcatcagcgacaaactgacagacctgacggaacagctggagggtgcttccgaagaagaaatgatggatattctggtgcgtttcctgggcggtgacccggatagcctgggagcttattttgcatctccggtgaccatggagactgttgctatgtatcctgtggccacctacggatccgctatgactccgttttattctacactggccatctgggtagggtctacgatactggtggcactggtgaaagtaaaagcctctccgaaaggattggaaaatgcacagagttatcagttgtatttcggcagatatctgttgtttttcctgctggcacagattcaggcagctattatcgtagcgggagatctgtggctgctgaaggtcaatattgtggagccggcattgtttttcctggcggcaagctttacggcaactgcattttccctgttgatctattcgctgacactggcattcggagatgtgggtaaggctgtctgcgtcattgtcatggtattgcagatcgcgggatccagcggcacgttcccgattgaactgttgccggatacttatcagaaaatatatatctttttcccattcccctatgccattacggcaatgcgtgaggcgctggcgggaatgtacggaacggcctatatggaagcattggcaaagctgatcctgtttatgctggagggcctgctgatcggcctggtgatccggatccctttcgtcaaactgaatcactttgtggaagagagaatggaagacacggaactcatgtgatgcctatccggagccatgtaaacattgcaaaaggaaagctccgcaggagcggttttgcgaatgaagtactgaataggcagaaagtaaggcagaaaataagacagaaagtaggacagaaaggaaatttcatggaaagagactacgaagagatttttcagaaggtgttggactatgagcagacccttcatgaaaaaaacagaaaaagaatcaagatcggtctgaagtgcatctggatcgtgcccctgtttttcctggcattgttgttcctgaccggcagcaataaagtgatcttcctgatcctgtggatcgtgtcactgttcgccctgtcgatctatctgatcgttgtggaatatatggatcataacttgcaggaaaagatcatggaactaaagggggaagagggaacgatcgaagcagtaacccctgcggattttgacagagcggcacagatcatccgcaagacccgggaaatgatcggtgagggactgaactccccggcggagacacaggcagaagtgacagagaaaaaagacgaagcagaagaaataaaagaaacagaagaaatacaagaaacagaagacggggaggaaggcgagtaatatgcgtaacatctggaaaatatttaccaccgacatccgtcggatcagcaataatgtggtggcagttgttattattatgggactgagtattctcccggcactgtatgcatggttcaatattttctccaactgggatccctatgaacctgcagctaccagtcagctgaaggtggcggtggcttccgatgatgccggagcggagatcatgggactttccctgaatgtaggagacagtgtgctggaggctttgggggccaataccaccatcgggtgggtattcccggggactaccgaagaaaccctggaaggagttaagaacagtgattactatgcggcattgatcattccggagaacttcacacaggagatgttgggattcctggacggagaagtggatcatcctaccatttactattatgaaaacgagaaaaagaacggtatcgcacccaagattaccggaaaagcgaaaaatgccgtgcaggagcaggtgaatgccacatttgtcagcaccgtggcagaagctgtcatgaaagccggaaatggactgtccatggcgaatgcaagcggacaggccagtgtgacaggttcactggattccgtacaggcacagctgcaggattatgtggtaatgctgcagtccttccagagtattatgagttctgcggagatgatcatggccaccagccggaatatgcttccggatatggacaatatactggagaacggacgaaataccatgatcggtatgcagaccatgatcaattccagcgtagatgcagtggatgttatgggggatatggtgagcagcagtatggacatggtgacggaagcgttgcaatatctgtctgtgttctcggatgggttgctggatcagatgggcagtaacaatatcggaagtactaccgataccggactgggaatggcgatcggtctggtacagggaatgcaggccaacatggatgtgctgggaagcctggtcaccggacaggatgcgcagattcaggcgatcaaccagtctctgaaaaatatcgaggcggatttaaaacagctgcagaacagcaagggtcaggtagacacggatgtgaatacgctgcgggcacagatccgggaacagattcagatctgcaataagcagctgaacaacctgatgaatgattacaataataatgtcagaccttcttttcggaataccggaaaatctatgcaacaggcttttttaaatgccgcggccatgatgaacggaacggatgtgaatatggatgaaatctcggatattcttggagaatatgagcagaccatccgggaaggcaatttaagcctgcaggattccctgacaattgcacaggaactgctggacaaggtaagtaaaatagcggataatataaaacggatcaccggagcggattcttatgaagatattctgaaagccatggccagcgatccgacttccgtggcggaattcgtatcatctccggtgaagcttcagacggtaccggtctatccggtggagcactacggatccgcggcatcgccgttttacacgatcctggcgatctgggtgggagcactgtttttagtggctatcatccatgtgggtgtgaaacctattgctcccggagatcattacaaagaatatgaaagatactttggcagatatctgctgtttttccttatcggacaggcacagacactgctgacgatcctgggcaatctctactacattgagatccagtgtcagcacaagttcctgtactggctggcagcagctgtggcaagtgcggcgttcagctgtttcatgtattccgtgacgtttgctttcggcaatgtgggagaagcactggccatcgtggtcatggtcattcaggtagcgggaagcggaggaaccttccccatcgaggcgctgccgaaggtgtttcagtggatctatcctttcctgccgttccagtttggcatgaaagcgtttaaagaatgtattgcaggaatgtacggtgtggattactggatcaatgtgggcaaaatggtactgttcctgatcatcgcattattactgggactggcactggaaccgccattccgcaaattgaaccacaggatcgagaagagcaaggaaaagacagggctgatgatataatgagcctcaaggaaaaccaagcggctgcgaagcagacatttggttttctgggctcattagcgaacgaataatcctgcgaagcaggatgtagagtgcgaaagcacgaattcgtgagcttatgatataatgagcgcaagtgagccaatatgcttgcataattggcgaacggcgaatttgatcatgatcgttgcgaagcaacggtaagcaccgtaggtgcgaatcatgatataatgagtgcgagaaaggaatcacaatatgaagtgggtgaaattcagaataaagaccgtgacagatgcggaagatattattatcagtaccctgtatgatctgggactggagggtgcacagatcgaggacaaggtgcctctgactgcgatggagaaggagcagatgttcgtggacatcctgccggacggaccggaggatgatggcattgcatacttaagcttttttgtagaggaaaaagaagacggcagtctggaagtagctggtgagaagactaccactgaggcagtgcttgccgatgtgaagcaggaattggaagatttacgtcagtttatggatattggagaaggttccgtcgtcgtggatgagacggaggacattgactggatcaataactggaagcagtatttccatcagttctatattgatgacatcctggtcatcccttcctgggaaaatatcaagcctgaggataccgataaaatggtgctccatatcgatcccggcacggcgttcggtaccgggatgcatgagactacacagctgtgtatccgtcagctgcgcaagttcattaccccagagacggagcttctggacgtaggaaccggcagtggtattctggcaattttatctctgatgttcggcgcaaaacatgctgtgggaaccgacctggatatctgtgcagtggaagctgtggcacagaactgtgaagtgaacggcattgatccggcacaatttgacatgatgatcggcaacatcattaccgataaagaagtacaggacaaagtggggtatgagtgttatgatatcgtggtagccaatatcctggcagatgtgctggtgccactgactcccgtgatcgtacatcaattgaaaaaaggcggtatctacattacctccggaattattgatgacaaggagcagactgtggtagaggcagtgaaggcagcaggcctggaagtactggaagtcacttatcagggagaatgggtcagtgtgaccgcaagaaaaaattagaggatttttaacaatgtatcagttttttgtagagccggatcagatcgatgtggcgggaaaaagcgtcatcatccgggggaacgatgtgaatcatatcaaaaatgtactgcgtatgcgtcccggtgaggaagtggcggtcagcaacggaatcgacggcagggaataccgttgcgggatcctggcgttggaggaagactgtgttcgtctggaactacgttttatcaaggaagatggtgtggagcttcccgcaaagatctacctgttccaggggctgcccaaggcggataaaatggaactcattattcaaaaagcagtggaactgggagcttttcaggtgattcctgtagcaatgaaacgctgcgtggtgaaattggatgagaaaaaagcggacagcaaaataaagcgctggcagggaattgcggaagcagccgccaagcagagcaaacgaggtgtgatcccgacggtggcacctgtaatgagctatgcacaggcagtgaaaatggcatcagaaatggatctgaagctggtgccctacgaactggcagaggggatggaacagacgaaacagctgatcgaaagtgtaaagccgggtcagcggatcgctattttcatcggtccggagggcggctttgatccagaggagatccggaccgccacagaggccggaatccaccccattacgctgggcaagaggattcttcgcacagagacagccggatttacgactatcgcatggctgatgtatcagttggaaaattagcggatgggcggcacagagtatctgcctttgacatattttaatcataagaagaatatagtaactattcagagtaaacggaaagttttgaaagaacgatccggcgaatggactttgagtagctgctacacagatagatagcaaggagaagaagagaatggaagtctatttggacaattccgctacgaccagaacttttccggaagtagccgaattgatgacgaagatcatgtgtgaagattacggaaatccctccagcctgcatatgaagggagtggaggcggagaagtacctccgctatgccaaggagactctggcgcggatactgaaggtggaggagagagagcttttatttacttccgggggaacagaatccgataatatggcgttgatcggctgcgctctggcgaattgccgtagaggcaatcatctgatcacgacgcagatcgaacatcctgctatcctgcagaccatgcgttatctggagagtcaggggtatcgcgtcacttatctgccggtggatccctgcggacgtatccggctggaagacttaaggaaagctatgacaccagagaccatcctggtatctatcatgcacacgaataacgagatcggagccctgcagcccatagaagaagcaggggcattgatcaaacggatgaacccggatacgctgttccatgtggatgcggtacagggattcggcaaatccaggatctatccgaaaaagatgcacatcgacctattgtcggtcagcggacacaagatccatggaccgaagggtgtcggacttttatatgtgggagacaaggtcaagatccaacccattgtattcggaggcggacagcagcagaatcttcgttccggtacggaaaatgtaccggggattgcaggactggcaaaagcagcggaaatgctgtacagtcgtttcgatgaggatcatgcgagactctgtgcctgcaagagacgatttatcgagggcgtaagagaactggatcaggtgacggtcaacggacttctgccggatgcaccgtacggtgagggaacggcggcacacattgtcagcgtatcttttgccggcgtcagaagtgaagtgctcctgcatgcactggaggacaagggaatctatgtatcggcgggaagtgcctgctccgcacacaaaccgcagccttccgctacactgaaagccatcggtgtcgacaaatccctgctggattccaccataagattcagcttttccgtatttaccacggaagaagagattgacgtatgcttacgggcattgtacaatatagtacctatgttacgcagatatagccgtagataaaacaagaaaggaaaagaacgtgtttacatcatttttgataaaatatgccgagatcggtattaagggaaaaaaccgttatttgttcgaggatgctctggtacgccagatcaaatacgcattgaaaaaatgtgaaggagaattcctggtgcacaagacgcagggacgtattttcgtggatgcagagtcggaattcgactatgatgaagtggtagcgcacctgcagagagtcttcggcatttccgggatctgtccggtggtgcacgtacaggatgagggcttcgagaagctgtgtgagaccgtgatcgattacattgcaaaggtatatccggactgtaaccagacgttcaaggtggcagcgagacgtgcccggaaaaattaccccaaggattccatgactatcaacatggatatgggagaagctatcctgaaggcttatcccaatatgaaggtggatgtacatcatcccgatatcatgctgaacattgagatccgtgaagaaatctatatctattccgtgatcctgcccggtcccggaggaatgcccgtaggtaccggcggcaagggaatgctgcttctctccggaggtattgattctcccgtagccggttatatgatcgccaagagaggcgtcaagatcgatgcagtatatttccatgcaccgccttacaccagcgagcgtgcgaagcagaaagtagtggatctggcgaagatcgttgcccgttataccggaccgatctacctgcatgtgatcaactttaccgatattcagttatatatttacgagaaatgtccgcatgaggaactgaccatcatcatgcgccgttatatgatgcggatcgcggaacagatcgcgaaagagacggaatgtctgggtctgatcaccggagagagtatagggcaggtggcatcccagaccatgaactctctcattgctaccaatgaagtgtgtgaactgccggtatatcgtcccctgatcggatttgacaagcaggagatcgtagaagtatccgagaagatcggcacttacgagacttccattctgccttatgaagattgttgtaccatcttcgtggcaaaacatcccgtgacgaagccgaatgtaaaggtgatccgcagacatgaacacaatctggatgagaagatcgacgaactggtgaagacggcattagagaccaaagaactgatcattgcggaagcataagtgcgaatgcagagtaactattcagaaccggggaaacagaggtactgaatagttacttttttggaatggcatataaaaaacacctcaagaggattgcgtctctcaaggtgttctctgttttactatgtattcggacttccgaatcggtaacttataccagataaggctttaatacttccagaacctcatcagcgccatcctctgcatggatgttcaggtcgataggcttggaaagatccagactgaagatacccatgatggactttgcatcaattacgtatctgccggatacaagatcgaaatcataatcgaacttagtaatatcgtttacgaaagattttaccttatcaatagaatttaaagaaatctgaactgtcttcatgttgactacctccttaatgtgtgtcataccttctgacttcatattaatggctgaacgaccaaaagtcaagacgaaaacaatacaaaaaaagtgaggaatcctatgaaaagtgtagcattacacaaccttggatgtaaggttaattcctatgaaatagaagtaatgcaacaaatgttacaagaaaaaggttatactattgtaccatttgatgaaatcgcggatatttacattgtaaatacctgcacagttaccaatattgcagaccggaaaagccgacagatgcttcatcgtgcgaagcagaaaaatccggcggcactggtagtggcagtgggttgctatgtgcagaccggaagggaagatgtggagcaggatccctgcattgatctggcgatcggcaacaaccgcaagaaggatctggcctccattctggaggaatatttacgggatctggaacaggaagatgcggtggcggagaatgcagaaaatgccggacatggtgtggacaagactatgcatgacactactgtcatagatattaaccataccgcagaatacgaagaaatgactctgaaacagacggcggagcacacccgtgcctatattaaaattcaggacggatgcaatcagttctgctcttactgtgtcatcccctatgccagaggcagagtccgcagccgcagggcggaagatatcatccgggagatcaccggtatggcgaagaacggttaccgggagatcgtactgacaggtatccatatcagttcttatggcattgatttcgatgaggaagcctggaagtggggagaaagtgtctccgtattaaaagaagacgaggagagaagagattattccggcagcagcaagctgatcgatctgctggaacggatccacgacattgaaggcattgagcggatccgcatcggttccctggaaccccgcatcgtcacagaggagaccgcagcaaaaatggcggcactgccgaaactgtgtcctcatttccatctgtccttacagagcggctgtgatgccacactgcgccgtatgaaccgtaagtacacttccgaagaatatgcggaaagcgtagcactgctccgcaaggtgtttgatcatcctgccattactacggatgtcatcgttggattccctggggagaccgaggaagagtttacgcagacaaaggaatttttagacaggattcaattcttcgagatgcatattttcaagtattccaagcgggcaggtaccagagcggccgtgatgtctcaccaggtgccggatcccgtgaaaaccacaagaagcggagaacttctggctatggagaaagagcagtcgaagcgattccgtgcgcattatctgggcagggaagcggaggtgctgctggaggagataaaggagctggacggagtggaatatctactgggacatacaagagattatgtgaaagtagcggttcccctggcagagaacggcgaaaaagcggtgaccaataccgtagtgcgcggcacggtggaaggatttgtaaatgatgagattctgttgttatcaccccttgaattttcaaagtaaatgcggtaatataaggcataacggaaagatttgccctatggcagaaaaagaggatcgtatgcaggacttaggaaatacacaatacttcaaggtagagacagaacctgagaccggcgtaaagctggtgctctctaccgtatatgaggcactgacagagaagggatataaccctgtgaatcagattgttggttatattatgagtggagaccccacgtatattaccagccataagaatgcccgcagcctgatcatgaaggtggagcgggatgaattggtagaagaactgctcacggagtatatcaggaccaaacactggaaataatcacaactatcaggaggacccacatgcgtatcatgggtttggatttcggctcacgtaccgtgggcgtggcgatcagcgacagtctgctcttaactgcgcagggagtagagatcattcgccgcaaagaagaaaataaattacgacagacgctggcccggatcgaggaactgatcgtcgagaacgaagtggacgagattgtgctgggacttcccaagaacatgaacgataccgagggtgtccgcgtggaactgaccaaagagttcaaggagaagctggaacgcaggactggtctgcccgtgtacttctgggatgagagactgactaccgtagctgcggacaaggcaatgatggaagcggggattcgtcgcgagaaccgcaaggattacgtggatatgatcgcagcaaccctgatcctgcagggatatctggatcgcaggaacaatgagaagaaaaaggaatcagaatgagtaaattggaaaagatcacatttcgcccggagggcgaagaacctgtagaattttatgtactggaacagaccaggatcggtggacacaattacatcctggtaaccgatgtagaagagggagacggagatgccctgatcctgaaggatatgtctcaggatggtgaagaagagagcatttatgatgtagtctccgatgatgaagaactggaagcggtatccggagtatttgcggatatgctggaggacattgatttaatttaattttagataaatacaggcggtcctgcgagaaggacggtcttatatttatatatgatttgtatgattggcagagagggatattggaggctttgccgatttcgacatataatggattttatgccaaaagtgacagggaatacacgaagggcatgagaaaaaaccgttattttgatgaaatcgtaagatctgggatatctgattttcacgggagttttcgagaagagagccgtgaaaacgggaggtaaatcacaggtctttctttgcagagcataacaatccattctaacgccgggatacatacactaagaacagttgtatagacgtatagagtttggaggtaatttcgttgaaaaagaaaaaagagaatagtaacgcttcaggcctgaagatcattcctttgggcggtctggagcagatcggtatgaacattactgccttccagtatgaggacagtattattgtggtggattgcggactgtctttccctgcggatgatatgctgggaatcgatctggtcattcccgatgtaacatatctgaaggataatatcgataaggtaaagggatttgtcatcactcatggacatgaggatcatatcggagcactgccctatgtgctgcgtgatatcaatgtgcccatctacgcaacccgtctgaccatggggatcattgagaacaagctgacagagcataatctcatgaagaagaccaaacgcaaagtggtgaagttcggtcagtccatcaatctgggtgatttccgtgtggaattcatcaagacgaatcacagcatcgtagatgccgcagcactggcaatttattcccctgccggtatcgtggtacacaccggagacttcaaggtagactatactccggtctatggagatgccattgatttacagcgttttgccgaaatcggtaaaaagggtgtactggcactgatgtgcgattccaccaatgccgagcgtccaggttttaccccttccgagaagaccgtaggtaagacgtttgatactttatttgaagaacataaaaataccagaatttttgtggcgactttcgcatccaatgtggatcgtgtacagcagatcatcaacacagcctataaatttggccgtaaagtagctgtggaaggccgcagtatggtgaatattctggataccgcaatcaagctggagtgcattaatattcccgaaaacactctggtggatctggatcagatgaaaaattatcccgatgagcagcaggtgatcatcaccaccggaagccagggcgagagtatggcagccctgtcccgtatggccaacaacatgcaccgcaagatcaccatcggcgcgggagatacggttattttctcctccaacccgatcccgggaaatgagaagtcggttaccaagatcatcaatgaattgcttcgcaagggcgcagatgttatttttcaggatgcccatgtatccggacacgcctgtcaggaagagatcaagctgatctacacgctgatccatccgaagtatgcggtgcccgtgcatggtgaatataaacacctgaaagcacaggcaaagatcgcagagagccttggtatcagcaaggacaatattttcatcctctcttccggagatgtactggaagtcagcgaggaacaggcgaaagttgccggaagagtacccgtcggtgcgatcctggtagacggactgggtgtcggtgatgtaggaaatgtggtcctcagagatagacagcacctggcagaagatggtattatgatcgtggttatgagtctggatagggccagtggtgagctggtagccggtccggatatcgtatccagaggttttgtatatgtgaaggaatccgatgaactgatcgaggaagcacgccgcactgtggatgatgcactgcaggcatgcctggataagggaattacggattggggcaagctgaagaccaccaccaaggatgttctcagtgattatgtgtggaagaagaccaagagacgtcccatgatccttcccatcatcatggaagtgtagcaggttaatgatagccggaaaggtcataagcagatgaagattacatcggacgaaaatgtgaatcaggccgtagaacagatggtacaggcgatccgcaatacggatgcgtacatggagtatcgcagacaactgggtcgtataaaggagcagccggaattaaaaaagcagatcgatgacttccggacaaggaactttgaattacagaccagcaaagataccaatttcgacaagatcgatcagttcaccagagagaatgaagcatttcgcgagaatccgctggtgtctgatttccttgctgcggaactggccttctgccgtatgatgcaggagatcggactctatgtcaccgatcagatgaagttcgagtaagaaagggcataagatatgaagacagcaaatttggcgggtgccgtattgggcacgatcttaaaagtagtatttgtggtggttgtagtatatctggtctacacgggagcatccacctgctatgactacggttatcgtattttcacagaaccggcggtctctgccggagagggacgtaagatcacagtaaccctgacctcggacatgtccgcaacggagatcggcacaatgatgcaggaaaagggcctgacacgtgacggcagactgttcgcattacagtatctcttatctgagtataaaaaggattggaaacccggaacttatgaactgagtactgctatgaccgcagaggaaatgatggaagtcatggctggacagacggaaagtacggaagaagaatccgttgagaccatagataacggcagcgcactgaccggcgagacacaaccgctggaaaccgttgcacaataaaaacggacaatagaaacggggagtattatgatcatagacgagagaatgtccgcatttatcgattctctggacagcgggaatcccgcatggctgaatgaaattgaaaaatatgcgctggacacgcaggttccgatcatacgcagatctatgcaaagcctgttaaaatttttactgacatacacaaagccgaagagcatcctggaagttgggactgctatcggcttttctgcgttacttatgagtgaatatgcgccggcggattgtcctatcacaacgatagaaaaatacgaaaaaaggattcccatagcaaaagataatttccggaaagcaggaag

SEQ ID NO: 11303 - DNA, 40059 bp, Unknown
  gut microbiota DNA sequence
ggagggtgttgatattttcttgaaaagtgctgaaagacagggtggagcgaacaggacgttcgcgacaggcggacgttgccatggatggcaactggagccgtgcccgtacggattagaaccgctatatcacttttcgtagaaaattcacacctggagacgcgacatcaaggcgtgatgttccgttcgccgcgggcgttcgtggggtctacggcaaccctacgttacgagccatgcacccaattcataaatgtgtcgcaaagggcgctccacatttatttcattgacggctgtcgccgtataaagtcaaaaacaaaaacagcgacttgtgagcaagctcccagatcgctgtttctgttttgactttgcatggctcgtaactctcaatttagttaccgcattctacactgatcttattgaagattcccataatctcttccgtgttaatgctctttttctcttcgccagccttatccaggatagcttttccttcatgcatcatgatcaggcggttgccgtactctacggcatagcggaggttatgagtgaccataatggtggtcactttcttctctttcacgacctggtcggtgagttccatgatgatctccgcagtcttgggatccagtgctgcggtatgctcatccaggatcaggaaatcaatcggtgtcatggtcgccatgagcagtgccagcgcctgtctctgtcctcctgagagggaaccgacctgcacacccatcttatcctccagacctaaattcagaggtcgtaacatctcacgataagtttccagttttgccttatttacaccacgtcccagattatacggcttgcccttattctccgcaatggacatgttctccaggattgtcatgctgggacaggtccctttggagggatcctgatacactctgccaatccggcgctgacggatataatccttctgttttgtaatatcttctccgtggatcagtatcctgccgctgtccaccgcaatacttccgcagatgatattcagcatggaagtcttaccggaaccgttacttcctacgacagatacgaattctccgtcctttacggtaagattgaaatccttgaacagacacagctcgttgaccgagccgggattgtaatttttattgatattgataagctctagcatgctttcaccttctttctgtccatgctgatcacgagaatgatcaggaacaggactgctgtgatcagcttgatggcgttggggctgatgcctgcgaacatggcaactgccacacatgccttatacaaaatggatcctaccactacgctgctggtcacacggaagaatgttaccttcttgaacaggctggtgccgatgataacactggcaagaccaatgactaccgcaccggttccgatagagatttcaaagcttctctgctgctgtgcatagatgcagccgcttaaggataccaggccgttggcaatagacagacccacgatcttcaccagtcctttgtccacgccgaggctggtaacgatggtatcattgtcacctacggcacgaagtaaaaatccggacttggtgctcatgtaccagtctaacagatattttgctaccatggtgatcaggaaaataatgatcacatttttgaaatttaccaaaaagcccggggtaatactgttcacaaagctgttgttgaaaatattatccttatcaaaaatagctacatagccggagccggccacccacagattgatagtatacagaccggtcatcataatgataccggaaagcaggtctcttactttcaacttcacatggatcaatccggtacagattcccaccagtgctccgcctaagaatgcaatgggaagggtgaggattgccgggacgccgaaaccgttgatcagacgcacagtgatggcagccccaaaggggaagctgccatcgaccgtaagatccgggaaatccagtattttataggtaatgtagacacccagtgccaggatgccgtagatcattccttgttccagtacgcttaataataacgccatatttttctccattcttaaaatcctgtatatccggattactctattattttctgcctgtcggcagctatttcctgattactgtaccacgatctcatcaaaggactggtaagcatcagtcttgtagttctcaggtaattccagaccgatcttctctgctgctgcgaagttcacatacaggctgggctcggagatcacttcgaagttcagttcagaagcctttgcctctcccttcaggactttcgctgccatcttaccggtctgcttgccaagctcgatatattccagacccatggatgccacgcagcctgccttaacctgctctacctcagaaccgaataccgggatgcctgctttattagcttcatccagtacggtctgcaatgcacttactacggtattgtcggtcaggttggtaatgcagtctaccttggatgcgacatccgctgctgccagagccacctcagacattgcggtaacaccgctgtccacgatctcgaatccgtagttacctgccagagccttgtactctgcgatggtgctgatagagtttgcttcgctggtagtgtagatgataccgatggtcttcgcttcgggaagtacctcacggatcatttttaactgtgcatctactgctaacgcatcggaagtacctgtgatgttgcctacgggagtaccgtcttcattggcaaggcctgcttccacaggatcggatactgcagtgtagatcacgggaatatctgtattcattgtagcattatatgctgccatggcgcaaggagttgcgatggcacagatcatatctactttcttacttacgaaattgctggctgtcatggcggaggttccgttgtctgcctgtgcattgacatattcaatcgtcaggttctcgccctctacgatgccttcctcggcaagtccctgtaaaaatccttcccgacagttatccaaagatccgtgtacggcgtactgcataataccgatggtgtagttatccttgcttcctgtgctgccgcatccggtgagggcacctattgccataactgcggttaatactgctgctaaaattctcttcttcataatcttattcctctctttctgcgtatccacgcaattgaaattagtttgctcataagattactgaaccccgaataaaaaaaccgcctcaaatgtatattcctatacatttgagacggtaataagctcctgctcatcatcgtggtgccactcaatttgacaattccttacgaattatgtccacttttctctggatactatcatatccatcggcttgataacgggtccgaatcccgctgacgcctaaaactgatctgttctcgggccagcctcggaagtccattcggcgaaagttcctttaccgtgatcccaccacccacggctctctgtaaaattccctaaggcttactactcttcctcacaggtttggtaaacttatgaatgttgtttatgtgtctaagaataatctttcttttctgttttgtcaatactatttttagaaaatttataattattcagagttacaaaaacactttacaccgtctcaggcagtgtgatcaccaccttgaacaggtcaccgtccgtgacgatctccatatcgcccttctgcagctccgtcaggctcttggcaatggacaatcccaatccgttgccctccatatggcgggatctgtcccctctggtgaaccgctcttccagctcctccggtgacatctccagcgggtaggccgacatgttccggaaaatgatgttcgcattctgtccgtcatgctctacattcagatagacacggcttcctgcctgggcatatttgtaaatgttgtttaacagattgtcgaacactctccacagatgtctgccgtccgccatgaccttcacggtctcctccggctgttttacaatagtctccagctgcttgtcagcaaagcgctgcccgtattcccccaccgcctgtgacagcagtaccgacacatcacagacctccggatggacctccagattgccggtggtggccttggaggcctccaacaaatcatccagcagctttttcagcttctgggactgacgcagcaacacctcggcatactccgatatatgctgttctctctcctgtgcagtctctgtaccggcaccgtctctggtatccttcgcatcaccggacacttcttttccgatgagatccgcataattgataatggaagtcagcggagtctttatgtcatgggacacattcgtgatcagctccgtcttcagatgttcactcttcatcctctgttccacggctgcggaaattccctcgccgatgctgttcagattctccccgtgctccttgaaggacaataccatatgggaggtatccagcttataattcagatctccgtccgccaatgcttcactgccctcctgcagttctttgcacatcaatgccacaaaagtaatcgcaccgcacagaataaatttctctatggcccagaaaaagagtaatacaactctatcattataaaacagtattaaaccgaaaaactctaccacgcagactgcaaggcacaaaagtgctgttctccataccataggaatcccacggatcaatttcacaataccgcggaaaactctcttgcagaatcttccgaagaaccggaacactctatacaggatcgtattctgccaccattttcccattttcaggcggatggccagctccatgaagtacagggtgcaccatatcacctctgccgcaaacagtactaccagcacgatcagattgatcatacttgggttcataccgatccatccaaaagccaggtacagaccggtaaaagctccaacggcaacgaccactgtatacacatccaggtggatctcatggatcgcactgggagtaataccctccctgccattcttatgtccggcactgcacaacaggaagataaagcataataatgccagtatcgttcccgtacagcatatcacagggatcacatttcggttatcataaagctgctctgcctgatgatagatcagggcatattcatcttccttcggcaggctgggattcgctgtcagggtaaccacaatacgcttgttacgctctgctaatgcttcctcagcagcctcttcctgcagccgttctgtctcacttaaggcatcctcgatcatccattttgcatattgttccgcccgttcaaccggcacataaatctctccacctaaggatacgctgtcccccagatccagatatttctccagattaccggaggaaagggcttcctgctccgctgccgtcatgctttccacatcagacccggtattgacagatggttcaagctccatgatatcagagctttcagtgcttccataactttcatagccatcataggcagaggaagtttctgtgttgatataggtgttatcattcctatgctgcacctgggactccagccggtaagtcagatcatttgtcttgtctacataatcctcgttcttccattctcccaggaattcatccgtatccagatcgtagctctccacctttacccagatgttccgctgcctgcaataagcttccatggtctgcaagctctcattctcataccagtcgcgtatccgatacagatcctgattgacctgccggtacaacagctgatcatggataaacatcattttaccggaggaatacgctccactgtctgcaagcatgcaggtaccatagagtcccaacacccccacaattgcggctgcgatcatcagaacaaatgccacgacctttgccaatgtgctgcccaacagactgtttccctgtgccggcgcattcttttttttctcggctttttctctttttttccgttcccttttattctctgacaaagctgtttctaccatcgtgctcactgtattttccaccggattatccactctgtcctgttctgtattcctgctgttttcttccctgttatccatattcctgtctccttacttcccggagcagctccgcgctcctgcctgctcttatccctgcttctcacacttgtagccctgtccccagaccaccttcagatatctgggttccgccgggttgatctctaacttttcccgcagatgccggatatggactgccacggtattctcgctgccaagtggcagatcattccagatcttcgaataaatctctctcggagaaaatacctgccccggattctgcatcagcagctttaaaatatcatattccgtaggagtcaatgctaccggctcgccatccagcgtcacccgtttctccttgtcatccagttcaatccctccgactctgatgacatccggccgcacacttccgccacccagctgcatataacgccgcagctgtgatttcaccctggcagatacctcgatgggattaaacggcttcgtgatatagtcatccgctcctaccgtaagtcccagcaccttgtcggaatcctcacccttggctgtcagcaggatcaccggaacattactcttctcccggatcctgatcatcgcctgtatgccgtccagcttcggcatcataatatccatcagtaccagatgcacctcattcgtgtctaccagatgtacggcttcctcaccgtcaaaagcctctaaaaaatggtaattgctgtcattcaagtatatctttaacgcgtttacgatatccttctcatcatcacagatcaatatattgtacatactctccctcatttctgtgccggtggctgcagcccggacacttcctgcgcaaggagcccttacgctgacgggcatctgctttgtccacagatgtcccgttgatgaatttattgtaacagattaacgattaataaaaaacaggaaaaacctttaagactttattaagatgactttacataaaacaccctctgccatgcccagcagggcaaagacaaagggtgtggataatacatgttgaaaagtaaacagggaacagatcaggtagccggtcagtcccaggaaaacagcaaggcactccgggctttgggatatcttttttcgcagatccgtaagggttgtgataaaaataccaatgtagacggtcacgccaaagaatccctgttcgaccagcagggtcagccattcgttgtgggcgttggaatagatgttgttgtccaaaagacctttgttgatccagtccatggcatcgctgccccattgatagagcatatggtaatagcttccgggaccggtgccgaagaatttgtatagcgctccttcttttccataggttagtaatgtgaccttccacagggccaatcgcccgtcggcagcctcagacaccatttcatttccaacgattcctccaagaagacatcccaaaagcactcccgaacatatcatcaccgctccggcaacaacaacgatccggtatattttgccgctttccagaaaatctttttgctgttgcctttcgcgtattcgcaggatcaggtacaacaccgcttccgcaccaaatacaatataccataccgtggtaaaaaagagcctcttttcgacatcccccgctatcaccagtccggtcagatgcaacaacaagaacaatcggaccataaatatcgaaagcggcaaaagcatcagaatctccaatgccctcagcagccggcttctctgccgcagagaaacaaggaacaaaagtaggcttaatccacaggctgccattatagccgtggtactattggaggtaatagccgatgccaaaaaagaaagcttccaagcatccccaacactctgccctgtcgttttcccatataagcagctgccagagagatacctgccgtcacactgatatagcctgcataccagttgttgttaccgatggtggacaacagctgggtccggttccattctccgttttccattccgcggaaagttcccagcacatcgatgtccagacggttcaacagtccgatcagtgtcacgattcccgctgtgatcccggcgatccaccagatacttctgctgccgtcataataccgggataccgcaaaatagatccctaccaacaatccctgggtcactagccccatataccagccgggataccctaaaaggacatcctccctgcagggactgattccataagaaaaaattgcagacaccagatacaacagcataaacacatctgttttcttccacatccgttttgtcttccgttctccccggatcccctgccacagcacagccagcaccacaaaagcccccagcaccagcgtagtattccggaaaaacaaatattttgcatttccgatcatcaccagcttgttctgcatatacagcggtaaaccggcaaaaagaatcaccagatacccataaaccagcatactcacggtctcttttgtattttgttcctgtttcttcatagcttacattatccttcagactgaaaaacaaggcacccctcattgactgaagagtgccttatatttcccgattattttatttccttacggttacttatttgccgtaacgcatctgcaggtacagaggaccataccattcaatagcattgtcttctgccttaccggcagggatggttaccgtatactcattgccttcgaaggtgtactccagctccagagctacagtctgcttcttgtacagagcctgcatgatatcgttgggcagagcattgatgttcttgtctctgctgatcttgacggtagcaccgtccttggcattagcgatctcgcttgccacattgtcacgatatcttccaaatgcgttgtcagtaccttctgctgttgcggtattattagcttctgcaatagcaaaagtggagaagtgatttacagtaaaggtcaaagtgtttgcggaagcattgtaaataggcttgatttcttccagtccaccatttacaaagtggaaaatcactgccttattaccatctacacctgcaggagtctcaatggtaactgctacagggataggcagagattttactgaagaagtaccagccttcaggctgatttctacatatacgggagtagaagttactgcgtatgtagaagaagcaatctcaggcgtagccgctggtgcttctacactcagtgttgtgtcaggagcaacaaatgctgcaccaacaatgcctacagcctttacagcgccggagttagcaagggtagtatccttaattccctttgcctttttgtatgctgcttcgatagctgcaacatcattaacagtatcctgtcctgcattcattgcttccttcagatcctgagaaccgatctttgtcaaagcagctgccgcattatctgcagatgccgcatcagtaatcttggatgtatcaatagcatctaccgcattctttacctcttctaccggtttggtgctcggtgtaaccaccgtattattctcacttgctacagatacggtagacagtgcactgctgccgcaaggaattgcaaatactgcgaatgcaatggctgcggcaatgattaatttctttttcattatctcattcctcctaagtataatgttatggattttatttttaccgctatttagtttaccccccccgcaatattgtcaatactgtttttccattttttcgcattttccatgtgcaaaaaagcatgcctttccgccccaaaaaacaggcatcacagacatgcttttctactttgttatttatttttcttattcgaatgctgttttaattcttccagggcttccttgaatttctcagaactcatggtagggttggaacggatcatgtcacgctggaagaaatctcgtaagctgctgacattctctctgtctgccacgcttctggtgtacttctgccgcaactcggcgacctcgttcttcacgctttccagatactggttgggagatttctgtgcggaagtgcggaagctctccagcttgccctcaatgttggacttcaggtcctccactctggtggtaatacttgcagtaaagtcttccttcttctgtgccaggctatcgctgaagccttccttacgattctccagatcctcactggtcacagcaataataacatccagccgtttctggatacgaagcatatcttccttggccttctccattttctccagtatgtcccgcagatccagggctgccttgaaggacaacgcgaaatccgcaccgatcagcgccgtcagcaccagtgtcaccggagtgaggatgctgtccggaatggacaacaccagatgttcaatgggcttatggataaactccgtcatcaggatcgtcagaccaccccatgccagcgaggaccccaggcagatatgtccctggaaattgaacttattcttggaatagtcccagtatctgactttaaataatgcctccatggtcacgcctgtgacatactccagcactgtggccccgatacatccggcgatgtagaccatcaccagattatcctggaacggcatggacaccactaacatcatgatggcgccgctgccatacaacggcaggaaaggtccgcgcatgaaccccctattaactaatttcctgctctttatggatacatatgtggattcaaaacaccaaccgaaaaagcagtaaaaataaaagaaaaataaccattgaatcgcagtataatgatacactgtttaacctccttttgttcttccggaaatacttccctacggatatacctccgcctctatggcaagcttccccttcctcgtggcatggggttcaccgcttatgcagaatttaccgtagcctctggcatttaccacatcccccgcctccaggggcttggaattattttcacacagcctgccgttcacatatacctttcccgcccggaacagctccatgcagtcgcttctggatttattatataccttggcaatgacagcatcaacacgtgggcttgccacctgaatgacctgtcgcaccggttcttcctgcggtacttctgccgccgcatccaccacctcacacttcacgtgggtgtggcggatctgctccagattatcacagataaattccgcaatggtatcctgacagaacaaaaaagcttcgccctctcccggcagaatatcgccgatagtgctgcgttcaataccaagattcatcagtgcccccagataatccctgtgggacagcttgtctgcaaatttcgcggatagaggtctgatccggatacagcagataggaaagggctgttcatagcccagctccgcctcactgccgaagcgaaggatcttccgctctgcctcttccctgccgccgtataaggtgatccctgcgaacttcacttcccgttccacctgccacagggcatcctgttccgccagtcctaagaatccggtaaaggtgtactggttctggttgtaggatttatctgccagttcacggatccggtttttcagctgttgtatttctttttcattttccacggacattcccgtacacccttcctgctgttcttactttgcttttgcaaatgttaccctgttcacattatcccagtgccacatccaacatcatcatcaacgcaaaaccaattgcaaaggcaatggttcccaggttggaatgctctccctcactggcttccggaatgagctcctccacgaccacatagatcatggcacctgcggcaaatgccagcatatacggaaggatcggtgtcacaatgcttgccagtgcaatggcaagtattgcgcccaccggttccaccgctccggacaacacgcccagtgcgaaggatctgctccgcttgttaccctcactgcgaaggggcagagagataatagctccctccgggaaattctgaatggcaataccgatagccagcgtcagggcgcctgccatggtaaccgttccgtcaccactcagcacgccggcaaaaatagcaccacaagccgcaccctcggggaaattatgaatggtcacggctaacatcagcatagccgtacggttcaggctgctcttatgtccctccggagtctcactgcccacatgcagatggggcaccagactatcgatgaacaacaaaaaaacaataccgatcaaaaagccaaccattgcgggaagaaatgcaagctttcccatctcttcacacatatccatggcaggtatcagtaaagaccacaccgaagctgccaccatgacaccggcagcaaatccggtaaatattctctgtatattgccgccaatctgctttttcaggaaaaagacgcaggctgcccctgcagtcgtccccaaaaaaggaatcagaagaccggctactatactcatactcatgaaacactctcctttctcatagtatcttatgtaacttttgcactttttgtatcttgtctgtcacgataagctttctacatgctctgccttaccccccggcatctaaaaaccggccagatcattccccataacagcatacatcaggaaattcacaccacacaccagatggtagaaaaataccgcgatctctccgatcacgaagatcactttccagctcttccaccattcccggatatttttcaccataacgatcagtgtcatcaggaatacgaaaaacataccgtgcatatatccccaggaaaagttcgcatgcatcatgcggaagcccttttcatagaagactaagaacatcaaggttgctgcaatataatttaaccacgcaaaccagtaatacctgttctgttttatacttttcagatcaaacagcagattcaggaaaaggacaccaataggcaatgccattcccataacaatactcaacgggatacttttggaataattactccatactttggcaaagccgatggcgatcccggtctcctcccccatggcattcgtcccggtaaagattccggagaactgatacagcagggctatccccgtaggtatcatggtcacacacagacagaacgcattgcgaaagctttttccgcggcttgcgatcagctgcaccagcaggatcagaccgatcagaggcaccaccaccatagtgaagctcggtttggtcatggtcgtcagcaggaggctgactgcaaacagcgtacagttcttccactgaaaattcctctgatattccgataatacctttaccgtctcaaaaaagcagataatcgcaaagggtctggttgccaggtaagtggcattccagaaaggattcggtgtataaatgcccatgcagcgatatgcataatcaaagccgaaaaatgccgtattcttgggcgaatacagattcgacagcagaaacagtgcaaacacaagcagtgtcaccacaatatcggtcatgacctgctttttatgtgacaaagtttcataatgactgtttttacggatctcacggttcatatagtatttcgtgatgatcactgctgccaggttaaaaagcgccgtggtgaccgccattgcagccttcgctccgatcagccatgcggaaagtctggcagtccagaacaggatcggataggggaattcataattccccgcaatgcctgccaccttattcacatagtccggcatatccgactggaatcccggcacctgatagcattccatccagaacagatataacatgaccccggtatacaaaaacagcaggaaaagaaatgtcacttttcctgctgttgtctcccgcaggtcgctctttatgggattctttttcatagagctgatcctttctaattaaaactgatcacgggatccttgggagcctttgccttctccacgctgatggcatgaagtacgggaccctctcccttatagtctgcaaagtattctttggcaacctttgctgtcaccttgacccattccttctgcttcaggtctttcgtgcctgcatactcgcaggcataacctaagaatgccatatcctcggcacagcaggtcattgccatgcgtcccggtacgaaataaccatcgggatattcctcgggctttaataccatggcaaggaactggatatttttacccacgtaacgctccaggtgatccatggaatccagataccagatgccgtagccctggttgtccagtacgatgggatcctggctcagatcgtagggcagatcctcctcgaagatctcgtcgatctcaccgttggagtcctcgaagatcacatctgcggcaggattgactgccttgatgttacgcttgtatacattcagatcctggatgccgtcgcaacggttgaaaatgatcatctcagacttacggatcatctctgccaacagagacttcatgttggtatagtacatggggaaggtggagccgtcgatggtcgtgatctgctgttccactttccagtaccagggaagcttcatattcttgaagttccacatgccgttatactcgataatgatacgggcgggcttatactgcttctccagttcgatcagatgattcggattgaactcctcttcctcttcgatcagcaccacgtccgtacggctttttttaagaagtgcgggatcgtactcattctcgccctcttcgcagaggatgagcagggtcctgcccttgatctggaaatacggctgtcctaatgtaaatgtgataaattctgtcttaccgctctccagaaaaccatttatgatatagactggttttgtcataattcatacctttctctatttatcctactgttcctgctgcatacaaaatatgtcctgccaacttacttgcggaacaattctgccagcttgtcctcgtccagtttggaaccgatgacacagatcttgccggtgacttccggcttaccgcttctgatgtcatgttcttcgggaacataatcataatatacccaggttccgtcgggagcaggtaccatacccttagcacgcaggatagcaccgtactctccgctgtccagagcggtaaggatcttctcgatgtcctctgcgctgtaagtgttgggtgtctcaataccccagctggtgaacacttcgtctgcatgatggtgatgatggtggtcatggtcatgacaaccgcaggtgcagttctcgtcatgttcatgatggtgctcatggtcatggtcttcgtcatgatcgtgatgatggtgatgctcatgctcgtcctcatcatggtcatgatggtggtgatgttcgtgctcgtcctcatcatcgtcgtgatgatgtccgcagcagcactcgtgatcatggtcatcatgatcatggtcgtgatgatgatgttcgtggtcatgatcgtgaccgcagcactcgtcctcatcgtgatcgtcatggatgtgctctaacatttccttcatcatatcttccagcttgtcagcaccttcgatggtccctagtacttccttgccgtccaactgcgctaacggtgtggtgatgatggttgccttgtcattatgctcacggatcatctccacgcaggcattcagcttcgcctggtcaaccttatcggttctgcttaagataatcgtcccggcatattcgatctgattgctgaagaattcgccgaagttcttcatatacatcttgcacttggatgcatctaccactgctactgcactattgatctccacatccagatcacctgccacattctccacagccttcaggacatcggacagcttgccgacaccggagggctcgatcaggattcgctcgggagcataggtgctgatgacttccttcagggaagtaccgaaatcgcctaccagagagcagcagatacaaccggagttcatctccttgatctcgataccggattcttttaaaaatccgccgtcgataccgatctcaccgaattcattttcgatcagaacggtcttgctgccgtccaatgcttcctttaataactttttgatcagggtggtcttgccggcacccaggaaaccggatactacatctattttcgtcattgtattttcctccaatctgggtttaaaacccatcttttttattttctatcatatctcacggattgtcaagtcctgcccgctcgctctcaatgatactgtaaggaaccacagccacttttccttcttcatccgcgccgcacaggatccctaagaatactccgtcctccgtgaaggcacctccgcccgacattccgggctccggcagtccctgcaggagaagcatatactgttcgaagtcttccacatagatccatggatttactacaaacgcataaatcggtttggtattgtccccgccgtacatccatacatcctcatagacctccagctgatcaaaacgttctctgtcggtagcaacggtcggatactctccatccggatccagttccttcttatctacccgcagaaaagcaagatcactgtttaccgctattgcacgcagtgcagcccgggcctgtgtatcatccggaaaagtcaccaggatctctccggtattctggtccagcacatgtcccgccgtcaggatcagaacagattcctcgtctgcgtcgtagatgaccccgcttccatagagatctccagcctgaacttttacgatggatcgcataatccgcaggtcggtctccgtcagctcctgcggaatctcgtccggcatttctatcccggagagatccggcaggatttcttctgtaccggaaggaacttccgtatccgtcacagtattctgttgtggtgctgcgccgcatccggtaaataccagaacgcaacacaaaataatgattatttttctcatatatccttcctgtaaataaaagacggaccgcatcccgcagtccgcatttttctcgaaaagtgtaagcaaaatataagccgagttctgtatatgacgatcatctatctagtacgactgtcaccagccgcatcaagcgacctacctgaaaacagaccgggccggtctattgttctctgtttggtcttgcttcggatggggtttacatggctccgtctgttaccagccggacggtagtctcttacactgcctttccacccttaccggcataaagccggcggtatatctctgttgcactagccttggagtcacctccaccagacgttatctggcatcctgccctgtgaagcccggactttcctcacctgcataaagcagccgcgatcgtctatcttacttacacctgttcgattatagctgttctactatgaaaaagtcaagggggattcgtgtaaatacccgtgtaaactattcagaaccccattcgcaaaaccgcatctcacgatgcttactttttgctcatgtggttacttcgtcgcatcaattctgccgcacagtcttacgaatgcgagcattcgacgcctgtcagggatgtttcgccggtagccgtgtaaactattcagaaccacattcgcaaaaccgcatctgacgatgcttactttttgctcatgtggttacttcgtcgcatcaattctgccgcacagtcttacgaatgcgagcattcgacgcctgtcagggatgtttgcgccggtagccgtgtaaactattcagcaccacattcgcaaaatcgcctcttcgaggctttccttttgctcatgtggttacttcgtcgcatcaattctgccgcacagtcttacgaatgcaagcattcgacgcctgtgcggcagaattgcgctactctgaatagtttacacgttaaaacagctacctcccacaaattctctgcacagagaattgttgggaaggctttcactggtcacacccaggaaatattccaggaacttcagaagtctcttggcctcgtaatattccggttcgcccttgtcgatctggaacagcagcggctctgcgaactgctttaataccgccagttcatagatcaatacggaattgaacatcgcatccgcatcctcctgaaacgggaaaatattctgctcctcgccccggcggacagatccccacatgtcaatcgtctgtctggctcctgcgcctctggttctggcatcccttatcatacgacgcagtagtctgccgtccgtagtgggaatccggttatgttcatcaatattgatattggtcagggcgctgatatatatcttatatttgctttcctcgggaagtgcataggaggtcttctcattcagtccgtggattccttcaatgaccaggatatcatcctttcccagctgtttgaaattgcccttatattcccgctttccggtcttgaagttaaaggaaggcagctccacacgctcaccggctaacaatctgcacatgtcgtcattgaactgctttacatcaatcgcttccagacattcgaaattgtaatcaccgttctcatcccttggtgtgaattctctgttcacgaaatagtcatccagtgcaatggggtgcggtgttttccccagggtcttcaactgaatggataatctgtgggaaaaactagtcttaccggaagaagaaggtccggcgatcatgacaaatttcacaccgcccctgtctacgatgcttttggcgatctcgccgatcttacgctcctgctgcgcttcctgtaccaggatcagttcactcagcgacccacgacagatctgatcattcagatcacccacagtctcaataccgatctccttcccccattcctcagattctttcaacgtccggaataacagctttctctcttgaaacggcttaacatgcgtgggatcttttttatccggcagcaacagcataaatccatcctcatacgctatgacgtcgaaccactttacatagccggcattgggcagcatatagccgtaataataatcgtaataaccgtccatttcataaatatttacgaaggatcctctgcggtaacggaacagcttttccttatccttcatcccctctcttcgaaacagttccatggcattatccagggaataagatttcttcagaaaaggtgtctttgcctccaccagctcccgcatccggttacggatctttgcagcattttcttctgtcgcattgatcttccctttgggagagatgtaggagccgttcccgatagcaaactctacacgacaattctgtaccgtttctcttccgaacacatcaaatactgctttcaaaaaaagcatggtggcagagcggacgtaggtcttattccccacgtcgtctttcaatgtaaaaaaagtgatctcacaatctctcgtcagctttttgaacagttctctgatcttgccgtctcttgctgccaatgcgatcagattgtcatactccttctggtaatcattggctacatcttcgtaggtagccccctggggatattgtctctcttcaccgtttatcttcactgtgatcatttttctcaccctgtccttttgtaatctccttttgcaggtattattgtctaaatgcaatccggttccttaccattatcgtaccactccagtgcccgggtaagcagcgcagtctcctctgcgatctcctgcctgcgccacatcgttttgggattcgctgcatctgcttcctgctccagccgcttcgcgatctttctatgttccgcaagctgccattctacataattcaaaagcagcggacacttacggtacaacagtatcggaccaagctgcccagccagtccggatgcagcgtcatccgctttccaggactctcgcacctgtgatctcaccgcatcttccgacatctcgcccagccagcgcactttcatcataaaataatattttccttcttcgtagatgatattctcatccatcagaagatatccctcttccatcagaaatgtacgaaaatgcgggatctccgactggggctgtaagatcagttcccgaaaccctttcgcctgttctcttccttcggtaagaatcttctccatgagaggcccacccatgccggcgcagatcatcccggcagcctctccggtcttcaggctgtgcaggccgtcagaaagtcttgtctctatcctgtcctccagtccgtactccctgatatgctctctggcatgttctaacggtccggaccttacatccatggcgatcactctcggggaaatgcccttctgcaccagatagacagatacaaaaccatggtcacaccccacatctgttatcacagtgccgggagtgaccatgtctgttaatgcctgcattcgattagataatatgatctccgccattaatccagataatccttcagcttgcggctgcggctgggatgacgcagtttacgcaaggccttggcctcgatctgacgaatacgttcacgggtaacgttaaattccttacctacttcttccaacgtacgtgcgcgtccgtcatccagtccgaaacgaagacgcagtaccttctgctctctctctgtcagagtacccagtacttccaccagttgttccttcaataacgtaaacgctgccgcatcggaaggcaccggtacattatcatcctggatgaaatcgcccaggtggctgtcttcctcttcaccgataggtgtctctaaggataccggctcctggctgatctttaagatctcacgcactctgtctaccggcatattcatctccgctgcgatctcttcgggggtcggttctcttcccaactcctgcagcagctgtctgctcacgcggatcagtttgttgatcgtctccaccatgtgcacgggaatacggatggttctcgcctgatctgcgatcgctctggtgattgcctgacggatccaccaggttgcataggtagagaacttatatcccttacggtaatcgaatttttccactgccttgatcagccccaggttaccttcctggatcagatccaggaacaacattccacggcccacatatcttttggcaatgctgaccaccagacgtaagttagcctctgccagacgcttttttgcctcctggtcaccctcttccatccgctgtgccagttcgatctcttcctccgcacttaacaggggaactttaccgatctctttcagatacatacgtacgggatcttcgatgctgacaccttccggtacggacaagtcgatattttccacatccacttcatcctcatcggtcagaatgatctcctcatcgtccacatcatcgtcatcggtaatacgcaatacatccacgttattctggtccagatattccagaaccttctccatctgttcctcttccagaggcatgtccgcgaagaagtcactgatttcctgatactccagcacgttctttttctttttcgccatattcaggagttcttttaccttctccgcaaattttgcctgtgtgttttcatccattttcgtggttccatcctttcattgccattatttatagccatatttcgtatcttttataactattcgaaagcctaaatcccattattccagggaaatatgcgtcctttgtaattcttccagggctttttttccttctaccgcctgtttcacggcattgacgtccgtccccagctttgccatatagtattgatagctgtttttcttcactgccagcagaatatcatggaaagctctctccctctcctggcgggtggacagctcggggagcgtggtatggaacagctccgcagcctccctctgttcttcctcatcttcaaacatactgatgatccctgcaggctggaactgatctctgtccagttcatcgaatagcctctccgctactttccggtacagttcctcggtgaaatcctccggggaaatatatttccttacgatccggtacagggacggatcatcgctgatccaggtgatcagaagtcgttgggacctgcgcccattctcggcgggatcctttttctgtacaccgcttctcggtcgttccaaaggtcttgccagtcccatctgcgacgcaatcccaactaccattttgcgcagattgtccggacggatcatatatttttccgcaattgcctgcagataattttctctttccagatcttccgagaattcacacagcttctgtgcaatctcccggtggaactttgtcctctgctccggatcgctctgatcatactgttcgcttaagatacggatctcaaaataaaagctgttctccgcctgatcgatccgttcctgaaaagcttcttttccgagattcttgatgaattcatccgggtctttatacggtcgcatattgatgaccttgccggtaagtccggcctctctcaggatcccgatcccccgcagtgctgctttcgttccggcaccgtcgctatcgtatgcgaggagaatattctccgcatagcggtgcaggagattcgcctgctctaccgtaaatgccgttcccagagatgccaccgcctgtgtgaatcctgcctggtgcatggcaatgacatccatatatccctcgcacaggataatgttgcccgtcctggcggtccttgcgaaattcagtccgtagaggttacgtctcttatcgaagatcatggtctccggggaattcaggtacttcggttcgccgtctcccatgaccctgcctccgaagccgatcacccggtggttaatatcctgtatcgggaacatcacccggttccaaaactgacttctgagtcctctctgttccgagaacatcgcaagtccggaatctttgatctcttcatcggtaaagccttttttacgcagatactggactacctgctcgccgtttttcccggcgtagcccagtccgaaatgatgcatagtctcgtcggtcagctttcgttccgtcagataacgcattcccacttctccgtgaggactgcgcagcatataataaaaatatctggctgcctccttattgacctccagcagccgcatccgcttgccggcctttttcttctgttccggtgtctcttccacttccggcagcttcactcccgcacgatctgccaggatcttgactgcctccggaaaagtatcgttttcatacttcatgagaaatgtatatacatttccgctggcatggcatccgaagcagtaatacatctgcttattcgaagacaccgaaaaagaaggtgttttctcgttatgaaaaggacagcagccccaatagttgcttcccttttttttcaatgtcacataaccggaaataacatccacgatatcattcctggctctgacttcttctaccagttcttcagggtaatacactctttttactccgttttgttgtaatacactatcgctgccaggatttcggtatgtagatgtcttcatagaccgctatggcaaagcggtccgtcatggctcccacatagtcacagactaccttctctctcggctctccgacagataggagattcaggtattcctccggcagatcatccagatgtttcaggaaatgttgatataacgtctccatcagcatctccgcctttccctcttcacttttggcgatgggatttttatagactctctcaaacatgaactgccggatcttcgtcatggtttccgccaccggttccgacatcaggatatcatccttgtccatactgttggttacaatatcatgaataaagtgatccagtctctcagtggggctgctgccgatcacttcacaaatttccttcgggacatctgcctccgtgagaattcctccccggatggcatcatccatatcatgatgaatataggcgatcttatcggaaagtctgacgatcttgccttccaatgtatgaggcttgccaatggtctgatggttccggataccgtcacgtacttcatacgtcagattcagtcccttaccgtccttttccagaatatccacggtacggacactctgctctgcgtgctcgaatccaaacggacagactctgttcagagcccgctctcccgcatgtccgaacggtgtatgtcccagatcatgccccagtgcaattgcctccaccagatcctcgttcagcttcagagcctttgctatggttctggctgtctgggatacctccagtgtatgtgtcagtctggtccgatagtggtctccctccggtgtcagaaacacctgtgttttatccttcagtctgcggaatgccttacagtggatgatacggtctctgtcccgttgaaataccggccggatatcacactgttcctcaggcttcaaccgtccctttgaatttacactcagggatgcgtacggacttaaataatcctgttcccattgttccaagttttctctgatcgtcatagttcctcctgcccctacttctaatattctgtgcctgtccgaaaaatccttttcccgggttcaaaatttttaactaaattttgaacccggctatctgcacacagaataaatgaattccgcacttttatccatggcctcattggcccttttgaagggtgacatctgaaagacatgccacatcccggggaaacgatccatatgagcggacacgccggccttgatcaggttcttgtagagccgcagagaatcgtctaataatatctcattctctccaacctgaatgtagacgggcgggaatccgcggaaatcgccatacagcggagaaatataaggatccgtcaggtctctgtcgggagcataggctttcgtcatgcggtcgatgtattctctgtccagtacaggatccacttccgccttggtctggaacgtcttgccttcgccggtgagatccgtccagggggacatcagtacgatgcctctcggaagcagacgctcctgctcctttaatttcagcaccagggacagtgccagattaccgccggcagaatctcctgtaacgatgacgtctctcgctccgtagcccaaaagcatcagataattccaggccttcatggcatcctccgtggctgccgggtaaggatgctccggagccagccggtagtcaaagcacaacacatccatagaagtgcccgatgccagtttggaggtcagagttctggcatagatgctgctgccggtggaatatcctcctccatgacaatgcaggatcacatactttttcatatgtgcacgattcacgctgacccattccgcatccattccctcaatgtccaccgggcggtattgaatctccttactgttccccaacagttctccgatatgatcctgggattgtctgtgcttctccagatccggattttccaccagtccatgcgccctgcggatcagctgcattaaattctgattgttcttctcactgttttttcctaccagtgccataaattcctcctgttaaaaatgaagccgtctgcgtactgcattgcgcagtcttctccgggacaaaagtgtcgcgatcgtaatgtccacgatcacacagatcgtcagcacgatcgccgaccaccgaagttcaatgccaagtcccaggaaacggtcgataagaatttccagtcccacacacaatactgctactccggagatcaggtatagagctcccgtaaggaatgacatcggaagcttacggatacaaaaaatcaccgcttctaccaccgctatgacaagcagtaccaccggaatgcccaatccataaaaccagccactctgtcccgtcagataggtcagcagatacagatacacgatcaccgccacaccgtctaacagaatcgacagataaacaggctgtctcgtatagatgactacagggatcatgatcacccacaataccaggaagactccgatcaccgcaagggaccagagactgctccggaatacaagtacgttcaaaagtccgcaggtcactgccgttgccagtacgatcacagtcagcagtacccccagatcttttctttttactacttccacctgacctttttccttcggaaaaggagacggctgcgtagacggttccggtgctttcggattatagaccggagtatcgcacagcggacactttgttgccgaagcatccagttccacaccacaattcacacaatatgacataattgcttcctttctctctgtcaaagcgatttatcgattactttctatttttacatgaatgccatcctgtaccagcttgcggaaaaacagccgctctacatcagtctctgcaatactgctggcaaaattgatcgtaagaatatcctcaaaactggcaatggcgcagttcgttctcgtggaaaaaggctgtcccatataaatatcaaagcgttcaatatatggcttcatagtctccgggaccttcagagctcccatgttggtcaggcctgccgaagagtttttatcctggatcttcgtatagaactgccgaaccaccagatccttgataaacagcggtacaatgcggatgaaaggattcctctgggtctccgcgttcgtagtgatatcgccccgcagcagcttttcattcagataatagcgcatgtagttatgcacctgcgtcacaatttcttcgaaagtgtactctcccagtctggggtcgatccccgggtagatcatggtgataaaattcctcagggtcctggatgggaaaaagcggcgcaggttcaccggcatggcaatttttaccggtcggagcttcaaatgccattcactctcctgcttctgcatcagggcatagagcagaaccgaattcagatattcggtaatggtagcattatagcttttcgctacccgcatcacctccgacaccgacataatgccgtctataatgttcagcgtatagaaaggttccttcgtccccctgacacgataagtcttctctcccggcctgggtggacagactttggcgttggcatatttcatataagcatcttccagctctcccgggtccgggatccccagaatgtccaatacgaaccctccattttcaatctctgaatgtcccttcagacgcagataagtggctgtcagtgtctgcagcacacacattccgccggtgccgtctcccagactgtgatgcgcctccagtgcgatcctgttacgatagtaatagattcttaccagataccggttattgcctttaaaatgcatgggctggcaggggttctttacatcctcctgcacaaaagggccgggtctgtcattcggttccagatatcgccagaatacacccttccgaattgccgctttatacgtcggaaaacgaggcatcgtcagattcaccgcccgctgcagtatttccgggtctatatcttcttttaacagcacagacaatcgatacacggaagagaaatctctcctctgcaatgtaggatatacgatcgccgacaagtccagtttgtaccaatccttgtgtaccttctgtatttggtctgtcttcattctgtctcaccttcttaattctagtataacggtttctaaataactacaccattcacgtagaatatttttctgagagtgcaggataaaaaacgtaggcgtagcgggctacgctgaggatttttagcctgtgctatcgggaaaataggcaagtgatatggggtagttaatttaaaactgttatactagatacagcaaaattctatatacaacaaaggcggcaacctttcggtcaccgccatgtgatgcagaaagagggacttgaaccctcatggtatcactaccacacggacctgaaccgtgcgcgtctgccaattccgccatttctgcgaacaagatgtatcttacagtatttgtttcaaaatgtcaacactatttttcaaataatttaaaaaactttcggatatgatcgtagccggaaaaataaaagcggcgatcttatgatcaccgccatgtgatgcagaaagagggacttgaaccctcatggtatcactaccacacggacctgaaccgtgcgcgtctgccaattccgccatttctgcgaacaagtgtatcttacaacacttgtcggtaaatgtcaatattatttttcaaataatttaaaaaatatataaaatagcgaatatattacatataagagttgaacaggttgcctgcattataaaggccggtatatcctgcgcttccggtgtacagactgcttctggtggaagcatgatctgctgcgaaattgatcatggagctctgtgcggatacacggtagccgtaggaaccatttccctgaaacagactctttaccgtagacatatccgctttcataaaagcatccttatccagggataaggtaccgtcatttttcatagtgataccgatcttcgccagctgcttgctattggcaatggtagtattccccagagattccgtgcggttgttcactgtggtatcgctcacatcatccacagcagccatcacgctattgtaatttgtcacaaagctgttcaccgcactgtagattgcgtcagtgtcgtaccccttggtggtactctccacaccattctcatctttggtagtgatatccttctgggtgaacagatcctttttaccggtcgctagcaatgcatctgcggactccttcagagcatctgtcgtggtctctaccttcgccagcgccttcttcgcagtatctgtcgcggtatctttcttcgtaatggtggaagctgcggtcttgctatcgccgctgtccttggcatagtatgccttcatcagcttcccgtagctgccgttcttaatacttgcataatctgccagccagttgccgcttagcgcattggatgcagaggaactcagtccggaaaacagaaaagaataattcgtttttgcctgaatattaatactcatcacagtcacctccatgttaactgttttgaatcagccttttggccataagctctttgctactaattacagtatactacttacttcggatgattccaagatttattaacgctttttttgatcggtttttgaaaaacatcccattaatccagtattttttccagcatagtcacccgattgaaggggaaagagaaataatagccgtccgcgaagtcctccgtcatggcgatcacttcttttgctaactgtacgccggcctgttctccctcttctctggtcatatccgcacggtatctcgccagcacttcgtccgtcacatcgatgccagccatctcatttttcataaatgtggcatttttaaggctcacaaacggcatgatgccacagagtatcctggctccggtctcctctttgatccggcgcactctatccgcgctctccctcgtggatatgggctgcgtcaggaaaaatgtggctcctgccgccattttcttcttcactctgccgatctccacttccagattccgtctgccctgattgatggcaccgccgtagcttaccggtgcctgtgcaaactgctcttcgttcatgtccgcaaggatctgcatgagacctacggagtcaaaattgaacacactctttaccgtggtacgcaccatggaggggatcgggtcgccggtgatcacaaggaaattgtgaatcccattgatataagctcctaatagctgggagcgcatagcgatggcatttttatcacgacagcagatatgaggcatgacacacataccggtctcccgcgctaccttttccgccatgagaatagaatccgctctggtacgtcccgagggagaatccggaaaagtcagtacatccacaccgcttctctgcaacagatgtgcggcatccatcagtttttcatcgtcaatacccgcagggggtgccagttcgacggcgatcagtttcttcccgccttctgcttcctttatatggtaaaaagagtgatcctctgtgccagcctgttttttctccggttctgccttttcctgtgtctgcggatactgggtaaagtccagctttcccgcaagatctgagatatattccggtgtcgtaccgcaacagccgcctgccatatccacaccaagagctatcatctgctgcattctgtctacaaaatattctctgttatccccggtgaagatcatgcgtccggtgaccatctgcgggtaaccggcattcggaagggctgtgaggaatttatctgcgggcttataaagtgtctgcaggatccggtacatatgagaaggacccacgccgcagttaaagcccacggcatcgatctcttttatcgctcccgctctctgcaacagctttctggcacttaagcctgcattgctgtaaccgaactgattcacagagaattgtaccgtaataaatgcctgttccccgatcattttgatcgcaggcaggatctcttccatctcggaaaaagtttcaaagacaaaaaagtccacgccttcttccagaaaaatacggcagatctcttcgtattcgcggcataaagtatccttctgtgccagcgcatcacaagggatctgtccgatatctccggcgatatagacttctttcgtctcaccggtgcgttctctccacgcaaccaccgcctctctcgccaggcgtacgccgcttcgcagagtctcctcgatctgttctttggacatatccatgcagaagctgttggctgcgaaggtgttggtacgcagaatctgcgctcccgcttcgaggtactccgtatgaatctccttcacccgttccggggcttccagattcgccagctccggcagctgtttcgtatcgtattttcctccgtaataggtcccgaaggctccgtcaaagaggagctttttctgttggatcctttcacggatctgctctttggtatgttttatattgcccattattgtttcctttgtcctgttgatttcgttcatattcctttaaaaacgagcaggtctgctctcgcaagcctgctcgttatccagcatgccgtaactattcagaaccacattcgcaaaaccgctctttcagagcttactttttgctctgaatagttacagcataccatattattttccggaaaaacagtagcaaatttaatgattactgtaaaaagctaatgtaaaagtgccttgcagattcctacgaattttcttgtatttaaaacaccaatatcggcgaaaaaatacaaaagcaggtaattttgtattataaaaatgctttattttcgccaagttgcaaataaaagaaattccgtacaaaaattcctgatttcggaacttttttgtacggaatccaatgtttttatactatttacaccaaactgacttatcagttacttcttctgtcgtatcaggagcgtaacagctgcgcagtggctcgttggtaaagccgaggtgatatggggattggctgcaacgggtaaatgtgtctatatcgtcccttacatatattgaataatcttggaatataactcattaagacgtggagcacaaaaagcccctcagcttattgatatacgtaaaatcatcctgatagatttctatatctacttcgtttaatacggtattccctgtatttccctgtgcaaattttctgcttaatttttcagtcttcagtaatacatcagccatcaaccgcaccctccctttcatttaaaactaatgctttttttctgctgtccgctttccctgatgcttcattgcatccagcttcatcttatatgcaaatgctttctcacttggcttcagattctctctatgcaggttagagtcaaccattgccacaactgcttaatcatcatccaattcccttatcacaagcattaccggaactacatatttttctatctcaggcaatatctgatatgaaaatccaggattatccatattataggtaaaaatgaacagacattcattcatatatttcttcagaagattaattatatatttgctgaccaaagtatagtcaacaggggcacatccaaacttttctgtaagatcaattactatcgctcctccaaaatttccatctataatgtcctcaagatagtttcgagcactatacatatccggttctatctcagtgattagttccaatctccggctgcttacccgattagcctttattaagttctggataagtgtctctgccatatctcttacagcctcattactccgccaagatattacatagtgaaccatgtttcccctaaagtcggatgcattttcatgttcttcaatatttttaagttcatttataaatgactgatcatatagagcattcgcacagcttttgtctgaaacaattctctcctcgaaattataatgaaatgacagattttcattattatagtaattgtaaatccacaaatttgatgcctctataagtctgttcgttgactccattaagttccgccttcttgcctctaacagaaaatcaagagcctgatacattgttatctcacaaggttccgcttttattctggttatcgaaaagtctcctttgagtacatctgtaatatgaacaaatgaatcagcaaacacaactttcttttcatcatacgcataaagtattatattggttttctggaatttgaagaattaaaaacagaaacaaagcttctcaatattaataattataatgacaaatccttccaccaggcagtgctctccatcggacctgcaccatttgatctgattgaaaaatatctgccggcttattacacatatatagagtaggattttggttgaaatagcaagaccgggtgctttttaagtcacccggttcttgctatcgtctttataaaattctctttcaggaatttaaacttagcactttgaaaaatactcgcacatatcctgacacgcttcctgcgactcttcccaatcaggatctaatacattaaatacatggcctaatacatgttctcttccgacatactctttgtatacgtgtgaaacccctgcatcaacaaaaatcttatgaagcctgcagtcttcctcataaagtaacggatctgtcttagatgtaatgatcataatgcctgataagtccgttttatccagcaaatatggaatggatatattctttatatatgtctcatcgttcacatgatctttaaggacatatttgcgaagaaaacgacttgtcgtatctttgccgtcttttgctgtatataactccgtcatagggcagttggcaaccaccccacggatcccggaatcaaccggacgtatctgataatactcctgcagctgtacactcttttgaattgcagctaccagcattgcataatggccacccgcactgtcacctgttacaaataagcgggaacagtcaaagccataattttgtgcattcgcctcaatccagtgaagtgccgcaaatatctcacgcattacttcgataaaatcagcttccggctgaagcgaataattcatattaacgacacggtatcctttctctgcaaaaactttactgtatgcgtcgttaacaaatttttcacactgggtataaccacccccatggatcaccagaagaaccggcagttcaccgactgtattctgcggactatgtatatccagattgtgatcaggattggaatctcccatatagtttaagtcatataggctatctacagaaaactgcagattcttttgttcaaaacgttttttattatctttgatctgtttctttctcaaataacggagtaataaatccggacgcattttattctcttcctacgctttccaaatctgtaccttttgtttctttcacctttgtcatcagaagaatcatggaagtgatcaatgtaggcattgtgatgatgagacaggctgtcgtaatagccgtgccaccagccagcataactgtcagaaggattaatcctgtaaacagacccacataagataacagagtgatcgcagctgttgaagatgctctgttttccgttggtgccttctctgcagccatgatccacatgtaatctccaacctgataataagaaccaaggtagagaccataaagaagacctaccgggattgcaccccagccgtttttacatcctaatgcaaaaagcataaatgcaatgatggaagttgaacccatgataactgctgttttctttcttccaagactgtctcccatgaaaccacaaagcagtaacaacgctgcaaacatgaatgggaatgcaaacagtgcttttgtaacttcttctgtagccattccgtttgttgtcatgattgattcataataacctgtcatcgccatagtagagaacatatataagtttgcacaaagtactaaccaacgcagatccttatgtctaaggagcagtttgatggtagcccacattccaactttgttggcggatttcttctgctcttttgcagcttctttttcagcaattctctcttccagcggacgttccagaacactgattctttctgcaaggtatacctttgtctccctggcagttaacagacagagtgttgcaattgcaatcgcgatcagtaccggtacgaagaataccatacgccactttgtcggatcgttgcccataaagattcctcgaaacagtggcacaagtgccagtcccagagtaccgatgcatttcgtggtaccgtagaaacgtgttctcttatctgaaggagcaacttcaagaatataaacaacctgcatatcatgtgcaatgaaaaatgtagtgatcattgttccgataatataggaaccgaaagacttagacacaaagcataagcctaatccaagtgccataccataagtgttgatcacaaggaacggtttacggccaaatctgtccgccagtgatttgtagaatggtgccacaagctgaagcagaagtgttaccccactaaaggaagccagcacagccagaccattctcataggtcatgccctgtccgacaacaaaaaagtcattaacgacagatgattgtacataagctgcacagttcgaagcaatctcatcaataacatgtacaagtattacgagtacgaatatccatttgatgtacttcgcagtttccggcttttgattaatctttcgcagcctagttagttctttttgttctttttcttttcttttttcgagtgtcattataatttcctccacaataaattatatagtacatataccagatataattgtaccgtcaatgagagaataatttaatgattacattaacttgcggaacaatgcggtcagatcctctacacttgcatccttggggttaccgggtgcgcaggcatctgcatgtgcggactctgccaggaaaggaagatcttcttccttcagtgcttccagcttggaaggaataccaacatcctcagacagcttacggacagcatctacagcagccttacggtaggtagcctgatccatctgatctacaccttccacacccatagcacgggcgatctcacgatacttttcaccggtgcagtcagcattatattccataacgataggaagcatcattgcgcaggcaacaccatgaggggtatcatatacggcacccaaggtatgtgccatggaatgagcgataccgagtcctacgttggagaagcccataccggcaatgtactgacccagagccatgccttcgcggccttccttagtgttagctaccgcgccgcgcagggacttggaaatgatctcgatggctttcagatggaacatatcggtcatctcccaggctgccttggtggtgtaaccttcgattgcatgggtcagtgcatccataccggtggaagcggtcagacccttaggcatagaagacatcatctcgggatctaccacagcaatgatcggcatatcatgagggtctacgcatacgaacttacgcttgcgctctacatcggtgataacgtagttaatcgtaacctctgctgcggtacctgctgtagtgggcactgcgataatgggtacacagggcttcttggtaggtgctacaccttccaggctgcgtacatcttcgaattcagggttggcaatgataatgccgatggctttggaggtatccatggaggagccaccgccgatggcgatgatatagtctgcgccggatgccttgaaagcagccacaccatttttcacattgtcaatggtggggttcgccttaatatcggaataaatttcataagcaaggccttccttgtccagcagatcggttacctttccggtcacaccgaacttgatcagatccggatcggaacatacgaatgctttctgaaaagcatgagcctttgcttcggttacgatttctgcgattgctcctgcaccgtgataagatgtctggttgagcataattctgtttgccatgatacataatctcctttcgacataaaaacgatcttattgataattttattctaactgtaaacatcgcataaagaaagtgacagttttccccgactgtcactttttacagaaatttcatatttcgtccattacttttgttaatttttcacaaatatttttggttatttttactcaacgtaatacgcctaactgctgaaataagtctgtcaccggtgccggaaatgcacttactagcagcgccgccatctgctccggggttttctccttcggagcgaagatccattccacggtcatatcaatggaacctctgcaatagagccgcaaggggaataaaatattctcttcgggctgtctgccggtcttacgtctgatcagttgtgtatagaaatccaggatcagttcgtagtcatgttccctcagggaattgtggtcgtccgagcggaatgctcccgcgaaaaagactctctccttctgaataaattcaaactttctggttaaaccttcgtatacggtaagcccatcccccatcagtgcaaaagattccagtaagagcttatcaaaataccagttgatcaggtcgtatttgtcctggaagttccgataaaaagtctgtctcgtcacaccgcaggtctgcacgatctgtgtcacggtcatggcatcggtgccggaagccgccatacacttttttgctgcttccgccaggcggtattttgttttatccgctgaagtttcttttgtattcatttcgccttacctctgatctactaccgttcccggctttacatagttttccggtaattctgcttccagaaaagccgcagcatccctgacgcaatccacgcattctctcttcacgacaccgtcggtaatgccctttaattccttacagatcactgtcccgttctgtcccttgaagcgattgatgatcttccgggatccttgcattgtccgctggggattcttgttgatcagtccaagaatattgaccgctccgatgacggctccacaggtggcttccatgctgccaccgatacctgccgcgaaaccctgggtaagattcctcactgtctcctcgtcaattcccgccagatcacagtacgtgcacgccactgcctgcgcacagttgtaaccacacatttttctctctgctgcttgttccactcttgattccataattgttgttccttttcgtttgtattttccgatagccgtctatgccatatttcttattaattattataacagaaacaaaaaataggtaaaaggaaataatgctcattatcccaaactgttttaagtgtataaaaaattcctacaaattttaaaatcatgttgacattgctgtgggaagatgttattatcattcttgcgtgatgcgagatgattattattttgtatcgctatgcggaagtgtcggaattggcagacgagcaagactaaggatcttgtggtagcaataccgtgtgggttcaagtcccatcttccgcattagatagtaaagcgggaagcctgataattcaaggcttcctgtttttttgtttgtagccagttttgggttacagttgggttacaactttttactgcttaagaatcgagtatacgaattttccgcttcctgtttgaaattcttatcagaaaaacctctgacctgtctggataagttaatctggataatgtcaaacgatactgcataatcaaatatcatgttcataatagatttcaaatccttgaattgcctgtcagtcaaatgcatttcagctatcacatccacacaccattttttaatcgcacctgtggttaatttttcaaaagggatatcaacaatcgtggaatgttcaaaatatcgtttccatctggattgtagattacaggcgttggcataggatgtttccttggacttaaaatctatccattccgggtaatactagacccgaacctccccctctgggggagtgcgccattgtgctcggacgctacgccgtcctgttctcgaccgctccacctccgttccgcttgtctgcgctccagaacgcctgcgtctgtccgcacagtgggcgacatatggtatcatattgctttactcccacttataaatgatgaatgggaaccacttgggttcccattgctaaactacttattaaactactctatgatgatgtctccattttcatcaatcgttaatccatctccaaactctccattttcatacattctttgaaattctctatcatcggcgataccatgttcttccatgttatatccagtgaagagggttccacatggaaggtaatcacctaggtgaaatacttccccatatcgtggtgatccttccttaatgtatacagcgtagctttcttctgagccggctccctggcctgtgtaatagatccaacaccaattgcctgttgcatctgctccctgtgattgtgcatatgctgtccatgcctctacgctaccatatttatcacaaatctctgcattttcttttttgccaagagccatggcggtgtctccatccatgttggttgtctttgggtctacatcttctgggtttacatctggataaactatgttgtctgtaatttcatctgttaaactatctgttggctctgtctcttctgtggttgcttctgtttctgttgttacggtttcttctgtaactgtggtctctgcttgtgtggattcaatagtagtagggacggattctgtggtagctgtggtttcctgtttgccacaggaagcaaaagataaaatacatactgttattaaggctaaaatcgtttttcttttcataatgttcattctctggttattgcttaattaaaaatttatttaatctcttaacaaataattcttaagtcaaatcgtctgaccaatacttcattgcaataggctctagtattactcctattacatcactgtattggtctgtaaaaaatgtaagtgcatagtagtaatcttttgttgaatcaagtttcaagaaataagtgtactcgtcagtatcttttaaatcatcatgtgcaaagtattgtttaatacatctatcatacatatctgcttgtccatataattcaaatactttgtctatactatctccaagcttgatacctcttactgtgctctccagtacatcaccatcatctgtaaattctcctgacagaatcatagctgcattgtctgcaactatatatgcatttccattatttcctgcctctatatattctttgtaagtattatacccaaggaaactaaatgcaaggtctttttctgagaatggttctccttttgttatgtctgctgcttctagcatttcttctgtgctttctgttgattcttctgtactttctgttgtctcagttgtttctgtttcattttcagttgtgttattctctactgtttctgttgactcaactttctctgtactctcattttctgttgcctcaactgtttctgttggttctgcttgtgtggattcaacaatagcagtgacggattctgtggtagctgtggtttcctgcttgccacaagctacgattgataatcccattattaagctcaagattgttaccagtatttttcttttcataatctttattcctcgctttgtaaagtaaattcttacccattatagcatatatttttgcatttgggttacaaactgggttacaagcaaaacgatgtgtcgaaagcctccttttttcggtactttcggagatgcccagaccttcaagtcccatcttccgcattttttattttacaaagcaatcctttaaaaatgtaagttttcaatcaagctcaatcttctgaccaatactgcattggaataggttctattacaactgcaattatattattattttgatctaccctaaatctaaatgcataaaaatacgtttttgttgaatcgagttttaagaagtagctgtatgctccggagtccttcaagtcatcatgcgaaaatacatttttgccacaatgtcaagtgatgaattggtgtcaaattatctatcttgaagctataagggcaattcaatataataaatagggataagcaatctatctggaaaaaaattttataaattttataaaaaatgaagccacactatctttttacagtgttcattcgttatacatggtagaaagagaaatgcgcattgactttca

SEQ ID NO: 11304 - DNA, 14417 bp, Unknown
  gut microbiota DNA sequence
ggatcgtaacatccactgtgcgcgtggcaggatacccggatgctgtggtatccgtgaagaccgcttctgacattccgaaaggcaagatggatgactgcatgaaagctctggcaggagtcgctgtcgctgcacctatccatgtaggagatatcatcttggaaaatgtagctgacacgggtgtcgatatagtggcaacccgatcgtttcggggataacaaaagatatcgtataattagagcaatgaccacatatcccaaccgcttccgtaaacctatctgagtgggatatgtgtccattgtgaggaaatgaacaacgggaggttacataacagaatgggagatatacagaacacacagaagaaaacatacatcatggcactggatcagggtaccaccagttcccgctgcatcctgtttgacaagcagggtaatatctgctccatggcacagaaggaattcacacagatctatccccagcccggctgggtagaacataaccccatggagatctggtcctcccagctgggagtggcgatcgagagcatggcagtcctgggtatcacggatgaccagattgaagccatcggcatcacgaaccagcgtgagacgacgatcctctgggacaaaaataccggagaaccggtatacaatgccattgtatggcagtgccgccggacttccgatatgatcgaggaattgaaaaaagacggttttgacaaaatcatccgggagaagaccggattgatccccgatgcctacttcagtgcatcgaagatcgcctggatactgaataatgttcccggagccagagaacgcgcagagaggggagagttactcttcggtacggtggatacctggctgatctggaatctgaccaagggcgccgtacatgtgacggattataccaatgcttcccgaactatgcttttcgatattcataacctctgctgggatcaggaaatcctgaagcgcttcaatatcccggagagtctgcttccgaaggtgtgctgttccagcgagatctacggcaagaccgatgcgtccgttctgggcggcgagattcctatcgccggtgcggcgggagaccagcaggcggcgctgttcgggcagtgctgctttgagcagggagaggtgaaaaacacttatggaaccggctgcttcttattaatgaacaccggacacgaagccattacctcccagtccggtctgttgaccactattgctgccagcacaagcaaaaacgtagaatatgccctggagggcagcgtgttcgtagccggtgccgggatccagtggcttcgtgacagtatgcgtatgcttaagacctccgcacagtcccaggagtatgcggagcatgtaccggataccgcaggggtctatatcgttccggcatttgcaggcatgggagctccctactgggatcagtatgccagaggtacaattgttggcattaccagaggctgtactaaggagcatttcatccgcgccacgctggaatccattgcataccagaccgcagatgtgctggaagccatggagaaggacagcgacattgatttaaagagcctgaaagtggacggcggcgccagcgccaatgacttccttatgcagttccaggcggatatcgtcaacacccaggtacgccgtccggcatgtatcgagacgacggctctgggagcggcttatctggcaggacttgccgtaggctattggaagaatcgtgatgagatccgtgagaactggcagatcggagcagcctttgcaccgcagatggaggagacacagcggcgacaactattaaagggctggcatcgcgcagtgaaatgcgctcttgcatgggcagaggatgaggtataaattttatatgaccatggtattttttgacaaagcaaacttgtaatgtaataaagtactgtggtattatgatgtctgggtgaaaggttatcttgcaacccagacattatatttttacggaatgaattgcagtaaggggttaaggggagttcacggaaaggaaacaggatggatttaaacggcttaccacagaccgtgcagaacttcataaacgatactatccaatatagagaaacaggcagctgtctggactatgatacctgccagaaaatattggagtatgcggcagataccggatcacagaagctgacagggcttggactctattatctggcggagtgttattggcagaagggcgagtatgagaacaccatgcaatgccttacagagggtgtcggctgcctggaaaatgcccggatgtacgagctgttggccaaagcccataatatgatgggagcggtgtccgaccggaagaataaccggatgttggcgctcagctcctactataacagcctgaaatatgcggaaaaatatcatttttattatatacagggcatggcggagagcaatattgcctataccctggtcagaatgcgcctgcggcaggaggcgatacagcattaccgtatagcgatcgcctgctatgataagtcggaaaaaacatatcagctgaattataacaggatcaactgtatgatcgagtgcggctgctgtcacatgtacctgggagaaatggaagaagccctgcagctttggaatgaaatagagcagattctcagagaagctcccgaaagctattattcgaaaataacattggaaatgtatcgtattccctgcgaattattaaaagggcatgaggaagaggctttaaagcttgcgacagatcttctggagcaattgtcagaccgggatatttttgaagagttcatggatgaactggtgatcctggcgggaatcctggcaatcctgcccgacggaaaatatctggaggaactgatccggatcattgatgaaaaaaatgttgaagcgtattacaatatcttcctggatctgtatccttttaaagtgcagagcatattacgcaaaggagacatgggggaatatgtgaaatatacccggcaatatttagaaacatatgaaaaattccggcaggaaaatcaccgcgccttggtcggtgttatggaattacaggaccggttgagaaatgtaacgcttgacagagagaatatgagagcctctaaccgggtactggaggatcttgccatgcatgatgaactgacggaattggctaatcgtacttatttgcacgaatatctgaccagctgctttgaacatgcctatgcggaagaaaagcttctgggcgtggagcttatggatattgattttttcaaagagtacaatgatcactacggtcatctgatgggggaccggtgtctgaaagccattgccggagttctgcaaaagatacagattccgggacaggtattttgtgccagatacggtggcgatgaatttatgatcgtatataccgggatgacagtggagcagatccggagaatttcagaggacattctcagagaggtgcgtatgttaaaaataccgcatgagtgcagcaggtgcagtaaatacgtatctatcagccagggagtctttgcaagaatcccgatggaaaataacagagagtgggatttcacttccagagcggatgatcttctctataaggcaaaaaactgtggaagagacggcatctgtctgtccacagaaaagtccagtgataagtgtatagagatcaaataaacagcgcagacagcgcggatgggagagcgtagtatgttagttcagaaatacaaagacatgctgtcgggaaaatcagtgatccggcagctttcggaattcgctacggcaagaggacaggagatcggatacgagaatgtatttgattacagcctggggaatccttccgttccggttcccagagaatttaccgaccgtatgatccatatgctggcgacgaaggaaccgttggaactgcacggctatagtcccagcctcggtattacaagtgtcagggaggcaattgcggagaacctggagaagagattcggcctgccctatcgcaaagagcacatttttatggcgtctggggcggcgggagcgctggcacatgcttttcgtctggtgacggaaccgggagatgagatcctgacttttgcaccgtttttcccggaatatcatccttatgtggatctcaccggggcagtactgaaggtggttccgcctaatctggagaacttccagatcaacttcgaggcgtttgaagagatgctgacagagaaggtcaaggcagtactgatcaatactcccaacaacccctccggtgtggtatattccaccccgacattgcagagactggcagatatcctgagagaaaagtccaaggaatacggtcatattatttatctgatctctgatgaaccttatcgtgagatcgtgtttgaaggcgtagacagtccctgcgtatcctatttttatgacaataccatcatgtgttattctttctccaaatcactgtccctgccgggagagcgtatcggttatgtggcagtgaacccggcatgtgaggatgcggagaccatgatcaatatgtgtggacagatctcccgcggtatcggacataactgtcctccttccattatccagctggcagtggcacaggtactggacaagacagcggatctgtcggtgtatgagacgaatatgaacatcctctataaagaactgctagacctgggattcacctgtgtgaagcccggcggaactttctacattttcccgaaggcgctggaagaggatgccaaggtattcagccagaaagcattgaaatatgatctcgttctggtaccgggcgacagctttggtgcccccggatatttccgcatggcctactgtgtggacacggagaaggtagagagatctctggaagcctttcgaaaatttgtaaagactgagtacggaaaggagtcattgtaagatgtatcaggcaggactggtattggaaggcggtggcatgaagggtgtctataccgccggagtgttggacttttttaccgaaaaaggaattgacttctcccatatctatggggtgtctgccggagcgtgccatatgtgcagctatctgtcccgacaaaagggacgggcgctgagtgtcagtgtggactatctggatacgagacgatattgcagtctggagagcttattgaccagcggagatctgttcaatgtggatttctgttatcatctgatcccggaatatctgtatccgtatgactatgaaacatttgaaaaatatcccggcaaggcctacagtgtggtgacgaacatcgagacgggacagccggagtatctgcgtgtccgcgatatccgtaaagatattgacaagatccgtgcttccgcatccctgccgttagtggcacggaatgtaaaaatagatgggaagctgtatctggacggcggcatcagcgatgcgatccctttggaaaaatcgatcctggacggcaaccgcaaaaacatcgttgtcatgaccaaggaagtgggattcgtgagaaaacctgcctccgcatcgcagttaggactcataaaactcagatatctgaaatatcctaaagtatatgaacttatggcagacagacatatccgttataatgagagcctggactacatcgaaagacaggagaaatgtggtcaggcattcgtgatccgtcctcataaaaagagtgatgtgggacggattgagaaagacaaggacaaactgatcgccttgtacgaagaggggtatcgggaggcagaagcctgctatgaggatctgctggcatatctggaaaaataagtactaaaaatataagaaagtatagagagaaaagaaatgttagaaattatcaaagcgattatttacggtattgtagaaggtattaccgaatggctgccgatcagcagcacgggacatctgatcctggtggaacgtctgatcccttttcaacagaccagtgaaggatttttcgatatgttcgatgtagtcatccagctgggagctattttagcggtggttgtattgttctggaacaagatctggcccttttacctgaagaaaaataagcagccgaaaaagggaggcattgtaaaatccgcaaaagatcccgcagtgggaaatgtggcactgagcatggatgctttctggatgtgggtgaagatcgttgtggcatgtatcccggcagtcgtatatggtctgttatttgatgatgcggtaagcgaagccttccaaaaagagatcggaagcagcggcgttacgatccaggtcatcgtggtggctgtaatgctggtagtggtcggcgtactatttatcgtgatcgagaattggaataaggaccgtgtacctaccacaacaaaattgtctcagctgacctacagagatgcactgatcatcggtctgtgccagctggtagcggcggcactgcccggaacctcccgctccggagctacgatcctgggagctattatgattggtatatcgagaacagtggcagcggaatttaccttctttctggcgattcccgttatgtttggagccagccttctgaaggtactgaagttcggattcacattcacgggaatggagcttgcctgcctgctgatcggtacggtggtatccttcattgtatccctgtttgtacttcgcttcctgatgggatacatcaaaaagcatgactttaaggtcttcggatggtaccggatcgtactggggattatcgtattactgtacttccttgtattcgcataacagttgacaattatagggaaaaggaatacactacccttatcgagcaccggaatacggtacttgtgaggagaatgaaaatgtttttgtacatgattcgtacagaagggagacggtaacatggcaatagttaagaaaactgtagcaccagtagcagcagcgaaagtggaagcgcctaaggcagaagtgaagaaagcagcaccgacaactccagttaagacagaaactaagaccgctgtgaaggaagctgagaaggcacctgtagcaaaggctgaagtaaaagcacctgtaaaggcagaggttaaaaagcccgcagctaagaaagagacagcaaaaaaggaaaccgctaagaaagcacccgctaagaaacccgcagcaaaaaaagcagagttaaagagcgagatcagtgttcagttcggcggcaagtcctattctcaggaagagcttttaaagattgcaaaggatgtatggaaatacgacctgaagcagaaggcagctgatctgaccagcgtagaattatatgtaaaacccgaagagagcatggtttactatgtaatgaacaaagagaccaccggaagcttctacatataaactattcagagtaataaaaaataagtatatatacgttgaatgcttgcattcataaggatatatacttatttttatattacgaagtaaccctatgagcaaaaggaaagcaccgaaggtgcggttttgcgaatagggtctgaatagttcaccaggccccaaagttgaatcatcgctttggggtctttgtatcatcatatgtatgatcaggatcaaaatgttaaaggatgacagaatgcagaaaaaatcagaaaagattattctcacattatatctgctgggttttctggcactggcgcttaccatcgccctgttgcagcccctggccaatacaccgcccctgttcggcaacccgcccgatgagcatgcgagatatctgatcccgcagtttatctgcagatacggcagaatccccacgggactggaggaagaagtgcggattccggcgtatggattttcttatgcgttgtataacgtgtttccttatattgtacaggggtatatcatgcgttttgtcagcctgttcacggaatccgagatcgcgttgctatacacggcacgcctggtgaatgtgactttcggactgctgatggcagttgttgtatactttatcgggaagagagtatttcaggatgacagattccgctggctgttctgcttcgcggtgacctatctgccggaaggactgtttatgcatacttatgtgaatacggattcctgctgcatgctgtccacggcgatgatggtatatgcgctggtctgtgtctacagggacggcatcaacgtccggaacagtctgtggatgagcggaggtattattttatgcgcactttcttattataatgcttatggatatatcgtaagctgcattttactgtttgtaatgttctttttacagaaaaaggagagtggcggttattcttatgactggaagaagatgttaaaatatggctgctttattgcggcggtggtcctgataggaatcggatggtggttcattcgtagttatatagtactggacggagatctgttaggacttgacacccgggaaaaaatggcaatacagtatgcgatagagagtgtgaatcctctgacgatgcagacctatcactccatgggatatacagtattcgaaatgttccgggaacgatataccttgtccggactgttccacagctttgtgggagcattcggttccatgtccatatatggctccatctggctgtaccgggcatataaagtattttttgcagcaggcattgtgggagcgcttctgtatctgatccgttataaaaagcggcgtaaaatatccggaagagaatggttctttcatatcaatatgttgtattgcattttcatgccggtttttctgacaatttattatgcatataccacagattatcagaaccagggacgttacctgctcccggcattgatcccgctaatgtattacatgacaaaagggattcagaagctttcggaaatcagcttcagaggcaggacttttccgagatggctggtaaatgcaggcattgcggtatgcttcctgatcattatcggaggcacaatagaaatggtatatgtacgggcacttcccgtgtatttagagacaggactggtactggaatagtgccggtcctgtttttatattttattaataatctttagaattattttccggaaaatcggttgacaataatacccggtagtgatattttagggtaagaagatgttagcactccttttagatgagtgctaataatcccaaagggagtgatggaatgcaattggatgacagaaaaagaattatattgcaagccattatccggaactacttggaaacgggagagccggtaggcagcaggaccatttcgaaatatacggatctgaatctaagttcggcaaccattcggaatgagatgtcagatctggaggagatgggttatatcatacagccccacacttccgcaggaagaattccttccgataagggatatcgcttctatgtggataccatgatggcgaccagagagcaggaagtcaatgagatgaaggatatgctcttagagagacaggataagctggagaacctgttaaaacaggtagtcaagaccctggctcagaacacacagtatgccaccatgatcagtgctccgcaggtacatcataacaaggtgaagttcatccagctgtcccgggtagatgccggacagattttggcagtcatcgttgccgaaggcaatgtgatcaagaacaatatcctggcagtggatcgggaactggatgatgagacgcttttgaagctgaatatcctgctgaacacacacctcaatggtttgtccatggaggagatcaatttgggaatgatcgcagcgatgaaacagcaggccggaatccacagtgagattgtcagtgaggtgattgatgccgtggcagatgccatcaaggcagacgaagatctggagatctacaccagcggcgcgaacaacattttccggtatccggagctggcagatcagtccaaggcaagtgaactgatcaatgctttcgaggagaagcagcagttaggcggtctgatccaggaatccctggcagacgagggcagcacaggtatccaggtgtacatcggagacgagacaccggtgcagggcatgaaggactgcagtgttgtgaccgctacttatgaattaggcgaaggcatgaagggaaccataggaatcataggtcccaagagaatggattatgacaaggtcatcggaacgctgcggacggtgcagaaccagttggatgatctttaccgcaaagaatagacagattccagaaaggaaagtaaaaatggcagatcaggaaaaagaaatattagaggaagaaatggaacaggatctttcggatgccgaagaactgaaggaagaagagacagaagatgaggaacctgtgagcaaggaagataaaaaggcagcaaagaagcaggcaaagctgaacaaaaaggaagattcctacaaggagaagatcgatcagctggaagacagagtaaagcgtcagatggcagagttcgagaacttccgtaagagaaccgataaagagaaacaggcgatgttcgataccggtgccaagagtgtgatcgagaagatccttccggtagtagataattttgaaagaggtctggcaacggttcccgaggaatccaaagaagatccttttgtagacggtatgaaccgtatctacaaacagctgatgacagagcttgagaatatcggtgtaaaacccatcgaggcagtcggacaggaattcgacccgaaccttcacaacgcagtgatgcaggtggagagcgatgagtatgaatccggtgtggtagcccaggaacttcagaagggctacacatatcatgacatggtcgtaagacacagcatggtaggcgttgttcaataatttgattatcacatatttttgaaaatagaaactataaaatgaaaacagagagtaaaaacaggaggaaaatattatgagtaagattattggtattgacttaggtacaaccaacagctgtgtagctgttatggaaggtggtaaacccaccgttatcgcaaatacagaaggcgcaagaaccacaccctctgttgtagcatttaccaagaccggtgagaggctggtcggtgagcctgcaaagcgtcaggcagttaccaacgcagagaagaccatctcttccattaagagagatatgggtaccgatcgtggccgtaccatcgacggcaaaaagtattctcctcagcagatctccgcaatgatcctgcagaagctgaaagcagatgcagagagctatctgggtgagaaggttaccgaggcagttatcacagttcccgcatacttcaatgatgcccagcgtcaggctaccaaggatgccggtaagatcgcaggtctggatgtaaagcgtatcatcaacgagcctaccgcagcagcacttgcttatggtctggacaatgaaaaagagcagaagatcatggtatacgaccttggtggtggtaccttcgatgtatctatcatcgagatcggtgacggtgtcatcgaagtactggctaccaacggtgatacacaccttggcggtgatgatttcgataacaagatcattcagtggatgctggatgaattcaagaaggcagaaggcgtagatctgtccggtgataagatggctatgcagagactgaaggaagcagctgagaaggctaagaaagagctgtccagtgcaatgaccaccaacatcaatctgcctttcattaccgcaaccgcagaaggacctaagcactttgatatgaacttaacccgtgctaagttcgatgaactgaccagagacctggttgacaagaccgctatccccgtacagaacgctatgaaggatgcaggcctgaattattctgatctgggtcaggtactgttagtaggtggttccacacgtatccctgctgtacaggataaggtaagagcattgaccggtaaagagcccagcaagtctctgaatcctgatgagtgcgtagcaatcggtgcttctatccagggtggtaaacttgccggtgatgcaggtgccggtgatattctgttactggatgtaactcctctgtctctgtccatcgagaccatgggtggtgttgctaccagactgatcgagagaaatacaaccattcctaccaagaagagccagatcttctctaccgctgctgataatcagaccgcagtagatatcaacgtagtacagggtgagcgtcagttcgccaaggataataagtccctcggacagttccgtctggacggtattgctcccgctcccagaggaatccctcagatcgaggttactttcgatatcgatgccaacggtattgtaaatgtatccgctaaggatctgggtaccggcaaggagcagcacatcaccattaccgctggctccaacatgtccgattccgatatcgagaaggctgtcaaggaagcagctgaattcgaagcacaggataagaaacgtaaggaagctatcgaggcaagaaacgaagcagactctttcgtattccagaccgagaaggctctgaacgaagtaggtgacaaggtacccgagagcgacaagactcaggtacaggctgatctggaagctgttaaggcaatcctggagagaaccaaggatcaggaaatgagcgacagcgatgtagatgaattgaaggctgcaaaagagaaactgacccagagtgcacagtccgtattcaccaagatgtatgagcaggctgcacaggcacagcagggagcccagggcgcaggtcctgacatgaatgcacaggccggtggcagcaatgcaggtggttccgcagatgatgatgtcatcgacggagatttcagagaagtataaataacttcacaaatagagcaatccgtgatataacagtaaatgctgtgtaacagtgattgtgataacaggcggcacagggtatgcgaaagcgtgccctgtgcataaccgtcttaagatttatgtgatagaggtgcagaaatggcagagcaaaagagagactattacgaggtcctcggtgtagataagaatgcagatgatgctgcaatcaaaaaagcataccgtgtattggcgaaaaaataccatcccgacatgaaccccggagacaaggaggcagaacagaagtttaaagaagcttccgaggcttatgccgtgctgagtgatcccgagaagagacgccagtatgatcagtatggtcatgcggcatttgacggtggtgcaggcggagccggtggatttgactttaacggtgcagacttcggagacatcttcggagatattttcggagatatttttggtggcggaagaagcagaggtgccagaaataacggacctatgaagggcgccaatatccgcaccagcgtgcatattacatttgaagaagctgtttttggctgcaagaaagaaattgacctgacggtaaaagagacctgtaagacctgtaacggctccggcgcaaagccgggtaccagccccgagacctgtaccaagtgcggtggtaagggtcaggttgtatttacccagcagtcattctttggtacggtacgaaatgtacagacctgtcctgactgtcagggaaccggtaaggtgatcagggagaagtgtccggattgtcgtggtaccggatacattccgatgaagaagcgttatgcagtagatattcctgcaggtattgacaacggacagtccacccgtatgccgggactgggtgagccgggtgttaacggcggccccagaggcgatgtgctggtagaggtaattgtcggtcgtcatccgatcttccaaagacaggaatttgatatcttctctaccgttcccatctcttttgcagtggctgcactgggcggggaagtactgatcgacaccgtagacggtaaggtggtctatgatgtgaaggcaggaacgcagacagataccaagatccgtctgcgcggcaagggtgttccttcctggagaaataaggatgtccgcggtgaccactatgtaacactggtggtacagacacccgataaattaaaaccggaggcaaaggaactgctgaagcagttcgatgcactgaccggagattccctgaatgcagtgaaaaatgcaaccgaagcaggagaaaacggatctaaggagaaagactccaaggatggcaagaaaaagaagttttggaaataagattggtagcgccttttgctgacaatcttatgaatagcgtggctcattgcggagaactctgtatttaaaatcctattttttactaaaaaaatacaaaaatacgagattttaccatgcaaaaagctgttattttcgctgagcgtgcaaaatgaagaaattccgtacaaaaattccggatttgggaatttttttgtacggaattcattgtttttagagtttttacaccaaactaacttgaaagttaaatgaatagttgctttaaaatccacgcagaaagggctgcccgccccggactcggatgctggctacaactgtggattttctaaagaaaagtggccaggtgtttttcatcatgacggggccgcctttacgttgccatccatggcacttatcggctaacgcgaacatcgtgttcgcgttgcccctgcggctcaaccacttt

SEQ ID NO: 11305 - DNA, 46910 bp, Unknown
  gut microbiota DNA sequence
caggatgttgttgttggagtacttaaccatctcagtagccatatcggtatcacggatctggctctctgcgctggtggtattctctacaacgttatccaggttgctaatggtatgctctagacggttctgaacagcaccaagtgcggaacgctgggtggataccttctggatagcttccttgatggtctcgatagagcccttagcgttggtgtcatcggttccgtcaaccttcagaccgtttacgcctaagcccttagcagacatagcgtcaagatttacgctgatctgattgttggatgtagcatctgcacctacatgaagagtcagagttaaagcacctgtcagatcctgcttagcagaaatgtctgctacagctgcatcaatcttatttcctaaagcatcatataccagaggagcatccgcttttactgtactggaaacagttccagcagcgttagtggtagatgagaagtacttgctcagtgcattttcaggaattccattgccgtccttgtcataatactttacagtgtcaccatctttatagcctgcggttgctttgcttgcggtaaatgtctcggttccaggtgtaatcgcatccgctttatccttctctccaaggttggcattttccaatgtaaatgttgcaatttcatttcccttagcatctttaatactgtaatcattacccgtcgtattcgttacagtatacttatctgtgccatttaacgaaactgttgcgctattaacaaccttaccagtagtcgcggaatctttgctactatactgaacattgataccctgatctctgatcaatttagcaacttcattctgttcgtccgcagatgccgttgtcttaaaggtcatagttgtaatcttagaacccttggttgatgcagttgtagacatcgtagcggttgcagccttaccagtagcagttgcataagaataggtatatgctttctcattatcctgatcacccttcagcagataggtctcgttgaacttagtggtctcagcaacacggtcgatctcggtggtcagctggtcgatctcgttctggatgtagcttctatcgtcctcagactgagttccgtttgcagccttaacagccagctcattcattctctgcagcatatcctgaacttcgttcagagcaccttcagcggtctgcactgcggagataccgtcctgtgcgttgctggaagcctgtgtcagtcctctgatctgctttctcattttctcactgatggaaagtcctgctgcatcatctgctgctctgttgatcttgtaaccggatgataacttctcagtagacttagcctgggattttgtggtgatgcctaacattctgttagagttcatagctgtaagattgtgttgtactaccataatatattcctccttgaattgacgagcgcttccctgcgctccgttatttgctttggcaatgtcagcttcaagttcgcacatcctgttaccttcatcgccattgtcttccgtctctccggcgtgcgaaaccttcgattcggaagaggttcggtaagcaaatgttttatttgctttacttgttaagtatatcggagaggattttggaaacttaacccctctttgaaaaaaaatttgacttttcattccggcatttttcgaaaatacgatattcttagacatttacatcatgatctgctcaaattttcccatgtcacagaaatcctgaattttcacgttttaatgctgcagcaaactcattttcggctattacatattctgctcattttgccgaaatagatagtaacaacataatgaagcggagggtaattatgcaagtaaaaaattattcctattttgtaggggaagatcaagtacaaaacagacgtcattctgtatcagatggcaaaaacggcaaagcaaaaaacggtggtaaatccatagatgcccgcagtatggcttccgtcaccgatccgatcgctacaaagaaggcccaggttcggaaaaaagctatgaagatcatcggggatgcctttgccggagagagtaagattgatgacgatatgacaaatcgcagagaaaaaatacgctctctcaccagggaaatcggtgacagcacaaaggcgatcagtgatatcgaagcctccagagccgccctgcaggataaattcggtgtgtcctcagacagccaggaacaaaaagatctggaactactggcaaaaggcgtagagaccggcttctccggttcggatgtccgcttaacgaaagaggaagaagaacagattgccaaaataaaagctgccggattaacagaataccagcagcagtctcttgccttaaaaaaatcagaagaatcctatgtcaacgaacttgccgacgccaggaatgagattcagacagaaaatgccgtgatccgccagacgaagattgaacggttaaaatccaattccatgggagctgcatttgagcaggcagatgcagtaatgggcgctgccagcgacgagatcatgggcatgctgattgcggaaggcaaagaccacatcgacgagaagcaggaagaagagaagaaaacagccgaggaagctgcagacaaaaagaaggaactggaagaaaaactgcaagccagaaaagacgaaaagaacgagcaggaagagctgacaaaaaatatcgtggaagctgcgaacaagcaagccggtggtacagacagcgtagttcaggcccagcaggagatcaaggatatgatgaacaaattaaaactggtcgaagatgacgtcaaaggtgccgcggtcgatcagggaatctgactattctgccattcatcaacaacgtatgaaaatttgctttcgctattgccaaattcacttctaaaaatcgcgcccaacatccgatatcgaatggtgggcgcatgatttcttccgttatttttcttgtataatagtcctataccaaagtgaaaaaggggaaacgattccatgaaaattgcaatatgcgatgacgataagaatgaactgttccggatactgtctgttctcgcagattaccagacacagcgaaacatagaattttcctacaaacctttcgacaacagtacggagctggcgtcgaatcttttacaggagcattatgatatttatctgttggatgtggtgatgccgggactgaacggcatcgaactggccaaagagatccgaagcagtgacaaggccgcagacattattttcctgacgtcttctcccgaatttgcggtagagagttataccgtgaaagcttccaattacctggtgaaacccgtttaaagagaccggctggttgaagctctggatgacatcatgcgtaccagaaccgaagaccgcgattcctgtctggtattgaagagcagcgtcggcgtacacaaagtccatatgtctgaaatcatttatattgaagccttgaaccgaaaaatcatttattacctgagaaacaacagtcagatcacctgcgtggaaaagtttgcttctgtctgcgaccagttgctgcaacacccggaatttctccttgcacaccgctcttttctggtcaacatgaactatattcgcaggatcgacgcagccgacctatatctggcaaacggcaagtgccttccgcttgcccagcgcaggatctcggagatcaagagactctaccttgcttttcaaatggaggaatccatatgagtgaatttgtatcccttttaggacttatcaattacggctttgtccttttctttggtatcgtgatgtctctctacctggcagatatccattttgaggacaataagatcccttatatcatcacgatccttgctttgggcgcaatacagcttctgtcttaccttatgatgggggagaatctgctctataaatgctatccgctgctcatacatctgccgctggtcctcctgatccgttttgcctttcaccggaatatctatatcgcgacgatctctgtgctgtccgcttacctgatgtgcactcccagaaaatggttcggcacgctggcagccttctttttcgacggcagtccggttgtagccaatctcgtctctatctgcgtgacgattccgctgctgtatctggtcatccgctatattgcgccttatatcatccgtctgcattatgagaataagaagactctgttgctctttttcctgctgccgctttcctattacattttggaatacactctgaccgtttacacagatctcttgtataccggtggtccggtcattattgatttcatggacagctttcttgtgctcttcttttttatcctggctatggtgtcgctggatttttccaataaaaaaagcacggcggaacgtgaaaatctgctgcttaccaccgcagccgcacaggcgtagaaggagattacacagttatccacttctcagaagcaggcgtccatctatcgtcatgatctgagacatcatatgacctttttgcaaaactgtattgcagaaaatgagttggaacaggctttggaatatattcaccagatctgtgccgatatcgataacagccgtgtgatcagatactgtgaaaacgacgctctgaacctgattctctcttcctatgccggtcaggcgtcagatgccggaatcgaattgcaatttaccgtgactgccaccgattttacacgctttcagatcactgatttgtgcagcctttttgcaaatgctctggaaaatgcgatttacgcctgcgaaaagattcctgctcctgagaaacgctatattacgctgaaagtttatgaaaaaaataaccggatctgtatacagatagcaaacagctatctacaggagccggtatttgaaaatgagattcccatctctcacgaacccaatcacggtctcggcaccaaaagcatgatctccgttgtagaaaaatatcacggagtgtatggattttttgctgaggatgggaaattccggtttcaggcatcactgtaaacagtctggtttacgttcctttacgtattttctaatatatatacgtaatgagcatgccacttcttacagtaaccacaatttttctaatccgaatgcaatatttttttattttttatttttttcttacttagggataaagacgtatacgcaaaaacatttttgaaattataggtccctgtctgatattcaggcagggactgtattttagatcatccagaccggtacgatataattgtctctgtcaatcgcactaagtcccggtttcatgcagataactgcgcccttcgcacgaggcgttgatgccttgtcgagtaattcaaatacctttaccagctctgttccgggatttgcagttttcttaatctcaatcggattcaatattccatcatgttccaggacaatatcaatctccctggcatctttatcacgataatagtacaaatacggctcttttccacaattcaggtaggttttccgaatttccgcgaccacgtaattttccaaaatggccccgttcatagcaccgcattctaacgtttccgcactgctccatttcgtcaggtaacacaccagacccgtatcgtagaaatacagttttggcgttttcacaaggcgcttcaacaaattattagaatacggatgaagataaaaaataattcccagcgtttccagaattgtcagccaatccttcgcctgcgtctgattgatatctgcatctctggcaatctctgccgcgttaaccatcttcccacatcttgctgccaccgcagtaataaaccggaggaacttaagcgaatctatggcattcgataattctcttacatcccgctcaatataagtagacagataactgctgtaaaaaagctgactgttactgttaataccgcttacgatcgccggcatggagccttgataaatccgctcaaagatctctcttgtatcagcttgctctctctctttctgcctctcgcttaaatcctccagatctaccgtaaacggtttcatcgttcctccggatatctctgcctgtgacagggatgtaagtgaaagtactgccactcttcctgccagtgactcctgtactccctgcatcaatttgaacacctgtgatcccgtaagccaaaatgctcccggctcatggtttttatctacatatatcttgatataagtaaacagttccggtgcatattgaacctcatcaatcaatacaggtggtttatgcagttgcagaaacagttccggatcggtctttgcaatatttctttcgttcaaatcatccagtgttacatatccccgctccgttccctccatcagtttttggagcattgtcgtctttcctacctgtctaggtcccgttaccaggagtaccggatattccctggttacctgtcttactacattctccagatttcttttgatataattcataaaagcccctctttcggctaatcttttttatgattatattttagccggatttttttaaaatatcaagcatttttcggctaatctatactttgattatattttagccggctcacatttttattctttcacattgattctgtcataaaaaagagaagcagtgatctgcttcccttcgtctgttgtatttattgtttattatcgtacatctgaggcggtacgtatccggcgccgctcatgctcttgtagtagtcaaacgcgcttttggcatttttacgtctctggccgattccggcacgttccctggcgaaatagttctcgaccagtttcttgttccgggcttcctgtgcctgtacggacacgctgagttccgtcaccttggctacttttgcctggagttcccggatctgtgctgcatagcgctgtctgttgccctccaactccttcgccagcttctcatacaggatctcgaagccttcatccaggcggacgacctcatcgatcaggcgctgtttctcctccacggcatcatcgaacaggctcatgtccactttttccgcagaaaagatttcttcctgacgcttattatattcccggatcttctgcagtacttccagcttcttatccagactttccgataaaatggtcagctgattctccatcagtcatttcctttcttggcaccggccttcatgacttctttccagttgtcgcggatcgaatggagatgcgtgttgatctcttcgagaatctccttatcctttttgacattggcttccaccagccgtctctccagatagctgtaaatattatcgaaatccttggaaacttcgtatttcatatccagtgtggaatgcagatatccgatgatattctgcaccttgcggatattctcatgcgctctgggaatgtcatttttctctatggaaagctctgcgatgttacagaacttaatggctccgtcgtaaagcataagcgtcagttctgccggagatgcggtcagaaccttgctgttattatactgtgcatacgcactgggtaatgccatatcatgatcctcctaataagccggtcaccgcactggaattgctctgcagctttgcaagagccgtctccatcttggagaacttggaataccatttatcctcgtaatcgttcagcttcttctccagttcggagatcttcgtcttataatcatcataatccgatttcatctttttgtcatcataaaaattaccgtaggagcgataaccctctaccgatttggacagatcactcattttcgtatacagattcttgaacagtccggagaaaaagcttacgaccgtatcgggatcactgctgatcatgctcttaagcttgtctgcattaccggaggtactggagtcatctgcatctccattgatatggtaggcattcttctcattctccgctgcggtaaagtagctcagagtctcaataccaaaatcgctgagatacatgttcttgccgtttacttccacactgcctgccataatttcttttaaggcagagcttacggtagacagattgctgtctctgcggagcagggcatccttgatcttctgctcgtatttctctacctcggagtcggacatagcatccttctcgtcatcggtcagcggctcatagcctctggcagaatctgcattatacagcttatccatctcattgatgatggaattgtaatccttcaggaagctcttgatcatatcgtagatgccgtctacgtcatccttcgtagtcaccacgacgttctcagcggtctctttcatggctgtaatggtcagaccgttgatggagaatacattggtgttgctctcgtactccgtaccattcagagtgatcttcgcattctgtgcatcgatcttattggcacttgcactgtccagtcccaggctcttaagtacgttattgccggtctcatcggatgcggtaatgctgaaatcattgccttctccggaatccttggcactgatatagaatctctgctgggtctcatcaaagttggcattcagtccggcttcttttaatttggtcagtacgttggagatggtagtatccgcagtgatctccaattctacattggtatcaccgctcttgatatttaatgtggtaccggtgctcagattcagagcagtacctttattatccacgctcagatcggacaacttcgtcagggcattaagcttgaaatcgtccccgtctgcatctgtcttggttctcagagaagtcttaccgccggtcatgtaagcagtcttagccaactgtgtgatcttgaggttctgcacgccgttcatggcattctcaccggtgatgacgctggctgcagtgctgtcggagacggatgtggtcttcttcatataagcactggtaaaacgcatattgttgacgtatttggactgcagattcttcagcttggtgttcagatccttccatgccgtagtcttccactccagcttggtctgtgcctttttcgcatcgtctactttagtctgcttcgcagataccagctgctggataatgctctctgtgtccataccggagatcagtccggataatctcattgttgatgatgccatatttgtatcctcctatcttatctcttctcatctaccaggataccggctaactcccacactttggcgatcatgtccagggtcttctcgggaggaagttccttgatcactttcttggtatccttatctatgatcttgatggttacgcggttggttgcctcatgaatgccgaagaccgcttcggaatgagacatcatgttcttgttcagcttctctaccgctttcttgatctgctcattggtcacatgctgttgctgctcccctttgggatcggcagaggtattgctctgctccttgccctgagcattctcaacgactgctgtcgtctgatcgatcttgtctattggctttacattggcaggattgtattcagaggcgttttcctctgtggtcacttttgtagctgcattcttggcagcggccgtattctgtgcctgcactgtcatgatactggaaatcggttctatggtcataatggtcacctccgtgtgatgaataagcgccttccgtgggcgcacgacctttgttctctaagctttttatcggttacttttctcgaaaaattaataggagctgcaaaaatttgcacctcctatgcctaatttcctattttcctattttatcttctgcctacccaaacaggttcttcagtgcttccataccgtcagcatccaccgaagccctgttggcttcctggatctgaaggtatacttccttgcggtagatgggcacttccttgggagcggagatgccgatcttgacctggtcgcccttcacttccaggacggtgatctcgatgtcattgttgatgatgatcgcttcgtttttcttacgggacaatgccagcatcttactcacccgcctttctggatttcaggatatcgtagatggggaatttcacgggatactggttgccttcgaggatgatctgacatgccttacgctcttccacattgatgacaaagggtccctggaggttcacggtcatcttcgtaagatcggaaggtacggtcacggtcaccatgaccagaatgttctccggggtgagtgttcctacaccggtgagcagctcatcatccacctcgggatcatagtccgggttgaccagcaaaggatccatgaccggcatggcaaagctgggttcttcgatggactgcagataacggataccggcactgctgcctttttcctcgtcatgcagcatggtgaaatgcttcagctccgggaatccgatgattcctttatcaaatgtgatgatcttgttatccgcaatctctacttccccaaaatttttcgtctgaatcttcatagaatacctatgcctttccgtacctgcaagcttccaggtacttccgtattttttacactatcctcttagataaagttcaaaagtgtggtctgcatgactttaccggtagccatcagtgcagcttcgtaggtcatctccgcactctttaagttaatagcggtctctgtcacatcaatatcttcgttttcactctttaatgtctcaaaggtggtcttctggctcttcatacggttctcgatcagctccagcttgctgcttctggtaccgcagttggtgatgcacaggttggcatcatcgagatatccctggaaggtggtaatgctgctctcgaacagcttctggcatttatccttggacagagtcagtgctttttccacggcttccatctgttttttcagaatatccgcatcgccgccggtagcgttctcctgcagaccttcgatcttggtcttcactgtctccagatccagcacatcctgcatcgcctgtaccaggtcatccacggtacggccgattccatgctggaagcactcatctgcagtggaatttacacggatggtctgattgaagcctacatcatattcgatcacctgtctgtcctcatcatcctgtgtatatttctcattatattttattgtcttgccatccacggtggcatcacacctgaagtaatgctccggccgcagatctcccttcacccagtgattcttctgataggttacctgaatctcgccctcatttttaccggaagtggcaggatcatccttgcaattcatcagggtcttgtagcggttctcgcccaggagcagttctccggtctccggtacatacacgatagcatcagggttaccggctaccttgctgtagggatccgcggtagaagaaatttcctcaatgaccggctggtgggtattctgatccggccatgttacctcctgatagctgccatccgcctgtttctcctgaaaagaaatggagggagtgccgttctttttacagtcattataggacagctgaatacgatatacctccgtggccttgacatcctgttctgatatcttatcaaagcccgcatctttataattcgctgcggtgatatccagcagtttaccggtatttaccttggtcagcttagtgatggcactgttgcccagctgctcggtgatattgtattccgtgttgtattccttatcaaagcttaaggaagtatcggtacgatatccggtaaacacataacgtccggcataatccgcatcacctgtgctgtagacttcttctccgagggccttcagctgctctaagatgatctggcggtcttctgccttcaggtctccgttggagcccttcgtagactgtttgatcatgttcgtgatgatctctgtcaggttcttcagtgcatcttccgtcacgtccagccagctctccgcatcggggatattcttgctgtaatactgggtcacttccgtaacattactgcgcagacgcaaggcacggatggataccaccgggtcatcggaagggcggttcaccttcttctgggtggacatctgtgtgctcagcttatcctgatatactttgttcgtattgatattggacagattattacgttgcatgatcttgttcgtaattctcattttggtccttgtcctttctctctctagaattccataccattttcatactagactccggtctccaggatcagtctgtcatagatctccgtcagggtctggatcatcttggaagccagattgtatccgttctggtatttcaccaggttcaccgcttcttcatcctcatcgacaccggagatggagattctctgattatcgatagtagcggagatatccttaaagcttgcataaaaggtattcgctctggaagcgttcaatgccacatccgacagaatacactgtaaaaattcagaagcattacatcctcgaaagctcatcttcgtcttatctgtggcaagattcttcagatcgttcagcaggtcattctgttccacgccgtccgcggcatccttacggttcgccatcagtccgggatcctgttcgatagcctccagaatgtcgaaattcttcgcggtcagacgatagtaactgtcgtcgttgacctttaccgtcattttgctgccggcctttttttcctgcttgtcatatcgcttcgcagcgtcatccagcaggaactgctcaccgccggtagctttattaccggtgaacatcttcacgccgggatccccgtttccgctgtaaccggaagtcagaatatcgttgaatttctgagaaaaggtacggatccactcattcatctggttcatgtaataagggatgccctgataggacaggttggtaccgatctctgcctttttccctacacggtcattggtaattccccggggattcttctcactgtccgataaagtaaatgtataggagtaagtggcattgccgttcgcatcatattcgcaggtatattcccaggaatcatagtagaattcctgattgcccagatccaggatgcctccctgatccgatagattacatttattcaggtcctgcagataagccttggttacttttacggttacggtatcgtgggtcttgccgtctgccgtggtcgtcgtgccggtggcggtcacctgtccggtgaaattctcgccgttgttgccgtcacgcatctggatcagtcctgccagatcaccgcccatggatgcattgtacaggttgaacttctgcccgtccgcccagtagacttcatagagaccgtcgatatcggtctggtttactttctcataggaggttcttgccacacattcgagaccgttgtaatcactgccgtctaccagcatctggcctccggcgatcttgaccatatatctgttggcaccggtctcacggttctcattgttggcatcgatgatgggagtctccttgacttccacatccacgatcttggacaattcatcgatcagcagggttctgcggtcgcggagctcgtttgctttcactccggtcagttcgatggtattgatctgtttatttaaagtagcgacttcgccggcgatggagttgatctcgtccaccttcagcttgatctcctggttgatgtctttctgaaccttttccaggttgcccgccataccgttgaaatactcagtcagggctccggcatatcccacgaactgggacttagcggtagcactgttgggatcttttaacagagcctgcataccggtcaccatcagctggtcgaagatggtcttgaagccggtacttttgccgtcatcatcaaaataggtctccagctgcttcatgtagtactgcttcatatcgtattcgcccagctgtgcattgttgtcccagaatcttccgtcatagaactcatcgcggacgcgctcgatggccagtgtctctactccggcgccggcacagccgtaggtctggaatacccgcagtgcattggacgcctgctgtgtcacctgctgtctgctgtagccttccgtctgtacattggcgatattgttggacgtggtgttcatggcagcattgctggccagcagtcctgtatatgcaatatttaatccaaaaaattgtgagggcattctatatcgcctcctatactcctaatgtggaaataatatgctccagcatctcgctgatcacattgatatatcggctggatgcgttgtatgcattctggaacttgatcatattggacagttcctcgtccgtggagacaccgaccacctgctctctggcactctgtgttgcttccacggtgttgacctggttctcataaatgctccggaacacatatccggagtttgctacctgtgataccagatccgtataataatctacaaaagtagtctttttctgtacgttgggattcagcgtataggattcttcggtaaacgctgccttcagtgcatccgccgttttcttatcctccgaaccgtccgccagtcggaatcccagcttggagggttcctgcatgagagctgaattgacttgcagattaccaatggtataaaggctctcagggctgtcggccttttcctcgttcatgacccagtagtccttgccgtcttttccggtcaccttacgatagccgtctgtcgtcaccttggtaaataactggatcggagtaccgtcttccatgcgcatatagccgtcggaatccactgcgcaatatttagcatttttaagtgtcgtaccgtctgccagctccaaatctccgctctgtacaccggctgcctctgccaggatatcattgatcttcgtcaccacattgtggatcatctggtcaaattcaccctgtatgttcataacgaccgattgggatacgctgtcgtattttccctctgccaggtcggtatagttggctctgtgatctcctctggccaaaagcatagccttcagcccgccgatgtcagttcccagatccgatgagatctcgatggagaggtcaaacacttccgcgccgtcgatattatagactctggtgccgtcatcccttgtagtataagaagcattcatgggccagaacggtgtcacgaagccggtagcttcgtccgtcttcatggcgatctcatagcaggttccgtccttgacgaaatccacaccctcgatctgtacggatacgctgccgtatctgtcctccgaaaagctcatattggtcagctctgccagttcatcgaggatctgatttctcgcatcccgcaggtcattggcatgctcaataccgccgctctcaatggcacggatctgatcattcaatgtcagcagctgattgccgtatttattgatcttatccacattctgtctgatctgtgtattcaggttgtcctgataggaacttaagccagcatataccgcacttgctctctgcacgaattcggatgctctctgtacgatcagtccctgcgtgacggagctgctgggatccttggaaagctcctgtactgcagtccagaaatcggtcatggtcgtctgaaaagcctcgccgttcaactctcccagctggctctctacttcttccatgacttccgtagacacttcatagaacatactgcgtccggattccttgcggtatgttttgtccaggaaataatctctgacctgttttacacgggaatatgtgacacccagacccgtctgtttgttggcaatagacttcgggtctgtagataatgtgacataagctctgttagattgctgtacctgttgtctggtatagcctgtggtgtccacattagaaagattatgcgctgtggtattcagcgcattctgacttgtctgtaatccggacgatccaatatataaactacccattaatggcatgaactctcacctctgtatcttactgcttggcatcgaagccatgatcgataacgcccatggtatctcctgcattgtaagctccgcgattgtaattggctgtctcgggtgctgtcttcgccgcctggaggagattcatctcgaactccaccatctccagtgcactgtttaacagttcactgttctgctcgttgatacgtttcagtccccggactgctacctgcagtctgtcatgtgcatctgccagtgcctgctgttccgcagggcgtgcagataacatggtgatcagattgggcagcttcagctctttaacatccctgttcaatacatcggctatatcagcagtcactccggctctctgtctgtcgagattatggatcctgcttacaagctcctgctcctcgtccgtgatcttctgtaattctgcaagatcaccgcctgctatgatcggtgtcttgcgttgtgataactgaagcagagcttcgtactccgtactctctctgcctaatacatctatcaggttttccattaaactagccaaagaactacctcatttcttcctgtttctgaagcagcttctccgcaaagcttgcattatccactccataagtaccgttctggatccttgctttaatgggagccgttaactcttccctgatgtcaggtgcggcggccactgctgccttagcggtctggaaatccttgccctggctgctgatctgcagtctgtccgtgtgtgtggctgtcttagtcttctgtgttctgcttagcttctgagactgatacagctgctgtacctgtgtatacgcttcaatacgcatatcgactcctccttcccgaatgtgattcgtgtttcacaatatgtatcggactaaattgcaattactttatagttcccgcaaaaaaatgtaacgatcccatgtctgtgacattcggatcgttacctcagattttttaatatgcgttctctttgcaaagttctctgtccacctgttgtacgcagtaaatcttatcatctaccgtcacagagaccacagtatcatcatgagcatacagtccctcttccacataagagaatttttccgggatcctgccctcctccaggatctggatcagtgcttctacccttggtccatgtagcggattgcattctccgatacaggtgatctcatccttcagtacgcagtccatggattccgtgctgacaccgtcaaaggacaatatcatgatctctcctgccgccaggtcactgcccacggttctgcccgctgcgcggatggcttccatggctccgaaggcttcattatcgttctcacaatagaccacgttgatattgtcatattttttcagaaaagcctccatgacctccttgcctttggcctgggtgaattctccagatacctgatccaacagatcccaaccgtattttgccacgccctgttccagtcccctggtccgtccgatctgggcagaagcaccgatgtttccctgaatatttacgatatgaatatcctgtggggcaattcccttgttaacagaaaatgcattcagccactctgccattttcaggccctccaattcaaaatcagaccctacaaagcaggtaaacagactgtcatcctccacatccaccttccggtccacgatgatcaccgggatcccggcatccttcgcctctctgagcaccgtatcccaaccggtctccgtcaccggtgccagcacgatataatctacctcctgctggataaatgtgcggatagcccggatctgattggcctgcttctgctgcccatcctcaaagatcagatcataccctgcctcctttgtaaaagtgcttttcatggactccgtgttggcactgcgccagtcggattccgctcccagctgggaaaatccaacaacgatacgatccatctgtatctcttccgatctcaccgtgtcatccgcagtacttcgtctgctgccacatccggccagtatcattcccagccccagcaacagacctatcatccatcgtcttcctgttctgcattttttcatatctgtaatgtcatcctgttctgtcattcttcccacccggaaaccactctgtcattctctcattttccagcaggttctttctctgtgtgaaaatacgccacagagttctccagttccccggagatctgtttcattttatcacagtttgcgcccactgtctgtatctgcgtcaggatttcctcaatgtttgcatttacctgctggttgttggctgcattttcctcgctgatagcactgagactgccgatattgcccagaatatcctctttctgctgtgacagatgtctggtctctccggcaatcttgcggatctcttccgcagaatgtctgatactttgctctaactgctgatactgctctctggttgcaataatgtaatcctgttcctcccggatgatatcctttaccacatccgcctgttccacagtctcaccggacttctccgtgatcccctgtgccagttccttgatctgttcggccccggcggcactctgctccgacagcttacggatttcttccgctaccactgcaaatcctcttcctgcctctccggctctggcggcctcaatggaggcattcagacttaagagatttgtctgtccggaaatggagaagatcagagctaccgcttcatcgattttttcaatgtaatcgttggtctcatggatcttggacgtaatagtatccacggattccacggaacggctgctaccggtcatgatcttttccataccttctccggcttttctactgttgtcctgcatctcctccgaatccttctgcagttgtccggcactggcactgatgtcgttgaccgccgcaccaatctcgtccatgcggtcactgatgttctgtacattttccgccatttcttctgctgcagcggacagctgatccacggcctgactgatctgctccgcctgttccatggtagcattgcttccctctgcgacctgccgtacactgtttagaagttctccggatacctcctgcacaccgccgatgacctgcgccagattccgctgcatctgcgaggtattcagtaacagattacggatttcacggacgatactgtgggattctttttgggcactcagatcaccttctgccagggcatccaccctggcgccagtctccttcatcctgctcgacagtgctctgctcaggaaaaagcagatggcaccaaacagaagcactatccccgctgcgcagatcaggaatacaacctcgatttcccacagagcatcggtgatgtcatttttccgttccgccgcaaaagctaccgcagtgatccgtccgtcattcataatcgggatataataaccataataagcatttccatctatcactacatttttatcataataaccctccgtcccaccgcctgacacgaggtcctgatccatggggatttcacggatacgatagtcattttcatttttaatggatgtggtagctggaatgccatctgcaagaatggccatctccaggtcttcttccttcaggctgtccaggtactcgtaataaccgctggcattcattgccgtgatctcattttccttacagtattttgccagattatccgcagttacatgcagtgtggtctgtacactgccttccagattcgttctggtcagatgtaaggatgtggtgctgaggatcactgttgccagaactaccggtgccagtgccagcagcatcagcagcaggaacaggctgcatccctgttttttcggagtcttttgtttttttaccttcgtctttttcataacttttaccccccttaatatccagtggattacttttactagcggaaaaagagtgtggctgcacatcagccacgctcttttcatttcgttcttctccttcctccagcagaaggaaactactcttatttatttctgcagcattttcttttttctggcgatcaccacgctctgtaccaccaggaacagacacagcatagctgcaatggtgataccggtccaccatgcctgatccagacctgcactggatacgatgttctggatggtgcttaaggacaatactccgaagaaggttccgatgatattaccaacaccgcctgtcaacattgtaccgccaatgatagaggatgcaatggcattcatctccatgcctgtcgcatgagaagccgaaccgcttcctacatgcaggaagtatacatagccaccgatgcctgccaacagtccgcagagcagatgggacaggaacttcgttctcttaacattgatgcccagcatcagtgcactctggttgttgccgcccacagcatagaaactgcggcccatcttcgtccagcggagcatgacaaacatcactatgactaccatcagtgctactatcacaccgatttccacataggcatttacataatttcccagcttgttcacagatcccatccccggaacgaacacacgtgtctccttcagtgcagtgaagttttcattcgccacattgaagggcttagtatttacgatggtggtcatgcctctggcaaagaacatcccggccagtgtcacgataaagggctggatatccaggtacgctaccaggaagccctgtacgataccaaaggcaaggccgatagcaacggcgatcagcatagaaatgaatacattgcctccgccaaagtccaggtataccgcacagctcatactgaccagtgctaccacgccaccgacggagatatcgattccaccagtgatcatgactaagctcataccgcaggaaagtatgatcagagctgcgttggcgttcaggatattgaaaaacgtctgtggctttaaaaagccttttccctggaacacgatagctccgatatacattgcaaaaaatactacaattgtgatggtcagcagcagattggtatctgtcatattttttaacttcttacccatttcagccaacctcctttacggtcttactctgcttcagcttcttgccaacagcggacagccactctcttacctttggcgtgcttaataccaccaacaggataactaccactgctttgtaagcgggaagcgcatccgactgtacgtcaaatttgtataaggtggtggtcaggaactgaataacataggcacccaggattgacgctgccatgttgaacttaccaccgcttaaggagttgccgcccagtgctactgccagaattgcatccatctcgatgtcctttgcgatcacagagtagttgatggaggacagacggcttaccttgatcagtgccgctaccgccacacacagtcctaagatcacgaaggtcaggaacttaataaatgtgggattcagtccatttaattttgaggaattttcattgataccaacggactgggtgtaaagccccagtgtcgtgaacttcagtaccaggaagatcaccagtacgcacactgccgcaatgaaaaacggtgtgggaatggggattccgggaataaatccgccgaaataactgaaggtcggatcacttacaataggaagttcgttgttgttgatccatgcagcgatggaacggcctgccgtatagaggatcagcgtcgctaccatgggctggatcttgaaatacgctaccagcacaccgttaaatgcgccaaagagcattgccaccacacaggcgatcagaaaagctacgataatgggagcctgtaaggtatcgggtctggaattggtaccgcacagtacccgcaggatcacactgcctgcaatagcgatggccgcgcccacactgatatcctgtccgccggatgcggcagtgaccagtgtcatgccgatagccaggattgccagttcggaaccgtagtctaagattgtcatcagatagccggacaataccggatctcctgcgctgttatatcccagtgtgatcttgaaaaagctgggatccgcgatcagattgaatactgccagaatgatcagggctgcaatgggaatgaagatttgctgccggaacaatccgctgaggaaatttttattctgtttttccactgttttttccttactcatgtttactctcacctccggcaatcgtactcataatcttggtctgggtcagatcctccccggacagctctcctaccaccctgcggtctctcatgactatcagccgggaacaggtacggagcatctcgtcggtctcagaagaaatgaaggtcacgctcatgccttcacctgccagcttcagtaccagcttctggatatccaccttggtgccgacatcgatacctctcgtaggctcatccaggatcagatattccggatgggtcagaagccacctggctagaattaccttctgctgattaccaccggacagtgacttgatgggagtctcggcggatgcagtcttaatatccaacagtttgatgtattcgtctgcaaatttattagcttccgcccgggagatcggtcggaagaatccacgaagcacctgtagtgccaggataatattctctcttacggacaagtcacctacgataccgtcccgcttacgatcctccggcagataaccaatgccatgacgcatagcatccagaggcttagtgatcttcacctgtctgccattctttttcactgtgccgccaatgatacggtcggcaccgaaaatagcacggacacattcgcttcggccggatcccagcaatccggtaaatccgttgacctcaccctttttgatatagaaatcaaaaggcttgatcccggcgtcactgcacagatccttggtctcgaatagcggctctgtgctttccgctttctgatctgctttctgttcacccttgatgtcggacaggtcatccagctccttgccgagcatcttggataccagctgtactctgggcaagtccttgatggcatattcgcctaccagtccgccatcccgcaggacagtgatcttgtcacacacttcatatacctgatccagaaaatgagttacgaagataatacccacgcctctggccttcagatcacgcatcagaccgaaaagcttttctacttcctgctcatccagagaggaggtcggctcatccaggatcagtactttacaatccatatctacagctctggcgatggccaccatctgctgtacagcgatagagcagcttgccagctgttgggacgctttcgcagggatatccagattctgtaaaatcttatctgcgtcctcattcattttcttccagttctgatagatcttgttagaacgtcctatgtacatattctctgccacggacagattcggacagagtgtgatctcctgatatacagtactgatgcccagcttctgtgcctcctgcggagagtgaatggacacggccttgtctttgccgtcgatgaagatctgtccttcatccttgctatagacacctgtcagcaccttgatcagggttgactttccggcaccgttttctcccatcaatgcatggatctcacctttgttcagatggaaatccacacccttcagagctcgtacaccgggaaagcttttgtgaatatttctcatttccaatactttgttattgtccaaaagtttcaccccttaatcttctttgatctttgataaaagaagcgcggagctagcatgcgccgcgcttctggtcatttacatcagactagataccgtagttgtctacatcttcctgagtaatggtggtcgcatcgaagcccttctcgtccatgatgatggtcttctcggagatggtctcaccgttctccagctttttgatgatctcatcaatataggaagcctggaaaggattgcactgtccatcgtagttccagttgcctgccttcagctcttccagagcccacttgttgcagtcaaagcccataacgataacgtctttgcctacgccgtgggagatattagccttatccagagctgctaccgcacccttagccatatcatcgttctcagcgtagattacgttgaaaggagtgcctgcatcgatcacggactgtacgatctgctgtgctttctctgcgttccactcagcggtctgctgtgttacgagattgaagccgtcgtttgctgccgcgtcatccagggcaccggtacgtccctgctgtgctgcagaacccataacaccctgtaaatgaatgatgttatattcacttaagttctggctctttaaccagtcaactgcggtctggccttcctttgccatatcggatacgatggatgcctcatacaggctctcatctgcatcaatggtacggtcgaagaggataactctgatgcctgcatcctgtgcgtccttcaatacggaatcccagccggcagtatctgctgcagacagaagcaggtagtcaacgccatcctggatgaacttctgtgctgcggtgatctgctcgtcgttctttaagctatatgcgaaggatgcttcgtagccgtttgcctcagtgaaagtatctttcatatccttatcatttgcggtacgataaccggactcgttagggtcattgttaatgataccgaccttgatcagatctccggatgcatccgcgcttgtagttccggcgcttgcggtgtccgtagctgcacctccggtggctgcgctgctgcccgcatcagaggagccgcatgctaccagactaaataccatggttgctgccattactgctgctaaaattttctttttcattgtataacctcccaattttttgttgttcaaagaactatttctttgatgatcctattttatcgtgaaaaaaagcaaaaaaccatgaagatacctctcggaaaagttggaatttttatggcaaaaaagaaccaccctcgtaaacggttgaatattttacgatgatggtttatttttctcacaaagtatattccggcagccgtaccgtcacgcaggttccctcgccataggtactggtaatggtgatcccatatttttccccgaagttcaaacggatccgttcatttacattataaagtccgtagatttccgtctcacaggcatttcgattgcggatgccctcccgtacctgtcccaggcgttccggtgtcatgcccctgccattgtcggtgatccgcaggatacagtcactgtcctccatttccccatcaatgcggatcataccctttccccgtttgttcttaatgccgtggtacagcgcattttccaccagcggctgcaatgtgatcttgggtatccggctggagtacagttcttccggcacgcagatttcatattggagaatatcctgatatcgcatctgctggatttccagatagctgcgcacatgctgaagctcttccctgacatccagaatatcctgtccctgatttaatgaaatgcggaagaaatcggacagactgcctaccatactcacaacctttttctgttcaccggcctccgccagccatacgatggcatccagcgtattatatagaaaatgaggattgatctgggactgcagcagttcaaattccgccttgcgcaggcgcacctgctcggtcttcacctgctccagcagttcattgatcttgtcgatcatggtattcatagaatcgctgagcacccgggcctccaatccgccggtcacatccgatcgtaccgtcagatcccctttcgccacctgatctgtcacctgggtcagtcgtctgataggtcttgtaatactcagcggaatataataggataaaaataaacacaacatcaggatcaatgcaaaagcgatcacagaaaaccggatcatattcacaaaaaagtcctgatactgctgtctgctctcctggatcccacggatctcataatagatgtatcgtgacatcgtgtctcctaccagagatgtcacgatctgtacatcattttcccagatttctatattatcttcgtaacggttaccctcacggatattgtcctcgatccttccaatataggttcccaggttattcagatatttctttacgctggtcaggcgcttgcgattctcctgtgattcagttaattcctccagtcctgccacgatctcatctgcttcctccagcatggcatggagactggattcctccagcgtcttgttgcccacaatgaggagataggtctcataatcaaaatccttttggaaatccaggctgaactgactggccataacagaggaattgaccatgtcctcatatctgcgattgttattccacagattatagaaacagaagatcagaaacaatacaaaaggcactaaaaggcaaagataagaatatcttatctttgccacgagcgtagaatgatcgtaaatttcttttaacctttttctcataagaagtcctttccgcgatcgtggctatttgatgccgccccgatactgggtaggtgtcatcccctgggtctttttgaacagataggaaaaataatgagggtccttgtaccctacctcctgactgatcaggctgctgcgtttgccggtgcagcgcaataattcctttgctttgttcatacggtaatccgtcagatatttaatgaaactcatccctgtctgctgactgaagatcatgctcagatgattcggtgagaaattcacgtgggatgccagcagattcaatgacagctcctcttctgcatagttttcctctatatatttcatcacctgctccaccacatcgtcatagcggctgctggctactctgtctcttgcttccagcgctttgtccaggatccgtataatatactgtatagcactgtcgctgtcctgctgcgtcttctcatcctggctcggagtctccggatcctgcgtatctgttgacaggctttccaggaaatccgccacgcagaaataggcatccatcgtgatgtactgcctgaaaatattggactgcagtgctttgttgctcagatcccggaaaaattcttctacgaaataaacgacctcttctctgtctccctgctttaagaattcctggatcctggtccgatcgatctgtttgggattgacttgcttgatatcaaagtgctcttcttccgttccctgtgccagatacccgccatccaggatgcggctgtcctgcaccagatacctgtgagcaaaagcatgactggcctgttcaaaggagaccggaagctcccgcagacggttcaccggtctgccaatgcctccgaaatagcggacgtgctcatacttttccataatatctttgatcttctcaatatattcctgctgctgaagctgtaactgttcttcagattccgcctttagcaaaaatgctttgccctccaggttacggtcaaatgatactaccgttgttccgtcctccagtgaccgcagttcttcttcgatgcggatcaggctgccggagtattcgtcctgtgcatggcgcagtgactgcgtcttaaataaaataatattgtaccacggtgccgacagatcgatgcctagtctctccgctgactccagtaattctgctgcggtattatccccaacgaccagactctggaacagttttttccgctctctgagtgtattttcctccatctccttcaaatagcgttcacggatctgggtagctctgcgtttttcctcgatctttgctgagagttcctccagttcggccagaagttcctctccgttaatcggcttggacaaatactgcgccacccccagtttgatggcttccttcgcgtattcaaattcctgataaccggacagaatgatgatctcgatgtccggaagctctctgcggatcagtctgctgagctccagcccgtccataaacggcatccggatatcagtgatcacgatatccggacgcagcctctggatcataggataggccagttctccgtcaccggcctccccacagaactcatagccatgagtctcccagtcgatattatttttgattccctcgcggatgacgaattcatcctccaccaaaaacacttttaacatttttacgatacccttctttttactgcggatagaagtttttggggttcctgtccacttgaaataccctagcggtagaatacctctcccagcatcaagtctctcttcagatcacggatcttggtatccttgtcgatatatacagcctcgatacccatcatagctgcccagtcgcccatctgctcagccgtcagatcataggtaaaggcggtatgatgcgcaccgcctgccaggatccaggcttccgctccggtatacatatccggctccggtgtccagaaattggtggccacgggcagctttggcataggtttctccactttcttacagttcacatcattgatgatcaggcggaaacgattgcccagatcgatcagggatgtagcaatgccgtgtccctccttggaagtaaataccagtctggcgggatcctctctgtctcccatggacagaggctggcatttgatgctgatcggaccgtccgcaatagtaggacagatttccaacatatgagcttccagaataccctcttttcccttgaccagattataggtatagtcctccagcatggaagtacccttggcatccttcactcccccggtcatgatcttcatcagacgcaccatggctgctactttccagtcgccttccgcaccgaagccgtagcctttctccatcagccgctggatcgccagtcccggtagctgcttcagggcacccagatcaccgaaatgggtcacgatcgcctgatagtttttctcctccaggaagcgttcaaaacccagttcgatctgtgcctgcaccgctacatgctttctgaactctccgggatctcttccctctaataaaatattatacttctcatagtactcatctacaagagcattgacatcagatttggaaactgcatctacactctctgcgatctcgtttacggggtaagcatctacttcccagccaaacttgatctgtgcctctaccttgtcgccctcggttaccgctacattgcgcatattatctgccacacgcatgacacggatatggctgctctccaccacgcctaccgcggtgcgcatccaggatgcgagcttgccctgtaccaccgggtctgaccaatggcccaccaccaccttgcgctccatacgcatacggctgacaatgtggccgtactctctgtcaccatgtgcagactggttctcattcatgaagtccatatcaatggtatcatagggcagctcctcgttaaactgcgtatggaaatgcagcaacggtttgcgatactcctgcaatcccaggatccatgatttcgccggagaaaaggtatgcatccaggtgatcacgccggcgcagttttcatccagattggcttcattgaaggtgcggcggatcagctcgttggtgatcagggtcggcttccatacaatctcgtagggcagcacaccggaagcattcagggcatccacgattttgtgggaatgctccgccaccttcgcaaggcactcgtctccatacaagtcctgcgagcctgtacaaaaccagaattgataatttttcgtctgtaacataagtaatacctcctctgaaaatacgatttctatattcccattctacaacttgtatgcttctactaacaagttgtatatttggaggtgaatatacctcctaaacggaagaattctattttgggtcagtaatatatctgccttactaaattgaaagttagtgaaataatcccgtagcccttggcagggtataagaaacgcggcacgctcgcgctctgtcgcagagcgtagcggtacataagcgaggaaagtaccctcgctaagtaccgacgtctgcttacggcctgcttattcttatacccagccggggctactgatttcttgaaaaatttcatgggtctatagagaaaaatttgctttccagatactcaatttcttcaaaatgagtatctcagagccagttttttccctatagacccatattcagctttttatgtgttatttgcagcaaatttagtatctcacaactcagtttttttgcatagacccaaaaacacagaatgcccacggtggacggaatgtcatgccgcgatgtctgtcggagggtgttgatattttcttgaaaagtgctgatagacagggggaaagcggacacgatgtccgcgtcagccgatccgcgccatggatggcgcgtgtaggcgaccccgtcataatgagaaccgctgtatcacttttcattagaaaattcacacctggagacgcgacatcaaggcgtgatgttccgttcgccgcgggcgttcgtggcttcttcactaactctcaatctactgcagcaggagtttcccaccacgagctccggctggatgaggattttactctgctccggctgcaaggtctcccctctcagcagagacaacaacagctgtgcagccatctcccccagtttttcctggggatgcacgatggtcgtgaggtgaaaaccatctcccatggccatgcatgagttgtcatagccggtgacagaaatatcctccggaacacggatcccgcgggagaccagtgccggaatgatctgcatagcgatctgatcgttatagcatacgacggcatccagtgaaatcccctttgccagtagtcgcagaattccttcccggggatgtacctttctatcctccgtatggaaccatatcaccttatcgggatcgtagagcatacccgcttcctgtaatgcctgcacatagccgcgatggcggttctgcccctggatgtcatccgccttgaagattccggcaatactacgatgcccattgtctaacagatactttgtgatcatatatccgcccctgcagtcatccatcagcacctgtggtctgtcctccatccggtcgaagcagccctgtatgaacacgtaaagaattccatagctttcgagctgttcatataaatgcagatgcctgcagctgatctggcttttactgggttcgatgatgactccgtcgatgtccttctgcaacagctcttcgagacatctggcttcctggcttctggaattgtgggtatttttcagcagaatactatagccttcagccgtgaggacatcatcaatcccctgaatgaccctcgggaaaatataatccgacagataagtggtcactacagctatattgtgggatttatgtccgggacgtaaccgctccgatacaaaggttccttttccatgcattgcataaatatatccttcctgttccaggatcgccagtgctttccggacagtctgacggctcacctgataagcagccgccagttggttctcagaaggcacacgatcccccgcccgcagttctccccggtggatctgctcctccaggtcatgatgcattttatagtatttcagctgtttttcttccattgatgaaagccctgctctttctctatctggattttatctatccaaatcttgtttccagacaacactgttcctatctttctcatcatttttcactttccggcatgatcagctttctgagttcttccgcaccgctgacaaaatcaccggttatggtatcattatgaatgacatgatcgcagattttccggttgcgtttttccgcatcaatggacaggatccgcaaggtcttctcctcggtgtcgtagtcagattctatgatgtcggcaatcagcttttccttgtcgcgcgccacgtatataatgtgcgtgggaaaagaccgtttcatggcgatagcgccgcacatatccaccgggatcacagcaaacttcccctgatccagcagctcacggatatcttcttttctcgttccgtaacgtactcccgcataagctgttttttcaaaaaaatccatccggtcgaaggcttcttctgaaacataccggtgtccgtgacgttccggttccgtgcaataattcaccgggcgcacaaacaactgctccgcgcggatattctgtgtcgtatttccacctttgctgccgcacagagcttctgtgatctcacgtttcccggagccggaaggtcccaccagtgcaagtaccgccggagcggtgatcttctccggctttgaagtggaggctttcatgatctgacgcaccagtgacacgaattccgccatggtattcacagacaggagccctgtcattttggcattccatggcttccgcatcaacaccggatactctgccttgctgtccaaaatattgtgaatggcatcatccagtacaatatcaaaatgtacacggtctttcgcacttcccaatataatattctccggtggaagctccgggaactgcgtcatgatctgctctgcccgcactcccataaaatgcggcgataccgccgtaataaaaaaaacatccgcaatctgcatcagccggcggatcccacgctttgtctcctccgtgggaatctgccggctgtacagctcgggatcgttataaaattctttgatcaccgaagttcttccctcattggcccaggaagtgatctcttccaggcgataaggcttctccggatgatatttttcatttgccatacggatggctatgctgttaaacggggcggtgacatcgtcccagtcaataccgatactaggtctgagcatgctgtgcttcctcactttatacagatacattctactattatatgcgatctgtattcagcatagcataaaccggtgcacagcacaatccatacatgccggatatctctagcctttcatggcctcttccaggatatgcagacagttctgcatggatgcttcaaattcttcttcattattattttggaacaggatcagatcatccttcaccttaggatcatccagattctccggaatggagaaatcacaggatgcaatatactcatcccagtgtgccagcttccaggtatctcgatcggaatttctggcgatcatacgctcatgtacgatctccggagatgtttccacccatacgaccaccagcgttgcatttttctctgcaagcttggctttcagattatgaatataatccatatcccggatctcctgggtaaagggtgcattgatcaatacaatatcgtcataatccaatgcttccatagccagatccacaacacactcgtactcatagtcacggatatttttttcaaaaaagtcactgcttctgtcataaggctgtcccgctactacaaagatctgttttgacaatgtgatcaaagtatccttgtccaaatataccacatgctgcagtctcttcgccaaagctttggaaatataagtttttccgcaggcgggcggtgatgttaccaggatcaatttcttaaccataaaaatcttcctttccgctatgtattgtttattattatctgtccccttttcaattagatatagcgcgattttttgagattgtcaactatttatcaaacttttttggctgttgacttgtcaacatccatgtgttacacttcatagagttgttgtttcatcaacattttataggaggattgtccatgcaggatcgttttgaaagattcgttgtatcgatcacggaattgcaccgttatctgcagaaattaaaagaactggaaatggggcaattagacttaaaagcaggttacactatgtgtctgtatcacctgggaaaacatccggaggggctgactgccacacagctgacagagctttgtaaggaagataaagctgccatttcccggacattaagccagttaagtgctaaaggcctggtgtcctgtgagttgccggaaaacaagcgctcctaccgtactttatattatctgaccgaggaaggcagcactgtagtcaaaaaaatcggttcccggatctactctgcactggctcacggcggagacggcatgacagaggaacagcgggtgaatctctacgattccctggagaggatctcccataatctggaacagtaccttgctgagttcccttccgaacatccacccaaaaaataagcaggaagaaacatttagctgccaaactataataaaaagaataggaatactatcatggaaaaaatacgttttatcacagactccgcatctgatatgaaccaccccagggaggatgtcaccatcctgccgctgcacatacgcttcggcgacgacgaatatgctgacggagtcaccatcagtcacagagaattctacgaaaagctgatcgaatgtgacactctccccaccaccagcctggtatctcccgctgtctttgaagacgcttatgagcaggcagtctccgcgggagagaccgtcatcgtgatcaccatctccggtaaattgtccggcacctgccagagtgcccggatcgctgctgaagattatgagggtaaggtattcgtcatagacagcatgaatgccaccataggagaacgcattctggtagagtatggtctgcaattaaaggatcagggtaaatccgcagaagaaattgtcagcattctcgaaaaggagaaatccaagatccacaccatgggacttctggacaccctggaatacctgaaaaagggcggacgtatctcctctaccgtggcattcatcggcggtgcactggccatcaagcctgtggtcgctgtctcagacggtgagatcattatgctcgggaaagcccgcggttccaagaacggcagtaactttctgatccgtgagatagaaaaagctgacggtgtagatttctcccgtcctttctgtctgggttataccggtctgagtgatgagctgttgcaaaaatacatccacgacagcgaacatctgtggaaggattacgcaaaggaacttcccatcagcactctgggagccaccatcggaacccatgtaggccccggagctgttgcggttgccttttttgaacactaatagatagaactaaagataaaaatcccgaagacttcacacagtctccgggatttcttatttgtcttttgtttctctgatcaagcagcctttttcgctttcttttctttcatctgcttaacgaaggtccgtgcaccttccactaccaggaagattgccagaactgccattgcagctgcgaagaacagctggaaccagtcaccccatgcagcagtgccggcaccgatcgccttgcacttgttgatcacggtgatcaccaggctggtcagggttgcagcaagcatgaataccatagggaagaagaacatcttgttgttcttaccaacttcacccagccatgcagctactgccatcagagcgatacctgcgagcagctggttcgctgcaccaaacagaccccagatctgacttaaggacagaccgccgaggatacagccgatcagtaccatggataccgtaccgaacagaggatgagccagcaccttgcgtgcgcccttggcatccttgtaagtagcttcgccttccttcaggaacagctcggagaacatgaaacggctcagacgggtaccggtatccagactggtcagtgcgaatacggatacagacagtgtgagcagtgcgtagatcgtaccgtatgccttggaggtctcggtaccgaacatggatgcaatacctgcagcgaatgcagctgcgggagatccgaactcaccgtttaaatacttctgatatactgcaccgactgctaccagcgcgatgatacccagagcagactcgatcagcatggagccgtaaccgatagccttggcatccttctcgttcgctaactgcttggaagaagtaccggtagcgatcaggctgtggaaaccggaacatgcaccacatgctacagtgatgaacagcatagggaacaatgtctgtcctgccttgggctcccagccattaaacgcggggatatcgaatgcgacagtaccggtgaaagcaccggcaacgacaccgatgaatgccagaccgatcatagcatacagcaggaaactggacaggtagtcacggggctgtaacaggatccatacgggaaccagggaagccactgcgatgtaaacacccacaaatacgatccatgcgatacggttcatggcaaaaccaacgttcagacctaaaacagtaatagctacgataccaatgataccaccgatggtagcgggcagagtcttaacgcccattctgttggtcacataaccataaataacagccagaacgatgaacagcagagagatcattgcggtagactgattaccggtaggattggtcacgaaaccgaaagcggtcttgccagcttcgtctgccgcagtcaggaaagtacctgccacgatgttaacaaaggaagcgattaccaggatcagcaccagaagtgcgaagatgatgaaaagcttcttagctctggatcccatggaatcctcaatgatctcacctacagatttaccgtcatgtctgatagatgcgaataaagatccgaagtcctgcagaccgccgaagaaaataccaccgatgatacaccacaggaatacgggaacccatccgaagatggaagcctgaatcggtccgttgatcgggcctgctccggcgatagatgaaaaatgatgacccataagtacggcaggcttagctgcaacgtaatccacaccatcttccttctcaattgcaggagtcttcttggtaggatcgataccccactgttttgccagccaggagccatagaacacatagccgataaacaacagtacaatagcggctacaacgattaataatgctgtcatttgtgtttctccttttcttaatacacagatttaatttatcattgccttttttacgagtttcttcagaatctgtccgtggcggttgtggacgatccgacccgaagacagctcgacgacaatcagacgataattactccagccatggaatccccagaggtaactctgataatgcctgcactttttcacctgtgcgagagcatcctccccggcatgagcggtcagaatgatcaggacgacatcactgttcctgtgattggaagacggctgcacatttgcagttccccgctcccaggcgatagcgtccagttccagaagacgttccttagataaagattcttctgtggcaaaatacactgtctcgttggtatcaatatctgccaccttagctttcttgatcagaaagtactgctcattatgggatccgaagattgcttcggctgcgaatggcggttctacagcctctgttttgatattgtagtaggtctgataagatcgcaggacgcgttccagcgcttccccgggagtaagtgtcttttgtaattccattctgctttccttttaagcatgcgtaatcgattacatttacgttcatgctattgataactttagcacgtcgaagtgtcaaatgcaacggattttttagcatttctttacactttttttataaatacatactttatcgttatatgttagtcctcagacagcttttttccaaggtgcaaatttaacctatataccattacaaatttaatctctttatctggataaacttattgacttttgttgggtaaccggaaatcattctaaaaaaagcagccgattttcatcagctgccgatttttaggaatgattcttctcttccttgatctcccaatggatcaggaaagtcagtgccgcacgaagtccgatgataccggctacggtaacgatctccttccagtctctgacaataacggtcttaaggatctcactgcacaacttgaattccagccctacagcaagcccctgcgccagggtgatcttcatatccggcacccgccgcacataattataaaaccctttcagaccggagagaataataacgatcactccgacaaattcaaagaacagtattgccacctggacaatattgttcatcacgttttccaggaattcaatgataagctctatgtggaacatgcacagccccccgcttttcttacacttcttttttcattgtagcgtatccaaaaagggcgtgcaagatgtatctttatctttttatcagctatttttcttctgttttcaataattcctgcatagtatgccagccaagcaccgcacattttactctggcgggcatgtgggcgatatcctgcagcacggaggcctcttccagctcttccttctcttcgtcggtgatacttcccttgatcattttcaggaacagatctgccagatgcagtgcctcttccttacttctgccgatgactaactccagcatcatgtccgcggaagcctgggagatggcacagccatctccttcaaaggcaccgtcaactaccacaccatcctccactttcagctccagaaaaatgtcatcaccacagctgggattaacgccctccaacaccaggttcgcatcctccagcttgtgcttgtgatacggatgcaggttgtgctccgtcaggatctcattataaaacgttttattctccatagcccatctgtctccttatcccggcaagacttgttaaaaatgcctgtatctcttcttccgtattgtagacgcccagactcactctggtggtagacaacactttcaggtgctgtagtaacggctgggcgcaatgatgtcccgcccggactgcgatgtgatctgcatctaaaacagatgccacatcatggggatgcacgccgtccagcttaaatgtcacgataccgtgatgatcctccgctttctgtgatcctaaaatatgcaccgcagggatctccttcatcccatccatcagcagttttgtcagctttgcttctctctcttcgatgaaatcaaagccgatcttctgcacataacggatagcctctgcgagggcataagcaccggcaccgttcaccgtacctgcctcgaacttatgaggcacctctgcccacacggctcctgtacggctgacggaatcgatcatttctccaccgcataaaaacgggggcatctgctctagcagctctctcttcgcatataacacaccgattcccatgggagcgtacattttatgcccggaaaatgccagaaaatccacatccagatcctgtacgtccactgccatatggggcacgctctgggctccgtctgccacgaaataagcgcctgcctcatgtgccagctgtgcaaaacgcttgatatcatttttgcagcccagcacattggatacctgggtcatggcaacgatcttcgttcggtcgctcagcgcctccttaaaagcttcctcagtatattttccgtcttcggtgcactccagatacttcaccactgctccggttctggctgccgcctgctgccagggcaggagattgctgtggtgctccataatgctcaccaggatctcatctcccggtttcagtaccagggagccgaagctgtacgccaccaggtttaaaccttccgtggcattgcggacgaagatgatctccgctgcttccttcgcattcaaaaacttccttactgtctctctggcttcttcgtatttttcggttgccgcctctcccagctcgtataaaccgcgcaggggattggcattgtatttttcataaaattcccgctctgcttccaggacacagaccggcttctgtgaagtcgctgcggtatccagatagatcactttctgattctccagcagaggaaaatccttacggatctcgttgactgaaatactcatacttcctcctgttatcttactctttacgcttcctcttcttccacggctctgcccaggaacttttgtacctttgcctgtgtggcggcatcggggatcttgcgacagaccgcatccaccttcgccatcgccatcatctcataaatctgctctctgttcatgccgcggctctctaagtagaacagcagctcatcgtccagcttaccgatggtggcaccgtgattgccttccacatcttcctccgcacagaggatcaggggaatggtctggttcaccacatcattggacaataacagtacgtcctctttttcattgcctaccgcacccttggcaccccatttgaagtcaatggtgccgcggtataatttgaaggcatgatctcttaatacgcctccggcctgcatattactctgggtctttttcccctcatgcagagccacataattcatatccagtctgccttcgccgtctacgatataggcggtatccgtgttcacgctgctctctctgccctgcagagtggtcttgcatcctaaatacgtatttttaccgcccaggatcagctggatcacttccagggaagccttctcctcacacagggcaccgatatcattcataaaagtaaaatcactgcccagtctctgcacctggatcagccggagcttcgcgccttcttccagatacagtctggtggataccgctgcctgacctgacgtctccctgtcggaagcaaagtcctcgatcacggtgatctcactgtttttacctgcttttaccgctacagctcccgcctgtaagctgttctgtgcataggcataatcaagcagtaacggctgcacctctgtcacatccgcgggcacctcataatgttttgcttttactcccgctgcggcaagcagaccgtccatatcttcccccataccggaggcaatccctacaaaatccgcattccagggcttagagccttcgttttcagcggtcgttatcttctccggcagagtgacttttgcctctccggccgcggggatctctattctctccaactgcgtctcattcatacgaagccagttccatgtcttagagggcagtcggttgatggtcatattatattctttttccatattctgtcctccctttacccgatgctgcctttcatctccaggcggatcaggttgttcatctctaccgcatattccaacggcagctccttcgatacattgtccgcgaagccgctgacgatcatggctctggcgtcctcctcggagatgccgcgggacatcagatagaacactgcctcgtcgctgatcctgccgatcttcgcctcatgcccgatatcggcatcctgggtacggatatccatcgccgggatggtatcggagcgggacttatcatccagcatcagggactgacaggataccgcagatttactctttgccgcactgttcttcactaccacggagcttcggaacgtactgatcccgccatccttggagatggacttcgtgttgatataagaagtggtctccggtgcattgtgaaccactttcgtaccggtatccagattctgtccggctccggcgaaagtaataccggtaaattccgctctcgcacccttaccgttcagcacgctcattggatagagataagatacgtgggatccgaaggaaccggatacccattctatggtaccgccctcttccaccagcgcccgcttggtgttcagattgtacatgttcttggaccagttctcgatggtggagtaacgcagttttgcatttttccccacgaacagctccacacagccggcatgaaggttcgccacgttgtacttcggggcggaacagccttcgataaaatgcagataggcaccctcgtccacaatgatcagggtatgctcgaactgtccggctcccggtgcgttcagtcgaaaataggactgcaaagggatcgtcacggacactccggggggaacatatacgaaggaaccaccggaccacacagcaccgtgcagcgctgcgaatttgtggtctctgggggtcaccagcttcatgaaatgtttccgcaccatatccgcatattccccgttcagggcactctccatatcggtatagactacgccctgggctgccacttcttctctgacattgtgatataccagttcggaatcatattgtgcccccacaccggcgagggacttccgctccgcctgtgggatccccaatttttcgaaggtatccttgatgtcctccggcacttcggaccatttggcgctcatatgggtattaggttttacataggttacgatgtcttccatgttcagaccctcaatagagggaccccagtcgggaacttccatctcattatagatctgcagagactgtaatctgaaatttgccatccatgcgggatccttctttttctcggaaatctccgccacaatatcgggagtcagtccctttttaatacgatagacgtccttctcctcattacggatatcataaatgcttctgttgacgtcttccacgtatgtcttttcacgttcactcattcagatcgtcaacctccttatgcttccagaaaacgttcgaaaccatgctcgttgatctcgtctaccagggaagcgtcgccggatgccacgatcttaccgttcaccagtacatgggtcttgtccacatggagagactctaaaattctggtgctgtgggtaatgatcagcagcgcaccctttttgtccttctggtactcttccacacccttggataccgtacgtaccgcatccacatccagtccggagtcggtctcatctaagattgccagagagggttttaacataagtaactgtaaaatctctgcctttttcttctcaccgccggagaatcccacgttcagatcacggtccccgtaggaaggatccatctgcaatacttccattgcctgctccagttcctttttgaaggtccacagcttgatgcgggaaccacttctctgttccacggcattacggatgaaattccgaagcgatactccgggtacctccaggggattctggaaggacaggaaaataccgtccttcgctctctggtctgcagtttcctctaataattccttccctttgaacaggatctcaccaccggtcacctcataccggggacttcccatgatggtgtaacccaatgtggatttgcccgcaccgttgggtcccatgaggacatgggtctctccgggacgaacctctaaatctattccatgaaggatgggcttgtcctctacacttacggacaagttacgcacctgtaataattgttctgacatatacttcctcctatctctagcgtccaactaggaattactatatcattatatacaagcatctgcaaatatgcaacatataattcctacaaaagtaccgtacattctattcaaattgtattacacttttttgtattacatttttttagttagcagcaacttactataaagtaaaacacaagccattgcgaggagttctctttttctctcacaatggcctttgctttttctctttttatgctttttctctttttatgcttcttctctatccaaaaggttcttcatgctcttggtgctgatccacagggtagatgtattatgcagaagagcggacgtagtgggaggaatgattcctgccacacctaaaatgatcagtccggtgttgatccctacgatcatgcgataatttttatggatccgcgccatcagggcattgctcagctccttcagtgtcgctacttcctgtaaattatccgcaccgatggtcacatctgcgatctctctggcgatctgtgcgccctcgctgatggcaatccctacgtctgccgctgacaatgccggggaatcgttgatgccgtcaccgatcataatgactttatgacctgcctgcttctcctgctccacgaaccttgctttgtcctccggcaacacctcggaataatactcatccacgccgacggtacccgcaattgccccagcgatacggtcgctgtctcctgtcatcatgactaccttgtggattccgagactcttcagctgtcggatgacctccggagcctcttctctgagaggatcctcgatgcagatcactgcagccagcttgccgtcaattgccatatacaggcgggagtattcctcaggcagctgatcgaacagctcctgtctgccctccgggatctgtgcctgctcatcctcaaatacgaaatggtagctgccgatgatgatcttcttgccgtccagagtagaagagattccatgggctacaatatattccactttggtatgcagctcttcatgtaccagctccttgcgggctgcttcccgcaccactgcttttgccatggaatgaggaaaatgctcctccaggcaggcagcgatccgaagcagttcctctgcgggttgtccgttaaaggatatcacatccgccacggtaggctgtgccttggtcagggttccggtcttgtcaaatacgatggtcgtggcatctgccatagcctctaagtatttgccgcccttcaccgtgatctcataggtgcttgcctcacggatcgcagacaatactgctaacggcatagacagcttcagtgcgcaggagaaatccaccatcagcacggataatgccttggtcacattccgtgtgaacagccataccagaccggtgcctaagaaagtatagggtaccagcttatctgccaggtgctctgccttaccctccagagaggatttcagcttctcggattcctcgatcatggtcatgatcttctcatatttgctggagccgccgttttctttcacacagatagtcagctcgccttcttctaccacagttccggcatagacagttccaccaggaatttttctcaccggaacggattctccggtcagagatgcctgattcaccataccttctccatccgtcactgtaccgtcgaaaggaatcacattgcccatgtggatccttaccagatctcctgacttaatggacgtggacggcaccaggatctcctgtccatcactcacaacccataccttgtcaatatttaaggacatgctcctcgccagatcaccgacagactttttgtgcgtccactcttccaggatctcgccgatgcctaacaggaacatcacagaggctgcggtgttgtaatcaccacgcagcacagatacaccgatagcagtggcatccagtaccggtacttcgatcttgcccttcgccagagtcttcacgccgtgccagagatatttgaaagacttcactgtggtgatcacggaacggatgtccatgggcagaaacagcctgatcccataatgcattaccactttattgatcagctgatccttatattcccggttcatctctctgccggaattagcaagatagttctccggcacttccgtaccctgatacgtaaaattctccagtgtcttcagtgcttcctccctggaaccggtatagactaccgtggcatccagggtgcgctcctgaattttggcactgacaatattcttctgtccgtccagatagtattgcagtgtatctgcctgcgcaaagctcatgcggctctgtaaaatgtgaaccctgagtctcccctttatctcatgcttgatcacaaatctcataatttatgcctgctttcatgaagggatcattcttctgttgcagtctctgctgcttctgcttcaccatcatactcttttgctgcctgtgctgctctgtcctcgttgatctgctgagcttctgcgtagatatcctctgcgttctcctggatagtggtcgcagtcttcatgacacactcttttgcgcgcagaacagctgcggtgcagttggtgtacagcttcttcgcatccttgctggacagtactttgatacctgcggttccgaacagaacgcctgctgcgaaaataccggtttttgctttatcaatcttttttaaacatttcaacataattcatttcctcctgtgtgaattctttggtttattctatttatgaatgaatattataatcacctgtttttcttatttccagttttttctcctttactgaaaaattttatcattaaaaaaggccagtggatcaaaatccactgaccttcttgtattcctgtaatttttcttttgctgccggggtcagattcttaggcacctgaatctggatcacgacatactgatcgccgtgggcatttttatccttcatggataccacgccctttcctttcagacggatcttgctgccggactgcgtaccttccttcactttgcacatgacatcgccgtacaacgtgggcacacggatctcgccgcccaaggccgcagtagtataggggatattgactgtggtatacagatcctgtcctctacgctcccagcccggtttctcctgtaccgtcaccttcagatacaggtcaccgctctcaccgccggagtaaccttcaccgcccttacctttcagacggatacttttaccggtatcgatacctgccggaatgtgcacctgcacggattcggacttgccggtagccggatctcttaaggtaaaggtcttgtcgcagccatgcattgcttcgtcaaaactgatggtgatgccggattccacatcctgacctttgctacggtagtttgcccggctgccccgtccggagcctttctgtcccttgaaatactgaccgaacagattgtcaaaaatatcctcatccccgccgaagctgccgaaatccccggtaccgaaaccgcttcctccggtgctgtaatggaacgtgccgttgccaaagccgccgaatccatcggtgccgaagccgcctccgttcttaaactgctcctgatactgtctggctgcctcctcgttaaatccctcctggaaagcagcaaaaccataagtatcatatagtttcttctttttttcatcccccagcacatcgtaagcttcgttgacttccttcagcttctcctctgccacagggtctcctgcattggtatccggatggtattttttcgccagtttccggtatgctttttttatcgctgcggcgtccgctgtcttgctgacacccaatacttcataataatctctttttgttgtcttcgtcatattccctccattctgcccaaccggtgagccacacaaccaagacgttttccatgtaaaaatcagccacacagttccctgcgcggctgaccacttcacatctcttttcaaacaattgtctgctgctgcagtcgcttgttcctcttacagagattatattatcactatagattagcactcgcaagaggtgagtgctaaaatttttattaaatctttaattttctttgtcttctttctgtaaataataaaatctcttctgtatttcaatctcttcccgaagctgttcttctgatggaaggcaagttttatatttagatgcaaataattgttcgtgcccatgcaatatagaatattttgcaatatcttcgtctgtatcggaacataaaataatccctaatgttggattatctccttcatttcgtttcatttcatcatacatacgaatatacatatccatctgtcccacatcttgatgtgtaattttcgacgtttttaaatcaatcaatacaaaacacttcaaaatgtaattgtaaaaaacaagatcaatgtaataatcttctttttcagttcgaatatgctgttgtctcgctacaaatgcatagcccttccccaattccatgagaaatttttgaatatgcgtgat

SEQ ID NO: 11306 - DNA, 10554 bp, Unknown
  gut microbiota DNA sequence
tgcttgttcttgaatctcgcaattcatttttctgaaaatcttggaattttcagggttgcattactgtttatttgtcaaagatcataacctctcttttatgagaagctttgctgttgtttcagcgacagctttgatagtttatcacagcaatctctgtttgtcaactacttttttcaagcgtttttgaaactcaccaacagctaacggagaaggagggatttgaaccctcgcgccgctattaacgacctgcaccctttccaggggtgtcccttcaacctcttgggtacttctccagatagttgattctgataatctatataatgatcggcggcacgaatgcctagcggagagagtgggattcgaacccacgcgccctttcggacaaacggttttcaagaccgcctcgttatgaccacttcgatatctctccgaatgtgtgtccatttccttgtcatctctgttgtttacctgacgacaaaagctattctaacaaaaaggattactattgtcaacacatttttacacaatttttattatatttttttcagatgagaaaaagcccattttatcatggttccgggctttttctcatttgcattgaatacagttttcttccaaaattgtgttcaaaatcatttaattgttacaactatttctactatttgttttttgtatcccctctacccttgcatgttttttccggcaaggtataactcccagtcagtcatatggttttccatatttgtaatcagaacgactttagcgtcattctccgaataggtcacttctctctgccatttatagaaatccggtccatctcccagattccttacataacccatcagccgtttcagacaataagccgtctccttcacatctgtcaggcagtcattcgcatagaaacctgtccattttccatgttccctctctctcatggcactggcagccgcattatatgcctctacagcatttcccaacaaaaagaaacactttttatactccttcttctgataagtccggaagctttccgcaaacagtatacttcccttcagacaatatttgtgaatctccgtctgcagtaatacagaatccttccacagttcactgcctttgaccacagcgcaatcatgatacaattgctctattttatcacaggtcgcattgcattttgattcaaaccagtccatctgcttatcaaatgcagattctccggtacaccagaacagttcttctaccggtgcggctgctccgtccctcatccatccatagataaaatcccggacgacataattatagaattgttctcctgcatgttcgtcttctctttcaccaaaggacagcatagcatccggatatctgctaatgcattgctccatgcatgtcagctgatcctccgtgcaatccgctccatagtactcccggatataagtttttctgtgttctccggctgtcagtgccttctttttccacaagttggctataaaagaaagcggatatacatgaggcttaatattggaagcattgataacccacagatctgtaattccatgatccatggcatcgttcaattctttttccacaaattccatagagtttggcagcatggtgatatggttggctgcctgcagatcatagaacgatacatgataataggttccctgcagacctttgtcgcctttttgcggcaacgctggcactcttggattatgattaccctgacgtctggagaccatcttgccataaccattatctgcccagatcatgatcacatcttcggggatctgcagatgaccgtcgcgatacaattccaaaatctccccatacaggttcgtacagcacactgcccccgggatctgctctctgatcatgtcatattgttcctgcatgatgctgctgatgagatttccacgtttttcaggagtatcataggcagggtcattctcccaaaaagggacatctccctgtcctctaaatccgatgttccagatgacttcctcattcttctgtctctctatggcatccttccacagcccttcaaataaatccttgtatttcagataggaaggctccagatccggataagctcgcaggaacatttccgcccccaaaggttccgcatgatgatgtgtgatcatcagtcccatatccaatgcaatgggagcataaatttttgaatttttatccgttccgggaatcaccagattaccaccgcagcgaagcagcgcttcaaataccatttcccagggatattccttcgacacgcctgctgtccagtgactgatcagcacttcatcattgataaaccagccgcgataacggattctgttttcttccgactgataatgtccacacggaatttttacataaggttttactttgatttcctggtcattccagaaccagaacggcagaattcccagatatttttcactgagttcattgagtgcatagataaaagaacagtcattacttccatagattacgaccgtatcttcggatacttccatctcatatgcctccggctccagtttcttctgtcgcaatatcacagtaccgccctcccgggcggaagcctccagtgtcatttccatatctctcttaaatctggcgcaggcacattctaccgcttttgtattttgtatttcgcgctgcagactggttgtctgatgtaaaataaagtttttccccgacattatgccacctcgtttttcttccgggttccgttttctctcattttaacgattatcatttaaaaataactttttgttcctcccgatactccttgggtgacatcccgtattccttccggaatgcacggtagaagctggaatagtcctgaaatccgtagcgctcgtaaaccttactgatattttcaccgcccaggattgcttccctgcatgcctgcattcttttcttcaggatgtactggtgtacggaaattcctgcctgttccttgaaaatatgtgcgatatagtatcgactcacaaaaaatacggaagacagtttttccagggagagatcctcctccaggttctgttctatataatagatcagattctgatataggttttcctccttgatttttaccggatgttccttttcgtagatctcgcggttaagatgaaggatcagatcactcactaaaagcggtatcctggcttctcttccgtatcgttccatctgggtctcttcaatcagctggaaaattttatactgtatcgtattaaattccaccacgtcatgagaatagatcagcttgccctgcacctgggcctgctgcatcaggtaaccgtattccgcagactgttccatcaggtttcctgcgtattccctgctgatccagaatacaaaacggcgatagggacagtttgactgctccacaacggctctgtgcctgcgtcccggaggtatgatcaccatgtctccacattttaacggatagatctcgttctcaatctgaatttggacatccccttctatgaaaaaataaaattcataataattatgggtgtgcatctcgatcttggaggtatatttttcattataatagtagatttcaaagtctttggaaagcatgtattgtcttgtggtaaaggcagtctgcaattttttcttcataccggacctccgtttctgacagaattgcatattggagcagcatccttttatctcataataaatcagcacagcaacttttgcaatatatgtaacaattctttcactttgttttttccatgaaaaaaatataataaaattatcaaatgaatggaggtaattccccttatggaaatgactttacgatggtacggatccaaattcgataccgtaaccttatctcagatcagacagattccgggagtcaccggagttatcactactttatacgatactgcccccggagaggtctggagcagagaacgtatcgccgctctgaaagcggaggtagccgctgccggactgcatatctccggaatcgaaagcgtcaatgtacatgatgcgatcaaaacaggtgctcccgaccgtgatctctacattgacaactatattcagactttggaaaatctgggaaaagaagatattcacctggtctgctataatttcatgccggtctttgactggacgagaaccgagcttgccagaaaacgtccggatggttccacagtcttagcttatacccaggaagcggtagacgctatcaatcctgaggaaatgttcgcttccatcgccggagataccaacggtaccataatgcccggctgggaaccggagcgcatggcgcatatcaaagagctttttgcaatgtatggggatatcgatgatgaaaaattattcgagaatctgaaatacttcctggagcggatcatgccggtatgcgataaatacaatattaacatggcaattcatcccgatgatcccgcctggagtgtgttcggtctgcctcgtatcattattaataagaaaaacatcctgcgtatgatgcagatggtagacaatcctcataacggtgtcaccttctgttccggttcctacggcaccaatctggaaaatgacctgccggatatgatccgttccctgaaggggcgcattcattttgcccatgtccgcaacctgaagttcaacagtcccactgatttcgaggaagcggcgcatctgtcctctgacggcaccttcgatatgtacgagatcatgcgtgctctgtatgagatcggtttcgacggtcccatccgtcccgaccacggtcgtatgatctggggtgaggtggcaatgcccggttacggtctgtacgatcgtgcccttggtgcgacttatctgaacggtctgtgggaggctatcgagaaaggagctgctcgctatgagactaaataatgaaggtttaaaagatagaaagtcctgggaaaacgcaggttattctctgccggagtatgatcgtgaaaccgttacaaaagcaacccgcgagaaacctttctggattcatttcggtgccggtaacatcttccgcgcatttcaggctaatgtcgttcaggatctgttgaatcagggagtcctcgacagaggtctggtggtagcggaaggctatgattatgagattattcaaaaaatgaatcatccacatgatgattatagtatccttgtgacattaaaagctaacggtacggtggaaaagacgatcgtcggcagtgttgtagagtctctggcactggattctgataacgcagaacagtttcagcgtctgaaggagattttttccgctgacagtttacagatggcttccttcaccattacagaaaaaggatataatctctatggtgcagatggtaagtttactcccctggtcgctacagatctggctgctggtcctgaggctcccatcagttatattggaaaagtagcatctctattatatgcaagatttcttgcaggagaaaagccgattgccatggtaagcatggataactgctctcataacggtgataaacttgcagcagccatcggtgcttttgctgagggttggtcccggaacggtctggcagataaagatttcgaaagctatatcaagacaagcggcaaggtctctttcccttggaccatgatcgataagatcaccccccgcccggatgcttctatcgaagcactcctgaaaaaagatggtgtggaggaattagatccagtcatcaccggtaaacatacttacgtggcaccttttgttaatgcggaggaatgtcaatatctggtcattgaggataattttccgaatggtcgtccggcattagaaaaaggcggtcttatcttcacgaccagagagactgtggacaaagtggaaaagatgaaggtctgcacctgtctcaacccgctacatactgccctggctgtgttcggatgccttatgggatatactctgatctcagaggaaatgaaaaatccgagtctgaagaagctggtagagcagatcggatatactgaaggattacctgtagttgtaaatcccggcatcttagaccctaaggaatttctggataccgtattaaatgtacgtatccccaatcccttcatgccggatactccccagagaattgctacagacacctcacagaagctggcgatccgttttggagagaccatcaaagcctacgctgcggatccgaagctgaatgtaggggatctgaagttcattcccctggtatttgccgggtggttaagatatctcatgggagtagatgataacggcaaggcatttactttaagctccgatccccgcctgcaggagttaactgctatagtcagtggtatttctctcggagcttccactgatgtagaagcagttcttgataatgtgctgtcggatgcttccatctggggcgtagacctgaaagccctcggtatggataccatagtctgccggtatttccaagagttgattgccggtcccggtgccgtggcagcggttctgaacaaatacacttcctaatctttataaaacaaaaaatcctgttccggcggcttttctgtcgttcggaacaggattttattttttcatttttacagattcatatcatctaacaacatgtctgcatagataccgccaagttctctcaatcctctggcgatcagagatgcaaaatttacagcaccgtcataacgcaggtgggtattatcctcggatttctccggatgattcttatactcgccctccgggaagaacatataccatcttctgctattcttctctccggcttttttcagctccatacggctcatgctgtagagatccaccagaggaacattatttttctccgcagtctgcttcatagcagccacataatcggaatgcgctccgatccccaagtgtttctcatccataaagcatctgcgctctaagggagtgatcagcaccggataggcgctgtgatttcttgccacacggataaaggtttcgagattctccatgtaagcggaaaaaggctctgtatatctggtgggatcctcttttttctcgtcattgtgtccaaactggataaacaggaaatcccctgcaccaattttctcctctatggctttcagtctcccctcgtccataaagcttttcgtgcttctgccgttcttggcatgattgtttacctgatattccggctttataaataaagaaaatacctgaccaatgcctgtctgcggataggtcgtatagtcattggtctggaccgtggaatctgcagcccaaaaaattctgttcatttctgccctcatttctgcgcttcccctgcgcatcttttctcgcggaatttacctgcatatacaacacaagggaaaccgaagtttcccttgtctaagtctaaatacatgtgagaagaaaatcactccttaacagcaccgatattaacaccctttacgaagtacttctgcaggaaaggatacagtgccatgaaaggtaagattgcacatacgatcgctgcatagaacagagtgttctgggataccgaatactgtgtagtaggggtatcaccatccatgatcatattacgtaactgatactggaagttaacctgatcaggattggtaatatagatcttaacggtagaatagtcattccatacggtaactgcgaacatcagaccgatggaagccagagctgccttggacagaggaagcacgatcttgaagaagattcccataggggaacatccgtcgatctctgctgcctcgaacagactggcaggtattccttcgaagaagttacgcatcagtaccaggttgtacacgttcataccgtgcttcaccaccaggatccacatgctgttaaccaggtgtaactgcttcattaccaggtactcagggatcataccaccggagaagatcatggtaaacagaaggaaatatgcgaagaagttacgtccgggcatatcaaactggatcagtacatagccacccagggtggacaggagcagaccaaggaaagtaccgagcaccgttgtgataacggagttgatgaaaggtctgtacagtctctgggtatgaatgatggtcttatagccatctaaggtaaaatcctccggccacagtctgaactggtatacacccacagcattgaaggagtctactactaccttccagataggtaccagtaccaggaggccgatcagaataaatacgatgtagtttacaatatcgaatacatgaacctttttcttaggtttacgataagctgtctttgccacgtttaacacctcctatacaatgccacggccacgggtcttcttacttgcccagttacatatcagtaccaggacacagccaaccagggacttgaagagaccaactgctgtagagtaaccatagttcggcagagcgatcgcgaacgtctgacgataaatataagtagaaataacatcagacacactgtataccgcattgttatacaatacgaatacggactcgaacatgttcataaccttagcaaggttcaggatcaatacggtgataatcgtattggacagtgcaggcagcgttacgaaacgcatcttctgcatacgggttgcaccgtcgatatcggctgcttcatacagctccgggttgatacctgccagagtagccaggaagataatagttccccaaccggtctctttccagatattgataaggtagaagatcggtctccaccatgcagtgcttgccaggaaataaattcccttggcatccggtgccagaatgccccagtcacgcagcaatccatttaccagaccggtagaggaaggagacaggaacaagctgaagatagatgcaactactgcccaagacataaagtggggcagatatatgatagtctgcaaagttttctttgcaaagagatttcccatttcatttaagaagattgatacgataaccgcagtgaaggtcgtgatcaacaacttcataatactcagttccaatgtgtttctgaatgcactccagaacgcatcagtcttaaacatactgtaaaaatgcttcaggcctacaaaagtaggtgcacctacgggcttgtaatcgtagaatgcataacgaataccaagcatgggccagtaatacatgatcaaaatgaacacaaatacaggcaggaacatcaaataatagcctctgttattccagatccggagaccaagaggcttgtgacgtacttctacgccggtggatgtggtgattttctttttcttgctcataccatccctcttcctttcgacttcatctcacacattcttttctctctaaaatatcctgtcccatgggtttttgcatcccggcgggacaggataattatatcatgtttttgtagcttctgctactatattgcagatattattactggttcagttcagctaagcactgatcaatgatagatccaactgtgtcaacgtaggtctgcatagctgcatctacatcgccaccgtcaactactactgctgtgatagctgccagcttagcatcatagatggtaccggactcgttggtgtaggtctcagaggtaggagactgaggagcatccttacagttctcggtgaagaacttgttgccttctgcagccaggctggaaatatcgttaaagccgttgtccagagagcagataaccagagcgggatccatagcattcttcttccatacggagttaggatcgttaggagactgctttaagtggaatgtaccgtcttcgtactcgtaggtcttctctttttcagtacctgcattgatggtgaagctttcagccttggtagaccaatgaacatcctctgcaccataggtccacagagtctgaaccttgtcaccatccatcatggtctcgatgaatgcatcgaagatagcctgctcacgggagttgtctccgtcaccgtcatcaatgataacccatacaggagcttctctgttcaggtaagcgccaacctcagcgataggagccagctcaaccagcttctcgtcaacaccgttcttgatcaggttatcggtcagagtctgataccaggaacctgcccagtaagtgaatacacctgaagaaccggtctgatcgttggagaaccatttctcacgagcgatcttggtggaagcggtcagggtctcaggatcgatagcgccatccttgtaagcctgctgtaatcttaacagagctgccttggtagcatcggtctggaatccatcgtaccaggtaccgttgtcatcctgcaggattgcgggataagaatcctgccagaactcaggcagatagtttacgtaaggagcttcgttaccaacgaaaccagctgcgataacaccataggtatcaccggttacgccgttaccatcgggatcttcgttgtggaactttaacagcatgttgtagtaatcatcataagtcttgatgtcttcagccttcaggccaacagcatctaaccatgcctgcttaacataggtaacacatccattaccataggtaggagcgaaaccatacagatgaccttcctcatccttcaggttctcgttgatctcaggcaggatcagatgagactggaatttagcgtttgcatatgcttcggacatatcccacagcagaccggtagg

SEQ ID NO: 11307 - DNA, 26574 bp, Unknown
  gut microbiota DNA sequence
gatcattacatcaggatagtcaccgcctgcgaacagacgacctactgcatcggtataaccggagtggtctaactgctggatgttcatcttaataggatgaccgattgcttcggatactgcatcatcccactgctgaacgaattcagcctggccgttatcaacggttgcggtcagagtaccattaactactacgttaatctcctccagattgtaagcttcggtggaagcctcggtagaagctgctgcgctgtcagttgctgctgcgctctgtgcaggagcatcgttgctgcttccgcatgctgctaaggaagctaccatagcagatgctaaaagtacggataatacttttctcttcattttgttcctccctaaaaatttggaatcatgatttgtcatggggtcattcccttgacttgccctcaccttaccatccgtcaccgggaaaaacaagttacaatttttgcgttcgggtgcaaattttgaccaccggttctgcaaacccttgattttactgcgttctttgaaagtacttacatttgatatttttaaatttgaaaggggttacatcttgcttcctttgtaagtaactgatacaatagacatgatttattcggtatattatctaaaaaaattgagacatgggagtgatcatgaatgatttttaataaaaaagaagtccctaatgatacaaattatacaagccacaacaatacattaatgctgaaaatggtaacctcttacagtattttcctgctgatcattctggttttgttcctctttttataccgttctacgataaataacgcgcgtgattcttatgatcaacagaacgagacaaccctgatcagcaatgcagagctgtttgaaagcgatctgaacattatggaggtgtattgccggcagcttttgcagaacgacaccttccgtaaggtcatgaattatcagaatacttactatccttttacggagatggggaatgaattacagaattctctggcgacaaatgtatatgctgaggcacttctaccgttaaaagagtcctttgtctatttcccggagacagactatgtattgaatcctacttatttcatatccgcaaagcggttctataactggattcagaaatactcttctaccgaaaaggaactgtggcactcctacatgacggagccggaatacaagaaccgctttcttcctatggatcagttcatgccaaattacagtgaaaaatactatatgtatatcatcgacctgaacgatctctactatatggatgccaacgcgaaggtctgctttatcttcgaacaggataaaatggcggatctgttcgactgtgtacagatggatggagataattttcttgcggtgaccgcagaagatggctccaacgtgcttacaataaataccccggacagcatttccacagaaatgctggattccctggactttaataagggatatgcccaggtccgtctgaacggtcagtcctttactttgggaaaatacatttcagatagcaccggttattcttattatttcagtttccctccctataaagcaacagccggtctgggaggtacgcagctgattttcattttactggcaatgtttgcactggtgatcggcggttctctggtatattatttttcccgtcggaatgtacggcctattattgaactcggtcaggagctgcagactgctgtggaagtacagaagaatctgcaggcagtcgtagacaatcagcgtcccattatctgtacctcttatgtgcgtcaactattgtcgggtacggctacatccgaagacgaggtggcttatatggaaaactatcttgggatcactgcttcttcttattataatgtgttatatattgtgtactataataacttcggcgataatgtagaaaatgctcttcccggcggcgtggaatctgtcgaagagctggagaagatcatcgagtccgcactggagaatttcttcggtacaccacttttctacttcagcccttcggaccgtacctattctgtcctgctccattgttctgaagaggaagcaaaaaatctgatcctgaagatcaacaattgtattttacgacttcatgattatctgctggatacctacgacatctggctcttcgctggtatcggtcgcaatacggattccctgatgaatgtatgggaatgctaccagcaggcctccgaagccgtaagttatacgacgaagaactatattttcttcccgtatgaatttattaagaaggattccaacgtgttctattatccgccggagatctcaacgaagctgatccacttcatctccacgggcaatacgccgcaggtattggagctgttcaacctgatccatcaggaaaatatcgaggaacgtaccctgccggtcaacctgttaaagtacctgctgtcagatatccgtaacactttattaaaagcgagatttgcactgccgcaggatgcggatcccgaagccgtaaaggttctggatgagcgtttcaatgagcacctgaccttcaaattgtgcgaagatcttgcattatccctgtgtaatctcttcggtaataaagaggatgacaatacattatctactacgattgagaaatatattaacgataattataaggatccttcgttgggtttaaacaagatttcggatgagtttcagatctccgagagctatttctctcatatgtttaaggaaaagaccggggtcaacttctccacgtatctggagaatatccggatgacagaggctgccagactgatccaggagaccgatatcagcttaaatgagctgtatatcgctgtgggatataataattccaatactttccgacgtgcattcaagaaagtatacggagtaactcccagtgccatgcgggagaaatagaataataataaaacagccggggcacgaaggatttaatcctccagaaatgcctcggctgtcttcatatcttccggtgttgtgatcttaatattctgataggatgcttccaccagcttcacccgggactcggtaaacatctccaccacgctggcatcgtctgttacctgaatgccctgctcctgcagctttggaagcctgtttttcagtcgctcatacgcctgcaggatcaggctggtctcaaatacctgcggtgtctgaatattccagacgctcctgcggtccggtgtggaaagtgcaaagccattgccatcgctgatcttcacggtatccttgctctgtaccgctgccacacacgcctgatactgtacagcagccgcataggtgtcttccagaattttctccgtcaggaaaggtcttgcgccgtcatggataaacacataaccatgctcattcggacatttaaggcgtccgtccgcgatcagctgcaatgccctgctcacagagagataccgttccgctccgccggaagtaatgatatttaccttcgtaaaatggtatttctgcacgatttcttcccggacatagggaatatcctgttccgaagtcaccagaatacagtcatcgatgatctttgactcttctaccgcatgcaatgcataccagatcagaggtctgccctttaacggaaggaactgtttcgccactgcggagtgcatcctgcttccgctgccggctgccaggataatggcagtacaacgcggtttttccttgtttccatcctctttttctgttttatatgccgcaaaatcttctgtgaaatactcttctgttactctgtctatcatattcatgtcagtctttctataatgtcttctatattaatactccttagcgttctcccaattttaaattcgggaccgcattcagatcatagccgctgcggacacctttgatatattcataataacccgccacaccgatcatcgctgcattgtctgtgcagaagatcggagaaggatgataaaatgcaatatttcgtttaccgcactcttcttcaaaggctgcccgcagagaagaattggatgccacgccaccggcaatggcaaatttattcaggccataggcttttacagcatgcagtgaatgacttaccagcacatctaccactgctttttggaaagaagcagccacatctgcctgattgtagctttctcccttcatctggcagccatttaagtaattcagcactgctgatttcagaccgctgaagctgaagtcgtactcgttttccgccactgccgccctggggaaatgaatcgcatcgggattgccctcctttgataccttatcgatcttaggtcctccgggatagcccagcccgatggcacgcgccaccttgtcaaaagcctcacccgccgcatcatccctggtccgtccgatgatctcatattctccgtaatccttgaccaccaccagatgcgaatgtccgccggaagccaccagacagataaaaggaggctccaattccttattttctataaaatttgcactgatatgtccctcaatgtgatgaacacctaccagaggaataccggtagcaaagctgatggctttggcttcggatacccccaccagaagtgctcccaccagtcccggtccgtaggtcaccgcaatcgccgtgatatcgtcaagtgtcacatgggcatcggcaagtgcctgctcaatgacctggttgatcttctcgatatgcttccgggatgcgatctccggcaccacgccgccgtacaacgtatgtaaggcaatctgagaggagatcacgttggaaagtacctctctgccgttttttaccaccgatgccgctgtctcatcacaggagctctcaattcccaaaatataaatgtctttttgtttttctgtctctgtcatttttctgcctgctttgttctaattattgtctgtctgttcctgcttactgttcaactggtccgccgtttcccaaccatagattttccatctgcgattgtcatctctgcgtaacagatataccatgacggtagtactttttttgccattttccgtcatcgtgtaaccgcaggatattcgtgcaaaggaatatccatccgctgtataatagtccacatttgtgcttgatgcaagagaaacacttgttatttttctcttattgtttttataattctgcacttctccctgcagacggatgaggtaggattcttcttcgttgttctccctgagttcctcatcaaataattgcagtgactttttccccagttcctgaagttcttcctccgtgcagtcttcattataaaaacatttcatcagatcgttataatatttgaccacttccttcggtgtcgaaggataattgttctcgaggtttcgggaaagtgcggtgtcgatttccgacatcaccgcttcctgttgctcggtgcgatgcgttccggacagatacgcataatatcctaccaccagcacgagtaagaagatgaaaaagactgtaatcttagtcacagatgtgttggttttcttcataagatcgttcactctccctcatcaaatttcagttccatggtccaaccatctttcgccgcataagtcgccggaaatatcttccgcacatcctccatgaattcctccggtctggtcatggacgggctgtagtgggtcagccataatttcggtacttccgcttcttttgcaatcttcgccgcctcatacatggtcatgtgcttgtgttctctggctttcaccagtttatccggctctccgtacataccttccaggatcagcagatccgatcctttggaattctctcggatgctctccgtaggtcgggtatcggtactgtaggttactttcaggcccttgcgctccgctcccaataccatatccggtgtaaatactctgccgttctcttccagggtctctcctttttgcagacggctccagaatttcatggggatttcctgctctatggctctgtccttatcaaatcgacccgcccggtcaatcaccatactgtacccataacagagtacattatggttgaccctgaaagcttccagccgaaaaccttcaaaagaaaaagtctgggcattttctgtaatctcaatgcatttcacttcaaagggaagttccggtgcgatcaccctcaacgaagccaccactttcgtaagccccctggggccgatcaggagcagaggctctgtccgctctgcatttcccatggtcagaagcatccccggcagaccgctgatgtgatccgcatggaaatgagtaaagcagataatatcaataggattgggactccagcctttttcccgcatggcgatctgggttccctctccgcagtcgatcagaatactttttccattatatcgcatcatcagggaagtcagccatctgtaaggtagcggcatcattcctcctgttcccaataagcaaacgtctaacattcttcctcgcaatcttgccttcacagcatctgttgttctatctataataattctgtctccggtacttcttccaccggaatgacaaatctgccgatccaactgtcgtagcagtcctcacacagatcaaaggcatgtctcataccgtctttcctgctaaaatatccaaaacggacatctgcggtgaaatatccctcccggatgatttccttttctacttttaattctctgccgcaggcgttacatattatctgtgttaatttaccgttttctgactttcgcatcttaccttccacctttctgatcgtaaaaacagtttcctctttcactatcatagcaaataaatcgccggatggtggtggtaatacttgttaacggcgccacatgatcatggcatcttcggtaggtttctcataaaatccgggacgaatcccttccgagacgaaaccaaacttttcatataaacggatcgccggtgcattgctcactctgacttccaaagtatatgccgtaatgccacgctctgcccccagtcggagcagttcttcgagcattttgcttcccactcccagattccggtactccggtgccgttaccacgttgtcgatattaccctcatgaaaactgtccgtcagtccggcacagccggcgatatgtccatcagtctccgccaccacatacaggcaatagtctcttagaagcagtcctctgaaatcctccgcagaccagggcatgctgaaggatgcggcttcgatgcggctcagttcttcgatatctgtatcccgcaggggacgaacctctatcttcatgcctgtgcctcttttgctactctctcctgctcttcccgttcccgctctgcctggctcttacgcagatattcgggttcatgctccgcggcggtcactgtcttaccctgtgcataataaatggctccgagagaagccacacttgctgcccgctgtctgttattggctacgggagcaaaggaaaacggcaccttcattccttctgtgatctgcctccggtataccggcacgccgtctcccaaaaagatcacttcacgtcccaggcggttcagttcgtccaccagttcgtccacaggagatgcgcactgattcttaacacaatgcatcacaagctgctgttcacaacttccagcctctgcttctgccttacagaattcatagatcccggtgtatacctgattccttctggcatccataatggggcagaccagcttgtccgtcccccaaagattaaatgcaagtccttccagtgtcggcacctctaccaacggcagattcagtgccagaccaagtcccttcgcggttgctgccccaattctcagtccggtaaaggatccgggacctgcggagatagcaatggcatcaatggtgtgaagatccaggtcgatcatctgccggatctcgtccaacatcggaagtaatgtctgggaatgtgttttcttataatctgtggtatactctgcgatcaggacatcgtcttccacgacggcggcacttgccaccagtccggaactgtccaaagctaatattttcatactgtagtcatctcctcaatcgtgatccggcgataatcgaagcccttctccagatccttttctatggtcacctgtctgtagtgctccggcaggatctcttcgatcagattcgcccactcgatcaggcacaatccctcaccgtaaaaacagtcctcgtaaccaatctcttccatctcctccacatctccgatgcggtacacatcaaaatgataaaaaggcatgcggccttcctcatagatctgcacaatggtaaaggtgggactgttgaccggttccgtaattccaagaccgtctgccactccctgggtaaatacagtctttcccacacccagatcaccgatcagggtatagacctgcccgggaagtgcttctaagccgatccgctgtcccagtgcaaaagtctcctgcgcactgtgagtctctataatttcttttttaaattctttgtttgctgtggaatcacctgttgtcatttttcttacgctttctatagacaccgtaatggccgttgttactttccggaaaagctctcagctctatggcatttctagctgcggatcttcacctttgcagggggcatatgcgtggaaatcatttcaataacatccgttgtcttatcctgcatctggcttttgggaaatatcgttgcattattctttgccgtatagacaattatgctgcgcccggtggagactgctttcagacaatcctcccatgcctggcaggtggaactgtctccctgagaaatagtaatgccgttctcatccaggacataatgcagtggttccctgaagaccggattgttcgctacctgctgtttgcttttgataaaaagcgtccaagggagatataacaggatcaccactcccaggatcagatagatccagtactgtctggaaattcccacaacaacacccagtgctccgatcaccgctcccaaaagtccggacacgctgttatagctgtgccgtaataaaaaatcatataagtcccccgatgtaatcttcacatccaattctaccataacgtgttctttcctctataataatgtatgatgccaggagcaaaagagctaaccccacatgagcctgctcataggcggttaaaaggccccgggctccgtctgtgcataaaactgcatactatagagaacattataatttttttcccatgaaaaagcaagtaaagaaccgcagggatttataatctgtcacctgcggttctttatttatgcattttatttaattatgatttaatttttatgattattcatgccgtaaagcttcgatagggcttagttttgccgcttttttcgccggatagataccgaaaaagatacccacggcggaggagaacaggctggctcccagtaccgttcctgcgcttacttttgcggtaaaaccgatcagactgcagatgccaaaagctcctgccactccgatggtaataccgatcagacctcccaacagggtgatgatcgccgactccgacaaaaactgtagcagaatggatccggttctcgctcccagtgctttccggataccgatctctctggtacgctccgtgacagataccagcatgatgttcataacgccgataccgcctaccagcagagagatggctgctacgaacactacaaagatagtaatgtagcttaagatctgatccatctggctcataatatcattaaaattctgtacagagatgacattctgtcctctgacaccatgcctgttctctagcagacgcaccgtatcctgcgccacctgagaggcattttccgcgccatcactgacgatcagcaggtccgtataattcacatagaatccatatccctcggaaattgtggagataggtgcctccatggtcaccgtaccgtttcctcccattccgagcagcttcgatgcgttgtccttacggataccaacaatcgtaaattcctgtgtcactccatacaacgtataatcaaagctcattccgatcacattggtattaccaaacagcgttttcgcgctgctctccgtaatgacgcagactttgttcgccgtataataatcggaatctgtaaaataacgtcctttgatgatcggatcctggctcgaatattccagtcccgccttaccgaaagttgcagtagcatcaaaggttccctttctgccggtggcgcttccgctgaaactccaggacggtgttaccgccttgacatttggaactttctccagaatggcatccatatcctcttccgtgaataccacctctgttccattttccgcggtatcattgctataaaccgcgatctgaccgcctgccatagaattcagttctccgttgatcccacttttcacgccattacctatggagatgatcatgatcaccgaagagattcctatgataatgcccagcatggtcaggatcgaacgtcctttattactgcggatattcatcaatgcaattttgatgtattcccatacttgtgtcatggatccgcctcctactgttccatgggcacagccgttactgccatgccctcctccaggctgacacccgtgaggctgttcactatgatctggtcttcctcggtaatgccctccaggacctctgcgtattcatcggaggagattccgcaggtaattgccctcttaactaccatgccgttctcgatcacatagaggaaatctccgtttttatccgcattgatcgcttctaccgggatcaacaatgtatcctgtgcactgttggtatgtacggtcagctttgcatccagtcccagaatgatcttgtcatcggggttagtcagatgtacttctacccctaccatgggcgtattggaggcattcagtgttgccatacgattgatcttactgatctcgccttcgtatttattgccggagatggtaatatctactttctgcccgatggcaagttttgccacatcggacttggaagcatcaaaggaaaccttcacattctggctgctctccagtgtgatcagctgtgcgccctccgccacactggctccggatacaccggtgcattccgttacgataccgtcaaaatcagctacaatgcctttcttcgctgaataatactgttcctccgcctctttgtaggtcagctgtgccagatctctgtcagcagcgtacccttgggactgataaccgtttaagatcgatccttcaccggcatccttctgtgcctgcatcttcgctttataagtttcacattcctcaatatgttcctgtacggaagcaatctcattctgcatatttaccacgtaatcgctggatcctgcaatggactgcacataagaatttctcgcctggctggcgctgatatcctggagttccttattgatttctttcgcacggtctgcactggtagcggaattctgcagttccttgctcaaatcagcggattttctggataattcatagctttcttcggataactgtctctgggtttctctctgactctttgcaagtttatcctgcagttctttcagataagccttgtaatccgtcagctgttggtccaacactgccaggttcgtgttggcttcgtttaatttggcctgactcttgctgttctctgtcatggtactgttataagaagcattgctcttggtctgctgtaatgttgcctcctgcagacgctcctccatctgctccatgtcataggtcatcagcacatcccctgccttcacagcatctccggctgccacattgacttcgtttaatctgccgcctaccggcgcaaagagaaccgctttctcttcactgactaccttgccgctggtgctgacattttcctcgatgtcaccgcggaatgcgttagtagtgctgaccatgacacccgcactgccggaaaatgcacagcttaccatacggatcacgatcagtatgattatgatagcagcaataataataggtgcttttttacgttttttgccgattttacctgccttctgttctctttttgtttcttttagctttctcttttcttccttcttcattgccttgctttcttttgcactcagtgcctgttctgttttttcctgctgttccatgatctctcactcatgatcctttctattttatactcatgtcttttcattcgctgcatgtgaaaatctgttttccgcatcaggctcctgccgtctgcaattcctccaccggaacgatctgtccggaatcggattctactttgccgtccttgatcttgatcactcgcttcgcctgtgctgcgatctcattatcatgtgtgatcaatatgacggttcttccctctttatgtaatccttttagaatatccatgatctctttcgtggaattggagtccagattacccgttggctcatccgccaggatcaccggaggtgcctgggctatggccctggctatcgccactctctgctgctgaccgccggacatctccgaaggcttatgatccatacgatgttcgagacctacctttttcaaggcctccacggacagctcttcccgcacacttttggatactcccctatagatcagaggcagctccacattttccaatgccgtcagattcgggatcagattaaacccctgaaagataaacccgatctcccggttccggatgtcggacaatgcatcgtcggataatgcggacacgtcctgtccatgcagccaatattccccgctggtaggcacatccagacagcccagcatattcatcagtgtagactttccgcttccggaatgcccgatgatagccacaaattcctgctcgtcgatggtcagactcacatgatccaatgcccgcacttcattttccccgggattgtaaaccttgcacacatctttaatctctactaatgcactcattcctcacatactcccatttcctgttatatttttgtgtattcatctttgtgtcactgtactgttcgcataatacaataatattttttgagtgtcaacacatttttataagtatttgcaactattcagagccatgcaaaagaaaaactctgaaagggcaattttgcgcatgcggtcctgaatagttattacagctactataacagggaaatcccaaaaaaatgttgggaaaattctaaagattttctatattgacttttatttcacaaagtgatatattccatccataaggtaaagttcttcagggttgggtgtgattccctactggcggtaataggtcatccttaagtccgcgacccgcagatgcaattctgcggctgatccggtgtgaatccgggaccaacagtacagtctggatgaaagaagacgtatcacttatatttttttgtgatacccatgccccggaagcttgtattccggggctttttttgaaggctttccttgatttttctcataggaaaggagttctgaaatgaacaaattaatgcaaactgtaactgaaaatgtggcctatgtagtcatcttcctggcggtcatcgtgggctgtttcctggtggctgtggtgctggaaaagggcgcgcagaagaaaaacggcatctcggagccgatcttcaatacgagaaagcttgccatgatcggtatgttttccgccatcgccatgatcctgcatgtgctggacttccccatcttttttgcccccggcttctataaaatggacttcagtgagctgccgatcttagtcggttcctttgcttttggtcccgtagcaggtgtcatgatggaattcgtgaagatactgctgaagctgtgcataaaggggacctctaccgctttcatcggcgatctggcgaacttcgtggtaggctgcagcctgatcatccccgcttccgctgtgtactcttttaagaaaacaaagaaaagcgcaatcatcgcctgcattgtgggtactcttttcatgaccgtattcggcaccgcattcaatgccgtatatctgcttcccgcgttctctaaattctacggaatgcccatggatgccatcctggcaatgggaaccgaggtcaatccgctggcaaaggaaggcaacattgtaagcttcgtggtggcatgtgtggctcccatgaatctcatcaagggaacgctggtgtctgtcgtaacactgctgatctacaaaccgttaagccccatcatcaagaccggtcacaaagcataaaaagcataattgatgaaatcaaaacagggacagccgttatctgctgtccctgttttttaatacctacggatgctccgtaccagacatgtaccactggcacatagccccctggcatcattctatattcttactgcttctggatcttcatggtcagaccgatacgtttctttgccatatctacggtgagtacctgcacatccacgatatctccgacgctgacagcttccaacggatgcttgatataacgatccgtaatctgggagatatgcaccagtccgtcctgatggacaccgatatccacgaacacaccgaagtcaatgacattacgcacggttccctttaagatcataccgggttttaaatccttcatatccaggacatcactgcgcaggatcggtttcggcatatcgtctctgggatctctgcccggcttctccagttccttcagaatatctgtcagcgtgatctcaccaatgcccagttcctctgctaaaagcttcttatttttaatacgcttctccagaccggacatatcctttgcatcatttactgcatttttagctacaggtgccgcctgctttgcagaggtctgcgcagaattgtcaaaagtcacaccgcccatggccgctgcgagagccttgcccatagcggtattggtattgtgtacccgaactgctttacctttctgttcttcccgcttcttcggtgcattgactgtgccgttaccattcttctgtccgtctgcctgcgcagcgctgctcctgccggaagctttttttgcagccgcctgcttctgggcttccttaatatcttccatggtcagtccaagcttctccatcaactgttctgcagcttcataggactcgggatggacacttgtggcatccagcggattcttgccatccgggatcctcaggaaaccggcacactgctcatacgccttaggccccagcttcggtaccttcaacagctgttttctgtttacaaaacgtccgttattttctctataatccacgatattcttcgcaatcgtcttgttaataccggagacatattcgagtaaagatgcggatgccgtattcagatccacaccgactttatttacgctgtcctctaccacgccgcttaaggcgtcgcttaatttcttctgattcatgtcatgctggtactgaccgacaccgatggacttgggatcgatcttcaccagttctgccaggggatcctgtaatcttctggcgatggatgcagcacttctctgtcccacgtcaaaattaggaaactcttctgtcgccagcttacttgcggagtatacggaagcacctgcttcgttgacgatcacatactgtaccggacgatccagttccttcaacagctctacgattacctgctcggactctctggaggccgtaccatttcctacagaaattaaatccacattatattttttgatcagtttcttcagctcggctttggactcctccaccttattctgtggtgctgtagggaagattacttttgtatccagcacttttccggtagcatctaccactgccagtttacagccggtacggaacgccggatcccagcccaagaccacttttcctgcgataggcggctgcaacagcagctgctctaaatttttgccgaagacattgatagctccgtcctctgccttttctgtcagatcgttacggatctctctttcaatagcgggtgctattaaacgatcatagctgtcttccactgcagcacagattaccggtgtggtatactcattttccttcgtgatcagctttttctccagataacgcagaatacgctcttccggcgcattgacttttacagtcagtactttttctgcctctccacggttcaatgccagtactctgtgacctgcaatcttcttcacaggctcttcaaaattgtaatacatctcgtagacgctctgagccttctcatccttcgcagtactgctcacaataccttcctctacggtgatattacggatgtagagacgatgatccgcatcatcggagatcatctcggcaataatatcctgtgctccctgcaacgcttcctccggagtctttacttctttttcttcggaagcatacttggccgcctcgttaagcaccggttctgttgcctcctggcgcagaatgtattctgccagaggttccagccccttctcctttgcaatactggcacgggtctttctcttgggtcgatagggtcggtacagatcctctaccactaccagcgtctgagctgccagaatcttctcctttaactcatcagtaagttttccctgttcctcgatgctcttcagcacctgctcctttttatcttccaggtttctcagataggtcagtctctcatcgagattacgcagctgctcgtcgttcagagatccggtgacctccttacgataacgggagatgaaagggatggtatttccctcatcgatcagcttcaccgcagcttccacctgccatttttctacctgaagttcttctttgattttctgtataatatccatagttcctcctgatggcctgttgccattttgttttacgcatgggtatattatactggaaatcggaagttttctcaatcttttcatgcttaactattcagagccatgcaaaactgcgttctgcgaatgcttgcattcaggcagataagcagttttatatggcgaaaataaccacatgagcaaaaggaaagctacgaagtagcggttttgcgaatggggttctgaatagttatatttcatttgcttattacaggaaaaaatggtacagtacttaatataagcgcggcagacaaattaaccacatgccgcccggaaatgaggctttctatggattattatcagaatcagaataacgaaatgaatcaaaatataccgcagatcgatccgaaatacagggggttatcgatcgcttctatggtctgcggcatctgttccctggtattatgttgcacaggactgctgtccatccctgccggtgctcttggcattctctttgcaatgcttaccagaaaaaagggacagcgtatgagcagtatgtgtgtcgccgggatctggctgtcctgtgtgggactggcactcggtatcttcatcacgatcagcagcattgtcacggtatttaccgatccttcttataggaatatgctggatcagatgtaccagcagatgtacggtgtcgatatggaaggattctggcagtcgtacctgtaagacatgccgatattttccgatggattctgtggttacgaaataataaaaagaaaagaggatttctatgacacaatatacatccagagcccaactcaaagaaaaagccagagatcagatggcaggccattacggcaatgccattctgctgtccatctgccggagtctgatcgtattttccctcacctttgccgtcagcatgaccttcactatgatccttaccgtacggacaattatgggaggaagcgcagagacatctctgacggaatatctgcttttgacggcgactacgactttattgtcgatctttgccggagtatttcagaccggcattacattattctatctgaatactgcctgcaacaggcctgctgtaaccgccaatctattctacggcttcaaatacttattcaaaaaatcgcttgggatctccgcagtactgatcctgctgaatacggcatgtacacttccttttgatatctgctattttctcctgcggtcagggaaaggctttgataccataaccatggcaatcctgtgcattgtgcttatggtcatcggtatgtgtatctatgttccgttatcccttggtttatcccaggcttactatttactgttggatttcccccagtataatgccatggagctgatgaaattaagcttccgcattatgaagggacataaatgggagctgttctgcttacaaatgagtttcctgccgctgggatttctgtgtttgctgagctttggtatcgggagcctatggctggtgccatatatgaacatgacccagaccttatattttctggatctgatgcagaacgagcacaggcattaattgcctgtgctctttattgtctgtgctatcaccgtgatggtgtccagtaccatatctttctgcgcatcatccgtataatttccggtatacacataaatttttccatttttcaactgatagatctgaatctggtccgaagcaatattgttacttaaaagtgcctcacggccgcccatggcttctatcgtttcctctgtccacgcgccggtatctaccatcatatccagtccttcctgggtcagtgacatattgtcctccagatagaacaccggtgtaccttccatactgcgcatttcactttcctttatcaccatataaggagcctgttcttttaagccatccaacattacctgcagaagttccggtttcaactgtgtgaccacggtgtcattctccgccaccgagatacttgtggagccgtcatccgctgtccctttatagaagatcgtaagcgggtgataatccgtcgtcacctgctcccacacttcccagtcttctgccggatagctgaaactgaactttccatcacttaagctctccagttccattccctgcagatctgccagctcgatcaccggatattgggaagtctgtacccgattccggaccaaagggatcacttttgccgccgtaactatcacagccacaacgatcagggcaagcacaattctgctgcccatggactctcctatcgcttttttgccctggtttgtctctttgttttcgtttctcatatgtaattttctcccttataaaaaatcacattccagaaagctttcactccttctggaatgtgtcatttacaaacttgaatttgttaattctctgtgttcttcttatctccctgtacgctgatccatttcagatagccattgatgaagatatccagtccgccatccagcactgcgtccacattgcctgtctccacatcggtacggtgatccttgaccagtgtgtaaggctgcaatacataggaacggatctggttgccccagccgatctccttgacttcgccgcggatatccgacagcttctcggcatttgcttccttttttaacagatacagcttggctttcagcatctgcatagccttatccttgttctggaactggcttcgttcgttctgacactgcactactgttcccgtcgggatatgggtgatacggatagcagatgatgtcttgttgatgtgctgaccaccggcaccactgcttcgataagtatcaatgcgcagatctttctcatcaatatccacatccagatctccttcgatatccggcataacatccagagatacaaaggatgtctgacgcttaccctgggcattgaaaggagagatacgcaccagacggtgtacacccttctcagatttgaggtagccataggcattcaggccattgacctggaaagtcactgacttgatcccagcctcatcaccatccaggtagtccagtacttcaatggtaaagcccttgcgctccgcccaacgggtatacatgcgatacagcataccgcaccagtcacagctctcggtaccgccggcaccggcattaagctttaagatcgcattattcttatcatattctccggacaatagggtaccgatcctaagttcatcgaattccctgatgaattcatccagttctccgcggatttccgggatcagagactcatcgttctcctcatatcccatgtcgatcagagtcaggatatcatcgtactgtgtagaaagcttatcacactctcctaccgtatccttcaggttcttcagttctttcattttctggttggaacgctccgggtcatcccagaatccgggagcctccatctcacgttccatttcttcgatccgctttgccttgttagcaaggtcaaagtgaatccctcacttccgctaaaggtgtttcgtaggacagaatttctgtcttcatctgatctaattcaaccacttaacgtcacctactttcttattctattattttctattatcgtaattctcactttttacggcaggcacaccgtctgtccgcgctgccgcactgtcttccactgtcgtcagaaaacatcaggccttccgtccgcagcagttcttgtattttttaccgcttccgcaggggcagggatcattcgggtacacctttgcattttcacgctttacaggtcccttcggtaaggaatcgtccttgttcgtgccggtgatcttcgcctgctgctcacgctctaccttctgttcgatcttgatatggaacagaagtctcacagtctcttcccggatgttctgggtcatctcatcgaacatctcgtaaccgctcatcttgtactctaccagaggatctctctgtccgtatgcctgtaagcccacgccctgacgtagctgctccatgtcgtcgatatgatccatccacttacggtcgatgaccttcagcagaaccacacgctccagctcacgaatggcttcgggttcggggaattcggcctcttttgcttcgtacagcttcacagcttcttcctttaactgctgctttaagctgttcttcttgggcttcttcacacgctccggtgtcagaggctgtaacgggatcgtaggaatgagcagggtatttaactcattgaaatcccagtcggagatatctgcgtcgtcattgatacagatatctacacagttctcggtaatatcggtgatcatcttgtagatcacatcgcgcatgctctcgccgttcagtacccgcagacgctcctcgtagatgatctctctctgttcactcatgacacggtcatactctaacagattcttacggataccgtagttgttgctctcaatctttttctgtgcggattcgatggcattggtcaatgccttgtgctcgatctcctgtccctcggggatacctaaggtattgaacatactgatcaggcgctcggaaccgaacagtctcatcagatcgtcctccagagagatgtagaacttggactcaccgggatctccctgacgtccggaacgaccacgcagctgattatcaatacgtctggactcatgacgctcggtaccgatgatcttcagtccgccggcggctctcgcttcctcatccagcttgatatccgtaccacgacctgccatgttggtagcgatggttaccgcaccgtgtacaccggcatcggctacgatctctgcttccagttcatggaattttgcattcagaaccttgtgctgaatgccgcgcttagtcaacattctgctcagctcctcactggcttcgatcgtgatcgtacctaccagtacaggctgtcctgtggcatgcgcttcctctaccgcattcacgatagcgttcagtttctctctcttcgtcttgtatacagcatcctgcagatccttacggataacgggacggttcgtagggatcacaacaacatccatgccgtagatctcacggaactcggtctcctccgtgagagctgtaccggtcataccacactttttatcgaataaattaaagaagttctggaaggtaatggatgcaagcgtcttactttctctcttcacctttacatgctcttttgcttcgattgcctgatgcagaccgtcggaataacggcgtcccggcatgatacgtccggtaaattcatcgacgatcagtacctggtcatcttttaccacgtaatccttatcacggaacatcagattatgggcacgcaatgccagaatgatattgtgctggatctccaggttctcgggatcagcgaagttatcaatgtggaagaatctctcaaccttctccatacctgctgcggtcaggttgatgatcttatccttttcgttaacgacgaagtctccggtctcttcctgtaccacacccataatggcatccatcttggtcagttcctgtacgtcatcaccgcgcttcatctgacgtgccagcagatcacacatctcgtacagagctgtggacttgccgctctgtccggaaatgatcagaggggttctcgcttcatcgatcagtacggagtccacctcatcgatgatggcataatgcagtccacgcagaaccagctgttccttgtaaataaccatgttatcacgcagataatcaaatcccagctcgttgttggtaacataagtgatatcacacttgtaagcttcctgtctctcctcggaggtcatgctgttgagtaccacaccgaccttcagtcccaggaactcatgtacctgacccatccactccgcgtcacgcttcgccagatagtcattgacggtaacgacatggacacccttgccttccaaagcattcaggtaagcaggaagtgtagacaccagtgtcttaccttcaccggtacgcatctctgcgatacgtccctgatgcaggatgataccaccgatcagctgtactctgtagtgttccatgttcagaacacgctttgcagcctctcttacggttgcataagcctccggaagcagatcgtccagagtctctccctctgtcagacgcttcttatactcctcggtcttaccccgcagttcctcatcggaaagtgcctgcattgtaggacggagtgcctcgatcttgtctaccagaggttcaatacgcttcagttctctggaactgtgcgtgccaaatatcttctcaataacgctcattttttcctcgtttccacacccttttggcaataaaatatccatgggtcttcgcataattcaaaggttattgtagcagattttcctctatgtttcaacctttcaatatgcccataggcgtgaaaagactgtaaaaattttatgaacaggatgtggccccctaagagcctgcacaaattgacagtccggataaaaattattataatgaaatcagttaaattttcttttcatgataaggagcagaatacttatgaaaaggctgtccatcacccaactggttcccggcatgaccgtcgccgaagacgtctatgatctggaccatgagcttctgatacaaaaagggaccatccttacggataaactgatcaccaagctggatctgtacggtatcctcaccatttttgtcgaggatatcatacaacccgtgcggcctgctgaggattctactgacactgagctctcttactccgagcgcattaagagttctccggaatttcaactgttcaagacagattttgaaaatgatgttgaactgttccgggaaaatatgaatctcgtgattcaaaaaaatacctctttagatgtgaataccctattgaagaacaccatggccatcgtagccaatcattccggcagcatcagcattctggacatgctccagaacatgcgggaatatgatgattccacttacactcacagtctgaatgttgccctgatctgcaacatactggccggatggctgaagctgtctgacgaggaaattgagctggccactgcctgtggtctgttccatgatatcggcaaactgctgataccttattctatcatttcaaaaccgggaaagctgtccgaggaagaatttgcaacgatcaaaaagcatcccaccctggggtaccagcttctcctgtcccaggatgtggatgatcatgtgaaaaatgctgctctcatgcatcacgaacgtagcgacggcagcggttatcctttgaaattaaaaggcaatcagatcgacccttatgcaagaatcgtggctattgccgatgtctacgatgccatgaccgctgcccgctgttacagaggacctttgtgcccattccgtgtcatcgagatgttcgaggcagaaggcttccagaaatacgatgtctccatcctgcttccttttctggaaaatgtggtcaattcctgtctgcagaaccgttgtctgttaagcgatgggcggaaagggacgatcatttatattaacaaagacaagctctcccggcctgtcgtacaatgtggcggagagtatgtgaacctggcggatcagccggatttagagattgtgcgtctgctttaagttattcaggtatcagccatacaggaccttaggctgcattatgttgtagatgtcgcatgcagcctatctttccataaaagcaacatctacagaatggagttatttatgtcatacaagacttccttgcattattatgtcaatatgcccggaaatacccttccgggcacttctttttctactattactgaagcactgaccgccctgacggattcatcctgcttatcatgcgaaaagcagttcccggctcccgtttctgatttgcctcctgtgatcgtacacatcggggagggtatttatcgggaaaaattaatcatcaccagaccaaatgtcaccttcgaaggggccggtgcagacaagactattcttgtctacggagatgccgcctttgatcttatgcctgagggagataaacgcggaaccttccgcaccgcttccgtccggatcgacacccatgattttactgcaaaacatctgacttttcagaatgattccggtttcggacataccgtagggcaggcgctggcggtctatgtagacggtgaccgcaatgctttttatgactgccgttttcttggcagccaggacacggtcttcgatgcacctctgccattaaaagaggcgcagcccggaggcttcaagggtcccggagaattcaagccccgcacgattggacgtcattattatgaaaactgttttattcagggagacgtggatttcatcttcggcagcggcattgcctggttcgagcattgcacgatctactcgaagcttcccggagaccggatccctccggaaagtccggaggatgaagtgatctacggctatgtgaccgcagcctccactcccatggaagaaccctacggctatgtcttccatgaatgcagcctggagagcgactgtcctccccattccatctacctgggacgtccctggagagaatgggcaaagaccgtattcttgcactgtgaactgggggaacacatccatcccgccggctggcaggactggaagaaaccccatggacatttctattacggagaatacgcttcctacggtcccggtgcttctcctgctacccgcgctgacttttcccaccagctgacggatgcggaggctgcgaagtataccgtgaaacatgtaatgaaaggatgggaaccacagaatttgatgtgatccgttgtgaaaggagttccgacatctatgtatcaggaagcattgtcccgccagctggcactggactactgttgcagtcctgctgatgtggcagattcaaaaaatcattttacaatttatgtaccgcaggagggacgccgccgttttcaggaacagacggtttgcaggttaaaaattgctgtcgttcatgggaaattattagttaccggttccgaagaaattgtggcagaatgtcggaaacgttatgctgatgtgacgggagaatggttttttgacatgaagcggcttcgggaattggaggaattgttggctcccttcggtgcccatattgcacaggtacatcctttttttctgccggagtctggtggcatagcttcttctgaccttccttcggctttgctatctgatgcccgggattttgaactgatacgatatgatcaggatgctattctgcaatttcgtggtgatgatcgttttgatcaagcatttgctttcgatccggatgcaccggatgttttgggcatggccgcggtaaaggacggtgagattctcggtatggcaggcgccagcgctgacagtcccctgttctggcagattgggatcaatgtagctccccacgccagagaaatgcatgtgggatcaactttagtaagacttctggctcaggatattttggctcaaggtacaattccttattatggaacaagcatgtcccacattgcttcccagcgggtagcgcaccgcgccggcttcgctgtgacgtgggcagaattgatcacggaagaagtaaggtaaattgagagtttacgaaagcatagctgcgcataggcatagcaaagacagcgatgggcgcttgcgcacaaatcgctgtctttacttatgccgtgatgtggcgaacgccgcgaagagaaataagattggcagcgccttttgctgacaatcttatgaatagcgtggctcattgcggagggctgccgtcggccgctcggggagttctgtttgtattaaaaacgccattttttgctaaaaaaatacaaaaacatgagattttgacatataaaaagctgttattttcgctgagcgtgcaatatgaagaaattccgtacaataattcctaatttaggaacttttttgtacggaattcattgtttttagggtttttacaccaaactggagagctacgaaagcatagccacgctagagaacaagaaagaccgggtgtggatatttgcacaccaactccggtcttatttgttgcgcggggcgtaatcaacaaatttagtcaattaaaccccggt

SEQ ID NO: 11308 - DNA, 3030 bp, Unknown
  gut microbiota DNA sequence
gtcacggtgctaaagccaaacaccttgataaacggcaccatgcaatacgctaacaaggcactcatctgaccgtatttccaggcttcaaaatgaaccggcagaaacgtgccataacggtcagtaccgtattttgataatgcccatgcatccatggctcccatagcttcatcctggttgatcccatccggcactgagccaaaccggatacaccgcagaatgatcgccagcatcaacacggaccagaacagtatttttttcttcttcgcagtcatagtcatcgtaatatttaatccttccggtattcatacttgtgcttatcatccacgctgatctctgcaccgatctgcacttcgatcacctgcagttccgtatccgcaaggatcgtatgcttacagcctgctttcatagtcaggacatcgcccggcttcaccggccgctccacaccgtccaaaattgcccggccttctccggcaatgaccgtccatacttcatcgcggaaatcatgactgtgataattcatcccatgtcccggattcaatgttaccttgatcgtcatgctgtgatccttcacatccagaacgcggaagctcccccaggatttttcggcgaacattacccgctgaacaaattgattcacgtaaggtttgatatagctcgactgctccttatccgataccaggattccctccggactggccgccacgaccatatttttcagtcccatgcacagaatcggtacattcagttcattcaccacatgcacattttcacaggtatcgttcagaaccccctgtccgacacactgactgtccatggcctccgtcagcgtattccaggtacccagatccttccaggtccctgcgaagcgcatcacttctatggcaggctctttttccaccacggcatagtcaaagctgatcttctgcaacgtatcatacttctgaaataagtcttcataatccgtaaaatctatgagttcatgggcgcgtttcagcacatagcctaaccggaaagcaaacacaccgccgttccacagagcaccttttgcaatatattcctctgcggcttctttcgtcggtttctcccggaacatcgttacacggctcagatcgtccgccgtctccggtatgatatagccgtatttttcgctgggatacgtgggttcgatccccatgagcacaagattcgcctcagactctcccgcgcgatcgcacaatgcctgcaacgcctgaaaataagccgtctccacataaggatccaccggacagatcacgatcggttcctcttccgctacccccagcacatccttcagataagctacggacagtacgattgccgggaaagtgtcccgtctgcagggttccacgctgacccctacgtcctgccccagctgactgtaaatagctgacacctgggacttggaagtggcgatcgtcacctgtgcctccgggtctacttcccgtatctgacggcatacccgctgtaccatggattccaggccgccgtctgctgtatgaaatatcttgataaactgtttggatcttatctcattggacaaaggccacagacgctgcccggagccacctgacaaaagtataatattcatagcttgtcctctctgctttttactatctcatcataccacattatttaatatttgcgaatcttcatataggtattgccccaggccttccaatcttccagccatacgacatcctccccctccggcaggatatcataactcggattcacacatccgagtaccagtttcccctggtccacggcagcctgtatctcctcctgtgaagataccagccggatcttctcccggtattctgccggcaacacataataattcacaatcgtggctccacagccgtccgatttgatccagatctcaccataccggtccacaaggcttttgagaatcttcttcgccgtcacaccataataatccatctcgtaccgtccacaggcatcaccacctgccaaaatattcgtataagcgctggaactctgccccgtcagtgcaattcccactccgttacatcctatgagcaccaccagcatagcagttgcaatccttctcgcacggatttccggttgctgcaacaggtatctcactgcataagccatcatcacgatcatcggtccatagataaaatacatatgccgccacccgttgtacagattcggatcgcacagcattgctaccagcaccggaatcccggaggtcagtgcgaacagcggatagatatgatccgcgaaattccattgatgctttctgcctttatagagccagatgccgatactgctccacagcagaacactgagatagaccggaatcgtcagggcgatcagtttcggcagataataccatggcagaggattcgtggaatgcacataccatgttccgtcaaacaataccttaccgtccattctggaatattccgtactgtttgaaaggttccacatcagaaattcccacaaatgaaatccctgtccccagatagcgggagttaatgtcaaataactcaggaaaccgacaactgctgccgtaagtcccacgaaaaaagttttcccggtccactttttttctgtcgtcaggatcagcagataaaagccgccaatcattgcaaaaacatagatcccgctgatcttcagattcccgcagaatccggcacagattcccagcagacatgcatttttgaaatccttacgctccaaaaagcggattccgtaaaataacatcacaatgatcagggacatcaatacggaatctttattgttgtataatccatccgcaaatatcctcggtgtcagaaacagcataagtgttcccagcagtgccgtcctcctgtcccggaacagctcccacaacaaccggtacatataaatcacacccaggaaaaacagcgcatacgtatacgcatgccatacctcactctgcagcctgacagcatccggatgctgatccagcttcattaacagcaatccacacagataatacggagcactgccatgatcctt

SEQ ID NO: 11309 - DNA, 5747 bp, Unknown
  gut microbiota DNA sequence
tcgtagaaaattcacatccggagaccttacatcgagacatgtgtatcgcatgctccgggagttcgtggattttgccaatgtatttcactaactctcaatttacacgttttcaatctgccagtcgatggggtctacgccatgttctttcaggaaattattcgtcttgctgaaaggtctgctgccaaagaatccacggtacgcagataacggactgggatgtggtgcttccagaattaaatgattagggttattcagcatgctttttttcatctgtgccggtctcccccacagaataaatacgattgggcggtcctgtgcattcaaagcccggatggcagcatcggtgaactcttcccagcctttcccatgatgagaattggccatatgcgctctgacggtaagtaccgtattcagcatcagtactccctgttcagcccattttaccagataaccgttattaggaatataacatccaagatcatcatggagttcctggtaaatattgaccagggaagggggaatatcgacatccggtttcacggaaaaacaaagtccgtgcgcctgtcccacgttatgataagggtcctgcccaagaatcactaccttcaccttgcttaacggtgtcagatgaaaagcattgaaaatatcatccgccggtggaaataccactgtcgtattatattcgtccttaacgaattcaaaaagctgtctgtaatatggcttatgaaattctcctcccaacgctgtcagccagtcgtttgtaatcattgccatcgtcaaatcctccctgtcgtccctagagacggacactgattcctctttcacgcagatattccttcacctgtcgaatctcaagttccttatagtggaacaaagatgctgcaagaactgcctccgcttttccttcggtcagggcatcatagaaatgagacagctgtccagcaccaccggaggcaattaccggaatactcacgctctctgccacagctctggtaagtgccaggtcataaccctccttggtgccgtctccgtccatactggtaagcaatatttctcccgcccccatcttctctgcggttctcgcccattccacggcatccatgcccatatccacccggccgccgtttttataaatattccaaccgttgccgtctgctctttttttcgcatcgattgccacaaccacacactgactgccaaatttctctgctgcatcactgatcagtctcggattcatgatagctgcggaattcacagaaatcttgtcagcgccttctctgaggattgctttaaaatcatctaccgtacgaatgccaccgccgaccgtaaaagggataaacaccttacttgccaccttacgaacccattccagctgtgtcgctctgctgtcagccgatgccgtaatatccaaaaatacgacttcatccgcaccggccgcatcatatgccgcagccacttcggacggatcgccggcatcccggaaattcacaaaattaacgccttttactactctgccgtctttgacatccagacagggaattactctctttgtatgcatattattgtcctccctgcgtatgttggtcccgatattctttcgtaatatctacaaaattctgcaaaattttaagaccgatccgagagcttttctccggatggaactgacaggcaaaaatgttatctttttccacagatgcatgaatccgtgttccatattccgtcgtcgccgtaacgatagaggaatcagcggcctccagataaaatgagtgtacaaaatacacatacgaatgttcttcaatgccccggaaaagtctgcccttatttggaaaagtaagatcattccagccaatatgaggaatctttaagccgggtgccgccggaattctgcgaatcgtaccgtccagtaaatgcagcccttctactcccggtgtctcctcactgctttcaaacatcagctgcagtcccagacagattcccaaaaaaggaatttgtctccggaccacttcccggataacatctaccagtccgtaagtatgtaacttttccatagcatcaccaaatgccccgactcccggcaggatcacaccgtccgaggccagaatctcttctctgtctcttgtgattcttacctcttcgcccagatatgccaaagctttctccacgctcttgatattgccggcatcgtagtcgataattgcgatcattgttgtatctccttttcctccggaagaggatccggcagttctgcggcttcctctccatcatttgaaggtgttgcatcctctacgatctgaggcatatcccaggattccagaccaagcttctgcagaaccgtcatcactctctgcgtatattccacattattggagatatctgcaatttcctgtgcttcctcctggctcagcccatatttctgtgacaaaacatttaaaatctcctggaaagctaccgtaacctcatcctgtgcattatactccgtagcataatttagcaatgacgggtaatcatgcactgcctgcagcagagaatccaacgcttccagttctgatccttcatttacaaatacttcatactctctcagccacatgcggatcgtcaaaatactttccgatttactgtacattacctgttccgtctcatcaagttcttttccgaaaaagttctggtaacaggtctgatagtcgcctgcataatatgcttttctgccgctgcgtcttgtcatatactccgtcaaaaagctgcttaaaagcaatatcaccgctcccagtgaaatacatacaacgacaatcggaatcacctttttgagagaaatttttttctcgggtacttcggggatcttctcttttttctttttctctttcttcggtttcttttctttcgcggctttttcttttttaggctttttctctttttttcctttctttttctgatctttacccatttcgtcaagaatctgcttgttttcttccgataattgcagctgattctcttcctcgtcctcttcgtcttcttcggtaaaaagatctaacaatttggagaaaaacccttttttctcttctttctgtgaagcatcatctacaatatccgcaccggctgctttcagaatatccatgacatcggtttcaccgttatcctgttctgtgtgctccgcatcttccgtctgcggaaaagcacccggcaataatgcctccagatcatcatctttcattttctgggtatctgcagtagtctgcggttctccactatccggctcagtcatatcctctgacaatgattcatattccgtttcatccgctgcagaattcttactattcttcgccttttttttcttaaaccgatcaaagaagcccttccgcttgccgcgtttctcctccttttccggctcttctgcgttttccgtattcggtgcaatctgatccaacacattggaaagactttcatcatctacgttttccagcattttgatcaaatcgtcattctcgttcgtatccggttccttctgttgttctgtgctgcctgcctgctccctactctgctgcagcaatctgtctatttcatcttcagacatggaagaggtctcttccggatgaatcgtctcactgttttgtgtattttgcgactgttgtgtctccggaatgtctctttgctgtgcctctaatgctgactgtaacagatcatccatatcgctcatatcaatttgaggatcctgaagtgtctcatctttgaccccttcttcagactctttccgggagttttcttcctcttctgtattccctattccctttaataaattatccaggtaatcttcttgtgaaggcattcgttattcctccgttttctctcatgatcataacatgattagtttaacacagggcaagcagccaggcaatgggattttgctcctcatcaattcgatagagctctgctttttgttgaaacattgcaattctttcaaaaggatttttcataatggatggaaatctggtaccctcaccgatttctaggatcaccagtctatgattccatgtattttgaagccagttatgatattctgcccaattctccaggtatcccttttcgtcatactgctccgcatagatattattaaaaataagttccttgccacaatttggacactttcccaaatccggaatcctgaaatctccttttttcatattctgataccagtcccggagtattttctcttcattgtcagtcacaggcagaagtccttccgggcaaccatccgggcactgtaatttactccattccccacagggatttacatagcgctcctttttaatgagaagttttttccagggaatttcccgtaaggtgcgattggtagacgtagatacaacaaaataactttttttctctaaaatttccgccagattttgaagtccttttgtcatttcatcttccaatttaggtgaaaactgctttctgcaacatgtatccacatagggttccatccaaagggcatgcctttcctgtaatttttctattatttcccgatacccctcctgcatggataaaaaatactgcatatcaaaatactgtccaagtcccaccagaacgtattctgcttcctgtattttttctaagattttttttatattttccttcttatccatatcattttattccttcattttacagaaaaaggctgggatagtcccagcccttttgcctttctgaacattttatctgtctaaatgcttttccgcaacaagttcatccacaatttttaccagattgccgatctctggcttcgaaagctgtgcatctgcccccagtgcttctccctttttcttcatctcatcatttaccagcgaagagaaaatgataatgggaatgtccttggtcgcatcatctgatttcactaatttcgtcagtctgtgtccatccatctccggcatctcaatatctgtaatgatgcaacgaacatgctgatccagagtcccatcttccttgcactgtgtgataacatcatatgcctgctgaccattctctgtatggatcagattcacatagcctgccgctttcagagagtctacgatcagcttattcagcaggggagaatcttccgcgatcagaatgggaacagagcttctggtacgttcccccagttcattcagctctgacattttaagtcctgtctcggggttaatatcggaaacgatcttctcaaaatcaagaataataatcagcttgtcgtttttcttgataataccggtagcaacactttcgtcggctgcagaaatcgtgatatccggtttaatgatatctctccagcttaccctatgaatacccagtacagattccacatgaaatgcaatatccaacttgttgaagttggtaacaatgaaaagtccctttttctccgactctccgcgtcccagacaattcttcagatcaatagctgtgatcatcgtatcccgaggcataaaaataccttcaatactgggatgtgaattaggaaccggtgtcaccggctgataggtaatgatctctttgatcttggcaacattgattccgtaagaattacctgctaaagtaaattccaaaatctctaattcatttgttccattttcaagtaaaatctttgtatccatactaactcctgtaccttcccgttgaattattttgctcctgtggatatatttctatattcttagttaattatatcatatattttaaaaaaaggaatcattatctgaaattattatacaaaaaaaacgata

SEQ ID NO: 11310 - DNA, 13753 bp, Unknown
  gut microbiota DNA sequence
cactcatcacttttcgtagaaaattcacatccggagaccttacatcgagacatgtgtatcgcatgctccgggagttcgtggattttgccaatgtattcaactaactctcaatttaccgttcctctcccatgaaaaacagcgccagtgttccgggaccggaatgggatccaatggtaggtccgacataattgatcaggaagctgtcgattccgaaccgctccttcaccaggtctcttaccagttccgccgccgggagatcatccccgtggctgatgaacacaatatcattctgatcacggtaagaacccattttctcttccatataatccaccaatgcatgcagggattttttccgtcctctcaccttgccgatgacaatcagatgtccttcatcatccacatggagctttggtttaatacctgctaatgttcccacgactgctgtcgccctgctgacacgacccccgcgatagagatgatacagatcatccacggtaaatacatgcaccagatgcagacgattattttttacccactctgccacttcttccaaggacttaccctggtctcttaaggtaactgccttatgcactaacagtccctctcccagagaggcacacaggctgtcaatgacaatgatcctgcaatccggctgttcctccataatctcttccgctgctacgcgcatactgttataggtaccgctcaatccagaagaaaaagcgatacacaggatctctttgttctcctttaaatatttcaggaaatgattctttgcttcctccggattcacctgggaagtggtgggcattttgccgtttctcatcagtgcatagaactctttctcgggaagttcctgtccctgcccataagtcacaccatccataatataactgagatttatacatccaaggtcatgttcttgcagatattctgcggggagatctgctgtactgtctgtaacgattttaaacattgattgcctcctgatattataaattttatggctcttcttttgcgccattatatcattgacaagcaaccttttcaattttgccaacaaaagtgatacattttgtcacatttagtatcctcataactaagttccatccgtccatcgacatactgcatgttctgtggcataaaaagtccccctttgggtacatatcacaacttcatcatgtcccattcgggggattttactcttatgaattattttgtagtacttccgaagccaccgttgcgaatgccttccgcatcatcgtcctctgtgataccgtactgcatgaaaattccctgggcaaatccggttcccgcagggacctccactgtcttgccctcgttagaatcattggtgatcttcatgaaaatatgaccttcattgtccgagaaaaaataatcactgtcaatgatgcccacggtattgttcatctgcaatctgtacttaaagcccaggccgcttctggggtagatctgcagtacccagtcttcctgcatctccgcccggataccggtcgggatcttaatagtctctccgggtgtcagtttaaaagtaaacggggcaaagaaatcatatccggcgcttcctttcgtagctctcttcggaagcttcagagcctcgtacatttccttgatctgttcctccgtatacttcggatattcctcctgcatggcagtcataaactgtgcaggactcacaaaatgaaatttagcaattctatgcatggttaatctttcctttacttataatctccgcagtacagtactgcatcttccggatgttctccggcaagtgtcttcttcacatcgatcaccctctggttcttactgcccttccacagaagctttacatctttttcttccacatggaactctccgtccaccacgacatccacatattgcatgatcggcagatcgtagatgtcctcccagctgtctccggtatacatccagatcgtcttcgtggggtatttttctctgatctcatgcatcagctctctcacatcagcgcggttcacgggatgcatgggatctccgccggaaaatgtgattccggaaatatatggcttctccagctgctcaaaaatctcctgtttcgcagcctcatcaaataaaagccctccgtcgggatcccacgtaatgggattctgacattctctgcagcaatggttacatcctgctacccacagtacgacccgcagaccatcgccgttcagcatatcgtccctggttatattatgatatctcatttatctgtccatcctgtctctacctatctacatactcttacgctctgcgatctccgccatcttggcatcattcagtctcgtatctccgtgtactctggagtaagacagatagccattcatacggtcgatcttggtcagattacggctgccgcagacaggacatacatccatttccagttcctgatgtccgcagtcatcgcaatatgccagcgacagattaacgccttcatagaagcccatgtccatagctctgtggatcagtgtcttgattgcctcggtattataatcaatcggatattttacatactggatcttgccgccgttgctcagatcccagaaacggttctccagatcctgtttctgaataggggtaatatcctctgtcacatggcagtggaagctgttgctgacatattctctgtcggatacgccctcaataataccatactttttacggaactgctttacctgcagaccgcacagattctctgcgggagttccgtagatggcgtacaggttgccgtcctcttccttatattctgaaattttctgattgatatgctcaagtacttccacagcaaaggccccatcctctaccagggacttgccgttgtagagttcctgcagttcattcagcgctgtaataccaaaacttgccgttgcagatttcagtaacggtttgatcttgtctgtcagcttcagatgtccgcccaggaaaccgccctcacaatatgccagcgggttggtggatgcacgcatctcacccagataagcataggtacggatatggagctgacggatcagttccagatagtaatccagcacttcgtagaagtctctgctctcttttctcgcttttgccaggatcatgggcagatgcagggataccgcaccgatattgaatctgcccacgaataccggctgatccttatcgtctgcgggatgcatgccgcctctctcataccagggagacagaaaagctctgcatcccatgggagatacgatctttccatactgtttgtacatgcttgccacatagcctttaccggtcagactcagccagtcgggatacatggtcttggcagagcactccacgccggcttcaaatacatcttccagcggcttaccgggaccgtgtagattctcatcatataaaaatacgatcttcgggaacagaacgggctttttatgatccttttttccctgtccctttctgcggacttccagcatagtaatcgttgccatttgggcaaatttaccggtgccggttccagcagtcacggtaataaaaggataatcgccacggctgcttgccacggtgttaaacttatattcccatccctggaagccctgttcgaattctttcttcacatccgcaagcgcttctctctccgccacatctgcggctactccaagtctctcgtattttgccagggctctattataggatttctcggcgtaaggctctaagatcagatccacgctgggtacggtgaatccgccatactgctggctggcagcgcttaagacgatatcgccgataacatcaaatgccacatccagagtcttcggctcgttataccagatgttgcccatctcaaagccacccgtcaggacattctgcacatcaaacaggcaacagttcatggtatctcttctggcagacatatcatgcacataaatatagccgtcacgacatgcctggatctcttccgtggtcaggaagaatttctgatacagttccttgttcagctgattaaagatcagactacgcttggtagataccagagcggaatccgtgttggcattttccttatctccgatgtacatgatggactgactctttttatagacatcatccagcatccgtacgaaatcctgcttatagttacgataatcgcgatagctttttgcgacgatcggcttcacctgctctaaggcactttccacaatattgtgcataatgggaatgggaacttcatccacttccagttcgtttaccttatctaccacatactggcagatctgctctttttcttctttggtgaatttcgtcagggcgcggtatgcacttttgcctactgcactgattaccttctgtacattaaaaagctccttgctcccgtccttttttacgacatagatctccctgtccggtctaaactgtttgccataatcttcattttcttcatggtcatgttcaaaattgctgctcatttttctcttcccttcatacgataatgtccggaaaacgcccggattctgctgtattccccttacttacgatagcgtttacaaataccatatatggtgtttgcctgtatcagatagcaatatattgtgggtgctatctatcagtataaaaaagaatccctgccttgtcaacgagggatcctttagaaaactatacaaaaaagggggtgaaattttggatacatttttattccgcggttcccgactgttcccgcaaaatatccgaaagccactgtacataacgcttctgtactgcttccggcgctgcgatcctggcatccggtccgattcccgcaagccatccgaagaactgtccgctgacggccaccttcgcacgcacccggaaaatggtatcggacatagggcggatatccacctctctgccgaaccggtccagtaccacaccgatgaggcgcttcgggaactccatggtcaccacgctctcctcccctgcaaacatgccgaaggtctggttcgtataggaggtcacgtcgatctgtgagaactgttttaccccttctctgggacttaccgtcacttccacctgtcccattttgtccacccggtaatgcttgataactttggcctcactgtcataggctgccagataataattttcatcccgccagatcagggcccaggggctgacgcacttatccccaccgagtctgggcaccagttctttttgcaggttccagtccagatacacgaaagtgatctgcctgttctcctgaatggcacgatgaatggcatcgatattataatagatgctctcattctccgtcttgatcctgcctgcaacatagacctgacgctgtagcttgccggcatcgtttttcccagcgatctgctccagcttccggatcagatctctggattttttcgtggtaatgaagcgggaggactgtacggcgtccaccaacagctttaattccgggagttcaaactctctactgccgaggtaataaccgcctcctagcctgctctgcacctgtaccacatcgtaaccgaagtccgcaagactctccatgtcactgtaaatgctcttccgttccgcatggattccctgattctccaggtattttataatatccggagtactcattggatgattctcgtccgtgttctcctgcagcatttttatcagatataaaagctttaatttctgtcctgacgattttgccataacccttattctccgtcagcggactcctttgcctgttgcattccctcttttttatttttcttcttgcgaagagtaattccaagggtaatagcaacagcgcctactgccgcgatcactatcaatactaccagataagataaaaatgaattcaaaaagctgactgccatattttttctcctttatgccttattatgctttcctaatgtcttttcgtgaggttctattaaatgaagtataccaacgatatggcgcaaacgtcaagtattccccaaaagagtctgcaccgaccattttcctgtctgtataaagtcttccgcctgcatcgcagctctctccgtgatctctttatcgtatcccatgagagccagcaaccggatcgcatttctagtgcctgccctcccaggtaacagttcataagggaaactgatgtcgccgtcccggatcacttcctcaaaatgataattgtcataacagtctttcaatagttccgtcatttcgatatcgtgggtcgcagtaaaacaaagcactccgctttcagacaaatgtatcaatatctgcgtagctgcggcaatacgttccacggtattggttccccgcagaacctcatccacgaaactaagcaccggagccgtctctgtctgtgctgcatccaggatccttttaagggacctgatctccacaatatagtagctctcgccgttctgtatactatcccgcagcgccatggaagaaaagatccgaaataccggagcgtgatagctttccgctgtacaggtatgaatcgtctgtgccagaacggcatttactgccaccatttttaaaaatgtggatttcccggaggcattagagccagtaagcagcacacctctgtctgcccggatactgtttttcacaggatgcgtaagcagcggatgccatccgccttccatatgcagatacaccttattcgcattttcttccagctgtggaatacagtaaccctctaaggacctgcggaagcctcccaccgagattgccatatccaaatagccggtgatccctaacaatctgtccacctcattggtctttagtcttaatttccgaagcatgagattaaactgccagatatccagatgcaatatcatccgcagataatccgctataatatctaacggattcccgccgatcttcccctgatttcctgccattacccaaaaggaaccccgttttaattcccacaggcttttcagcgcctcgtttaaatcctccaattcttttttatacaccgggatcttctgtctgcccagttcctcacagacattgatcatgcgaagcacataggcgaagcttgtaatatacggttcgatcacttttttctcacgaaagtatgtcaatatatgtcccagcatacacaccacgatcccaaggatccctaccgccggctgcacgaataaaagtgaggcaaacagcagatacagaagatttaaaagcaatatcttccgattgttacgctctcccagatagtcgagattatccagataatcatagagagagtatttcccgagatgccccaattttttcagtaacagttgtacccggatcctggtatcatcctgctccaaaaaccatccggtcacttcctccaaatggtccagcttttccttcccgcagaagatattccggagggtaaaatacaggtattcctctcctgccgctgacaatgtccggtcgatccggcagaatacctcatccattcccagatcgttccatgtgatatcatctaactgtttctcttccttatgtcgttccagataactgtcaagccttgcaaatctctccagcgaatattccttcggcggttcttttccgtaattttccaaaagagagttccggaacattttttcctcattttttgcctgcataagttcctgtacgatcatgaataaaaatataaaaagcaatacacctgtaaatacaacaaactccatattatctctcacttttccggatataagaaggcaggcaccacccgtgcagtgctcgccccatattctgacctttttttctatttcttatgtatcaaaattctttatgcgacaataaagaactttaacaaaaagatcagtgataatacataggtaagtatagaaacatcctttgccttaccggtaaataccttgatcacagtataggtgatcagcccaaggccgatggcatgtccgatggatccggagatcggcatggcgatcatcatcagcgccacgggaagtgactggcagatgtcatcgaaatctacattcttaagacctgctaccataagtacacccacatagatcagtgcggaagaggtagctgccgcaggaatgattccggcgatgggggcaataaagatacatgccaggaacatgataccggtagtcagtgcagtcaggccggtacgaccgcctgcttctacaccggatgcggactctacaaaggtggtaacagtggaagtaccggttaaggaacctgctactgtacctactgcatcagataaaagtgcctgcttcatattcggcattttgccatttttatccaacattcccgcacggcttgcggttcctaccagagtaccgatggtatcgaacatatcaatgatacagaaggtaatgatcagagtgatggcggtaaaccagccaatctctgcaaatccccggaagtcaaacttaaacagtgtggtggaagccatatctccgaaagcaggtacgaaggatgcggttgccagagaagcaaagggattggttcccaggaagacagcctctcctgcccagtagatgatgctggagatcagcatacccagtaatacagcacccttaacacctctctgtgccagaacaacaatagcaaacagacctacgaacatggtgacaacggacagaaccattgcggaataaccggaacccatatttgtcttagccagtgaaggtgtcagtgcaccgaagaagtctctcatagcataaaaaggtccgccgttctcggaatagatacctgcattggagcctacaccgatgtttaacagcatcagaccgatggcaggtgcaataccgaggcgcacgcccagaggaatggcatccacaatcttctcacgaatgttcagtacggagagaaccaggaacacgataccttcgatcagtacaatgcacagagccgactggaaggatgctacataggtcattccggtcagggctacgatattggttactacgactgcgaaaaaactgttcagtcccattccgggtgccatggcaaacggcttatttgccagaaatgccattacgatggtaccgattgcggatgcaatacaggttgccaggaaaacaccgttccaaagttccggcatggtatccttgccaaaaccagtcagcaggttcggattcagggctataatataagccatggtcatgaatgtagtcagtccggcaatgatctctgtttttaccgtggtgttgttttccttcagtttgaagattttttctaacatcttttccctcctaagtattctgggagccacacggggaactccgtttctatgtcttctgagttctttgcttactcagtcaacagtctttttacgattttttcgcacttggcgtaaatgcgctccggatcctctcctacgttgaactctccgttacggtataggatcttaccgccgatcatggtcatgcagacattagatttgctgccgctgtagaccagattctttggaatattatggatgggctgcatgttaggctgatgcagatcgatcatgataagatctgcgtatttgcccttcgccagaacatctgcccggttcagtcgcattgccttagcaccattcatcgttgccatcttcaatacttccatggcatccatgctggcagcatctttctctaacagcttgctcaagccggtaactaagaacatctcacggaacatatccagacagttgttgctggcaggtccgtcggttccgatcgccaccgggatcttatgacgcacataatcggcaataggtgcaataccactggctaacttcgtattggatccggggttcgtgatcacatacatatgatgtctgcggaagacatccagatcctgattcgtcacatggacacaatggaaaccgcctccgccgtagtcgaacattcccagagagtctaagaacatgggcggtgtcatgccgtagcgtgccttacactcttccacttccttctctgtctcggagatatgggcatataccggtgtccggtaatgatgtgccatttccgacactttccagagcagttctttggaacaggtatattccgcgtggaaaccaagctggtagctgatcagggaattcttcttattccattttaagaactcttcttctacctgcttcggggaagagctgaaattgttcagtcccgataccagtacacagcgcatgcccgtatccaggcaggcttccgcaatggtatccggagtcagatacatatcaaaaatagatgtcacaccagaagtcagatattccaataccgccagtctggtcaggtcatagatatcctctccggtcagttttgcctctaatgggaatacctgcttgttcagccactggtctaagggcatgtcatccgccatggaacgtaagaatgtcatgccggaatgggtgtgcgcatttttaaatcccggcatcagaagatttcccttgcaatccagttcaatatcccaggcaattctcgggaactgggatctgtcccattcctccgctaattctttttgttccgccacataggctatcttgtcatttttaacccatatttcaccatagaagacttctctgccgggctccatggtgagaattcgtgcattgtataatctgatattcatctgatcgcatctcctccaaatccatagggaagtaattcttttaatgtgtagctttgataatcctgttcgttttttaccacatagatcacaaaatcatccgtgcaaaattcctgcatcacctgtctacagataccacagggataggcatattccacgggatcctctcctacggttccaccggcaatggcgatagcggtaaacgtccgctctccttcactgacagccttgaaaaaggcagtgcgctccgcacagttggtggctccgtaggaagcattttcaatattgccacccagatatctgtgtccgtccacagcaagcagtgctgctcccactgtatagccggaataaggagcataagccagctttctggcttctaatgccagtctcaccagttctgtttcttctgtctctgagatcaagttcatccttatctccttttgcctgtctatacaaatctcttcacggattccgttaccagcttcttgaatctgggtgccgccatatccgcagcttcctgcacttcttcatggttcaagggctgatccgtcattccggccgccagattgctgatacaggaaatgccgcagatacgcattcccatgtgattggctgcaatcgcctccactactgtactcatacctaccgcatcacatccaagtgtccggagcatgcggatctctgccggagattcaaaagaaggtcccgtcaactgggtgtaaataccctcctgcagatagatgtcgttctctttcgcggtctcgcggatgatctgctgtaaatccttgtcatagacatggctcatatccggaaaacgcagtcccagctcgtcgatattggcaccgatcaggggattgggtgcaaatacggaaatgtgatctctgatcagcatcagatcaccggcatgaaaagaagtgttcacgccgcctgccgcattggtcaggaacaggatcttggcacctaatagcttcatcagcctggtgggaagtaccacatccgtcacatcataaccttcgtaataatgcactcttcccttcatacataccactgggatctcatcgagataaccaaagataaatttaccggcatgtcccggtacggtggagacggggaatccctcgatcccggcataagggatctccgtctccacacggatctgttccgcataatcacctaagcccgagcctaagacgattgccaccttaggtacgaaatctgtctgttttctcacacattcatagcagttttgtaattttgtatatacctgattcatctatgtcctccgttttactgtattttcatgcaatttagcaaatattcttcctgttttcccgaaaaataaagcaaagtcaacaaaggtattatacaaaatgaatgggaaaaaagcaatggaaactattccgttcagcccatcatctgtcaatcagtcaaattcatgcaagcatgatttgtctgatatgcagatgatgtctgaactattagataataatacaaaccattccaccattactgtcgtttacgatcttctgcatggtatcctgaagctttaactggctctcttcgccaatagaagcaactttcgtggtaatgccgtcatccaccagttgttccaccgtcttaccgaagatgttggtctcccagatgccctgttccgcttccgcctgatcgataaaacggatcagatcctgtgcctgctgttcagtgcctacaatgggagcaatctccgtctcaatattggcgcggatcatatgtatggatgggctgcttgccttgatcctgacaccgaatttattgccgtggcggatcagttccggcttttccagcgcaatgtcttctctgtccggagtcaccacaccatagcccttgatcttcaccatggtcaatgcatcctgcaccttggtatattcttttttcatccctgccagctcttttaatttatgtaacaactggtactcatcttcgacatcttcctccagcattccggacaacatttcgtaataatatctgtcatcgattcctacctgtatctgaacgatcccgctccacagctggattggatccattttacagtttcttacataatccccctgcagctgcaccggctgttccgccacatcccggattttatcataatgattcatcaactcccgaatctgctttaacaggtcctgttttacagcatggtctatgggaagcatatccatccatttgggaaaatagaactctaccgctgtcagcgggaattcatataaaattttctccaagatccggtgtatgtcttctttttttaactgttcgcagttcaccggcattacagaaacatcgtatttgctgccgatctcttccgctacctgtctagtctcctctgaataaggtttctgactgttaaccagcactaagaatggctttccggactttttcagtgccaggatcgtcttctcttccgctccgagataattgcttctggggagttctccgatacttccgtccgtagtgatcaccagaccaattgtggagtgatcccgcatgaccttatccgtgccgatctccgccgcctgggtaaatggaatctcttcttccgaccagggcgtcttcaccatgcgctccgcatcttcttccatatgtcccgccgcaccatcgatcatataccccacacagtcaatcagccgtactgacacctcgatatcatcatttaatctcacctttgccgcctcgctgggaatgaacttcggttccgtagttgtaatagtctttcctccggcactctggggaagttcatcctgtgcccgcattctggcatgttcatcctccatatagggcagcaccatttcatccataaagcgtttgatgaacgtggattttcccgtccgcaccggtcccaatacccctatgtagatctctcctcccgttctttgttgtatatcccgatacagatcgtatgtattcactgcatagtccataaaaaatacctcctgccattggtgttatatgtatatgcaggaggcacgcaattatgaattgacttgagagttacgagccatgcaaagtccaaacagaaacagcgatctgggagcttgctcacaagtcgctgtttttgtttttgactttatatggcgacagccgtcaatgaaataaatgtggagcgccttttgcgacacatttatgaattgggggcatggctcgtaacgtaggggcc

SEQ ID NO: 11311 - DNA, 4822 bp, Unknown
  gut microbiota DNA sequence
tttatacgtttttaccggtagtcataacggatggtaatgtcattgtcacatactcttacttccgcaaggcttcctgtcacaataggcatcatcggtgccagatgtcccagatccgcatccatgatcacaggaacattcttctcaccagctacagagaggatcgcctgatactgatccagtcccatcatctcctgtccaaaacacaagggtctgccgatcaggaagcctttgacataccggaaccacccggcttcttccatctgccacatggctctgcggattgcaaaaacattcagatcacaggcttctaagaaccagatgattccgtcctctttatatttttccagaaaatctcctgttttatcaaaccgggtgcccaataaattcaccagacaatccatgcatccacctaaaagtcttccggaaaattgaattttctgtccggctcctgctgcctgtctgcccaaaaagcttttcaatactctggtttctgtcgtgttgtagggtaatagcggatgttcctcgtttttcagagattccttttcccacttgtcgtaaccgtgtacttccttcgtctctcccttcagcaggccaaatgcatccgttaacgacaaatgccagggttccataccgaatgccgctgcgcaggggccataaacagatgccgtgtcacagatggttgccagcagataggtcatgttagtattgtcggaatatcccagataccacttgggttctgccgccttcaggcgttcaaaatccacatgactcatagtctcacacatcagttcgccgcctccgcaggagatcagacagtcgttttctctactacaataatactcggtcagttcctgaccgcatttttccggcgtattactgataccaatcccctctcccgcatagcagttgggtcccagttgtaattggtaacccatttcacggaactttttctgtgcattaccaaaggcactgtaataaggttctatctgacagccaaaagaaggggccacgaatccgatggtccctccctgctgtatatttttcggatatctcattgcttcgtatcctcctgtatatactatgcataaacgattacttcgtactctgcactcccgaaattgcaatgtccattcgcattccgggatatcgccctcctatgggtaagagttatgcgtcaaagtcaatcttgttataaatatcgaagcagtcaaacgttgcgaaataatctctcggtgtctcagcacggcggatcatttccacactgccatcttcttttaacagaagttccgcagacttcaacttaccattgtagttatatcccatagcaaacccatgtgcgccggtatcgtgaattgcgatatagtcaccgatgtcaatcttcggcagcatccggtcaatggcaaatttgtcgttgttctcacacaaagaaccggtcacgtcatacttatggtcgcagggttcgttctccttgcccagtacggtgatgtgatggtacgcaccatacatggcaggacgcatcaggttcacagcgcaggcatccacaccgatgtattccttgtgtgtgtgcttctcatggatgacctgggttacaagatgtccgtaaggtgccatcatgtagcggccaagctccgtataaattgcaacatcacccataccggcaggtaccagaacctcctcgtataccttgcgcacgccttcgccgatggcccggatatcgttaggctcctgatccggacgatatggaattccgataccaccggacagattgatgaaggtgatatgcgcgccggtctcttctttcagcttcactgccaattcgaacagttctctcgccagtgtgggataatagtcatttgttaccgtattgctggcaaggaaggaatgaataccgaaattctccacaccctttgccttcagtatcttatatccctcgaacatctgctccgtggtaaagccgtacttggcatctcccggattgtccatgatgttattactgatggaaaaatatccgccgggattgtaacggcagcttaaggtcttgggcagataaccgatggtcttctccaggaaatcgatatgggtgatgtcgtccagattaatggtagcaccgatttttgccgcatattcaaattcatgggccggagtatcgttggatgagaacataatgtcctctccctttacacccatagcattgctcagcatcagctctgtcagagaggagcagtcacatccgcagccatattctctcaaaatattgatcaggaacgggttgggagtcgccttcactgcaaaaaactccttgtaccccttattccatgcaaatgcctctttcagtgcttttgcattctcacggattcccttttcatcatagatatgaaacggtgtgggatatttttctacgatcttttcgatcatttctttggtaacaaatgcctttttttccataagtatctcctctaagtctatatttattacaataaagtacttctcatctcttccggagtcagagtacttaagtatgcgggagcaacatcaaatacggtcttgcagcccttctgaccttcctggttcatacgataggctgctcttgcataagcagtcagtacacaggaagtaaattccggattagaatccagctttaagctgtattcgatcacatgatcatgctcaccgtttaagccggtcttgccggtacgcaatacgaatccgccatgaggaatccctgcatgatctctctgcagttcttcctctgtgatgaaatgtaccgtggtatcataatctgcaaaatagttaggcatagtcttgatctgctcttcaatctgtgccttgtctgcgccctcttctgctaccacaaaacactctctggtgtgcttctgtctggtggtcaataccggattttcacaattcctgacagcttccaatgcggcttctacaggaatggtgtactgcttggcgtccttaaccccggggatacggcggatagcgtcggaatgtccctggctgacacccttcccccaaaaagtatagtcactgccgtctcttaaaatggcattggcatacagtctgttcagagagaacataccgggatcccagcctacggagatcatagctaccttgccgccttccttagcagcagtatctacctgtgcaaaatgctcgggaatcttcgcatgggtatcaaagctgtccaccacattaaaatactttgcatactctgcggtctgcttcggcagatcggttgcggaacctccgcacagtaccagtacatcgatctggtcctgcatggacagtaactgatctacattgtatacctttacatctgttaaagtcttcactgtagcaggatctcttctggtgaatactgccaccagctccatgtcatcgttctgctttaccgcacattccattcctcttcctaaattaccataacctaaaattgcaactctgatactcattttctatccctttctttttataaattatttgcatatggaaacaccatttccattcttccacaacagaaaaagtgttgtaagctttattcattccgggcaattctgatcagggcgatctcgttgcgcatggcgtccttgaaaactctgacaaaattcttctgaccgctgtagagacaggcatcatcactcttcccggtcaccgtaccggtaagaatatactcggaatctataataagacgaatttgatctgaccgctgttcctcttcctccggctctctgaaatgctccggtacacggtattgtatgataccgtcacgtaattcttcgtctttggaaaaaagttctttattatcctctgagattaggactacttttttccctgccttcaccagttcccggatttcctctgtccattcttccaaaaaagctcctgttgcggaaaaatagatccgcatttccgctccgagaatcatatgccggattttatcacagatgtgctcatatccttcaatggttatgtacccttccctggggagagactttttcggaccgtcggccaccagtcgctcctttactttcatcagataccggaccctgttatcacaaaattctgggagtgccacagccagatatttggaagatgtcccttccatcacgtaagcagcaccatgctccaccagagatgccagtccgttatacacattggacctggatattccggtcagcttcgccacctcatatcctgttaattcctcatttttcagaagacacaggtatattgcagcttcctgcctgctcagtccaaacagagtaagttgttctatgattgccgcttcttccatgagccctccattagtagttctttacaggaacactatagtaaggaattcttgttttgtcaataggggaaatgattattgagaaaagatgtcagtaacttgaaagttacgagccatgcaaagtcaaaacagaaacagcgatctgggagcttgctcacaagtcgctgtttttgtttttgactttatacggcgacagccgtcaatgaaataaatgtggagcgccttttgcgacacatttatgaattgggggcatggctcgtaacgtaggggccgtaaaatccacgcagaaagggctgcccgccccggacttggatgccagctacaactgtggattttctaaaggaaaatggccaagtgcttctcaccatgacggggccgcctttacgttgccatccatggcactgatcggctaacgcgaacatcgtgttcgcggcccctgcggctcaaccactttccaagaaaatctcacagtctccgccgcatctacgcccgagggagcagtccttttctgctgggttatgaaaaaca

SEQ ID NO: 11312 - DNA, 15180 bp, Unknown
  gut microbiota DNA sequence
gatcattcccgcatagcgggtcagttctccgttgatcccggccaaagtatctgctaccattgtcttttcctgcattctgctgcctccttactgcaaaaacttcataagctgttgtttgttctccatagcgctgcgggcacccttttcaaaaaactgttttaccttcgggtcctccgcttccttggcgtactcctgcattttgcagcgggtcgtgtcaaagccgccgatcagatggcgcagattctgcagatctaattctgaaatatcactcatgctgttaacctccttttgattccttctgttctatgcgaggttagtatgcgcaggatatttttttctatactaaataaaattagcaaaaatagatacggaaataacagtcaaaataccgcagaccacgatggacaggctgctcatggcgccttcgatctcgcccagttccatggctttcgcggttccaagcgcatgagcgctggtgccgatggcaagacctttggcaatgggatcctcgatcttgcacaggtggcagatcgtatctgccaggatattacctaagattccggtgacaatgatgacaactacggtaatggtcacaataccgcccattttttcggaaatccccataccgatagctgtggtaatggacttgggcagaagcgttacatactgctcatgattcagaccgaacatcagacttaaagcaaaaacgctcaccatggcagtcagaacgccggcgatgattccgccgaaaatggccttgggataagtctttaacagctccagctgacgatacagaggcactgccagactgaccgttgccggagtcaggaaaatgctgatatactgcgcgccgtttgcataggtctcataatctatatggaacaataacaatactgccacgatcaggattacggagatcagtaagggattggcaatggcttttccggtcttctgtttgatccacagaccgatctcgtaggtgaccagtgtaatggcaatgccaaaaaagatagactggctcaatatttcattcatttatctgtcctccttatcatctgcggcagcttcggttccgaccgtctgcatggctgcggcacctttgttgttctgcccccggataatatgctgggatacccggcctgtcacgatcatgatcagtaccgtggataccactgtgatcacacagatgggaagcagcatctcttttaaagcattcacacttgccatgattcccacggtagcgggcacgaacataatggacatggcatccacgaggaaatccgccgcggtctccaccttttccagcgggatcagcttcgtgatcagccccaccaacataatcaccagaccatagacgcttgctgcgatgggaagcgggatcaggatctccagaagctctgccagaaaggagattcccaggataatcgaaaattgtttcacatatttcatgatattgtcaccctacctgttaactttggtattttaaaagaagctgcgcactatttttcagcacgcaacttcgtattatactactcgatttttactttcacaatcagcattctctaccatttgagtagactttttgaccttgctttcgtgaatttttcccttacatctggtgtcttaccactgcatattcgtcatctagtcggaagtagggacactcctgctgggttccggataaaaagcggtacatttcatcctcatccagattcaccatgcagcaatagcattcataatcttcgtcatattcataattgacacatgcgtcacaattagtcattttgcctctctccgcatatgctttcatggatgtatcctacattatcctcatatgcttttgtctgttttggttcggtttcattatggtattttcactgtttcatgagttaccgtgcaggtactgatagatttcccgctttccgacacctctgtcttttgccacctgcttcatggcggatttattatccataccctgctcttcgtaataagccatatgttcttcaatgctcatggattcccaggatgcgatctcttcctgtcgtttctcttccgggctttttccttccactaccaggacatattctccgcggggttcctctgtcttgtagtagtccagcgccttttccaaagtggtgggaaatacggtctcgaacttcttggtcagttctctgcacaacgtgatccgccgctcccccagtgccgcatacagttcctccagtgtccggatcagatgatggggtgcttcgtagaggatcatggtacggctctcggtcttcagttcctccagaatcgctttcttttcctttttatccgcaggcagaaatccttcaaagcaaaaccttcttgtactgagtcctgataaggtcagtgctgtaatacaggccgcaggacccggcagggaagtgacgggaacattctgctcctggcacatccgcaccagtacttcgccgggatcggagatcgccggggtaccggcatcagtgatcagcgcaatgttctgtccgtttaacagctgtcctaccagctggtgtgccttctctactttattgtactcatggtagctggtcataggcgtatggatgtcgaaatgattcagcagcttaatactgttacgggtatcctccgccgcgatcacatccaccgtctgcagggtctccaccacccgcggtgtcatatcccccagattgccaatgggcgttgcacacaaatataaagttccgggcatgagctcctgcctcctctccaaatcactttccctttttaatatccatatatatcatatatttccggcatatatactcccggtgactggtacacgatcaacggtttctccacggtcatgcgggatctgccgcctcgcaccgcctcgatgagcaccatattgggctccttgtcgatgtagggatatacaagctgcatccgcttcggctccagcttgtattttaccagcatggtcatgatctccgccagtcgaaaagggcgatgtaccatgtaaaaatgtccgccgggctttaatagttttgctgtcctgctgaccacatcctccagcgtacagagcacttcgtgtctggcgatcgctttcggttcctccgggttcgtcaatccatgctgtccgatcatgtacggaggattgcaggtaatacagtcaaaggaagcagcctgaaatatccggtctgcttccttgatgtctcctgtcacgatgtcaatgcggtcctgcagatcgttcaacgccacactgcgtctcgccatatctgcgctctcctcctggatctccagaccggtgagatgggagcagtggtattttgcttccatcagaagcgggatgatcccggtgcctgtccccagatccagtaaaatatctttctctctggcattggcaaatcctgtcagaagcaccgcatccatgccgaaacaaaatttctccggattctgtatgatctgataaccgttccgctgaaggtcatcaattcgttctttatccttcagttcaaccttcattcgtattctccggttttcttccgttaccgttattaccgttgttgccgtctcttctgccaccgtgtctcggtcttctgcggaaggaattgtctcttggtgcctgtccctggctgccggactgctctgcaccctgagcatcgctgttctctcttacctgctccggacggttctgcggacgattctcacggcgtctgtcgccgcggttattatccctgcggttgtcacggttattgtctctgcggttgtcaccacgattctcgttgttccgattttctccacggttatcattacgattctgattctcaccacggttattatttctgcggttgtcgtctctgcgtccgtcgcgtctgcggttatccccgcgattctcgctgtcggctctctgttctctgcggtcctgacgctccgggcgctgctccgcacgtttttctgcgcgttcttccgcttcttccttctcctcgatctcctctaacttctcaagttccttctgctcttccttagacaattcctgaccgccctttttgccgcggcgtctcttgaactgtaaagtgtctgcctcgtactccttcagttctttctcgtcaccgacttctaccagtaccttaaccaactgacgcagtacgttgacgttctgtacctcgccgtggaggccatctgccgtctggacatagtcacccacaccgggaagcttgcggttcagttcttcgtaagtgtcttcctcatttttcaggcagcacatcagtctgccgcagacaccggagatcttggtgggattcagggacagattctgctccttcgccatcttgatggataccggcacgaaatccgacagatagctgtgacagcacagaggtcgtccacagataccgataccgccgcggatcttggtctcatcgcggacgccgatctggcgcagctcgatacgggtcttgaacacacttgccagatccttgaccagttcacggaagtcgatacgtccgtctgctgtaaaatagaataataccttattgttatcaaacgtatactccgcatcgatcagcttcatttccagaccatgctttaatatcttctctttacagatcttgaaggcttccttctctttttctttgttggcagcctcctgctcgatatctctctctccggcgatccgcatcacaggcttcagcggctggatcaccttgtcatcctctacctcatgtactcctgctacgaccgtaccgaactctatacctctggcggtctccacgatcacgtggtcgcctctctttatctccaactgcagcggatcgaagaaatataccttgcccgctgtacgaaatctcacaccgattacttttgtcatatctatctacctcactgatgcccatggcatcttcaaataatttaaaacaacagctgcctgcgcaaaatgcgcctgcaactgctattttatcatatcttttctaaaatgactactctaatattagcatcttatgatactcacatcttatgatacttaagtttccttaggacaacacagaccgaaatactcttaaagcatttaaggaaaataccttatcgatttccgcggaagaaaaaccctgtcgttccatctctgaggcaagctgctgcattttttctgcgccggacaactcacacagctctccgaaaccatcaaagtcacttcccagtgctattgcgtcgattcctgccaggtttttaatatattgcatgtgctccaccattttttcaatccgcccgatctttccaccatcctcaagaaatcctacgaaatagttgataccgataacaccgccccgctctccgatcattctgatattattatccgagagattccgcagatgtgagcagagtgtacgtgcgttggagtgacttgcgatcacagggccatgcgtaagctcaaaaatgtcccgtatgccggcatcatttaaatgggaaacatctataagaatgccgattctctccatttcctccacaaagcttttcccagtatccgtaagtccattgaccatgtccgggattcggggacttcccggtgcgattgccggattgggataccccagttcatttgcaaagttccatgtcagggtagacattctgacgcctttgtcatatagtgcatacaggttttccagttttccttcatacactccgccctcttccactgtcatcatagctgatagctttcccatcctggcgttctcttccatactctctgctgttgtcacctgtcctatgatatccggatattccgctatctgtgttttccagaaatctgcaagccccaatacatgtgtaaatggtgactcgcctcttttcttcaatgctcccaaatgggtaaaaagggaaaagcactggcaaatatatcccccttctctcatccggttcaaatcgattcttccggaattggaaagaagggaagtctccttcccttccctgaaatccgagtacatattaggtatcgtatcacagtgtagatcaattacccggtacatctaaactgcctccttttattcagatagagcttcctgcgcaaattcagtatatgcttcatccacaaccgtaatgacataatccggctttgggcttcacgccggttatgacacctctttacaatccgaattcttccagtgccgcatagaataacctctcatacccttttggtacttgagcataagaaaacaaccacacaggagcattcttactcttgtatggtcgttatttctttttgtcaccgcttgaagacgtcactcaaaaactgttttttcttataatctctaagtgaaggcttccttcggagagatttttaaatattttatggttctgaatagttactatgttaagatctaagctctacacccagcttgttgttcaggttcttcaagatcttcttcacataaccgtccactgcctctgtggtgaattcttcctccttcggagcaaaggttacggtgaatgccatggacttcttctcgggtcctacctgtaagccttcatagacatcgaagagttctacggactctacgaagctgctggcttctgcgattgccttctctacctcgccgcaggtaacggatttgttcattaccagtgccaggtctctagtctccttcgcgaacttggagatcggtgtgaaggtgggaaccttgccgtatacaggacgcagggctttcagatcgatctctgcgatgtatgcggactcacgcatgtcttcttccttctggatctcgtaggtcagctgacctaagtagccgatctcttcgccgttgtacaggatttttgcggtacgataaggatgcaggaagctctttttgtcttctacatattcgaaatcaatgaacagcgtctctgctacggtgtctaccagacctttcagagtgaagaaattctcttccttaccccagataccgatgcagatagtctctctctcatcgggatactcggtcaaaggcagatccttagggatgaatttattgccgatctcgtatactctgccttccagacaaccgtttttctggttgcgggcgatggcgtggatcatctggggagccagagtggtacgcatcagggacagatcctcgttgatcgggttgatcagacggatcgcatgtctctccggtgcatcctcgggcaggcctaacaggttcagatcggaaggggagaagaaggagtaatgtacgccctcaaatgcgccctgtgcacacagtgctctcttgatcttaagctcggtcttctgcttcgtattcataccgccgctggttactgctgctgctttcaggaaagtcggagtcacgtggtcgtaaccgtacatacggatgacttcctctgcaatatcgggataagattccatatcctcacggtatgcaggtacctggatggtcagctcatcaccgttaatcacgggctggaagttcagagactttaagattctctcgatgtcagcggtaggtacttcgatacccagtacgccgttcaccttcttgatgcttgctttcatctcggtgggttcaatggagttgccggtgtttgcctctacgtgagtagaggatactttaccacagcccagctcctcgatcaggtgcagtgctctcttgctggccataacggtagcatactcatctacgcccttggcatatctctgggaagagtcggaagactgtcccagtgctctggagctcttacggatattgtctctagcaaattttgcagactcgaagataacagcctctgtggtatctcggatctcggaatttaaaccgcccatgatacctgccagtgctacgggctttacgccatcgcagatgacgaggttgttttcgtttaattcgaactctttttcatccaaagtcacaatcttctctttgtcatgggcacgtcttacatgaatggcattgccttcaatgtaagaagagtcaaatgcgtgcataggctgacccagctcttttaagatatagttcgtgatatctaccacgttggaaatagatccgatacctaccagtgccagacgtctcttcatccatgcaggggattccccgatctttacatcagttacataatgtgcgatatatctgggacacagatccggagcatccacagttacggtgaacccgtccctggtaacgccgctctcggtgtaatccagtgccggggtcttcacgggtttgttcaggatcgccgctacttctctggcaataccgaagatgctctcacagtccggtctgttggcggtaatggcaatgtcaaagatccagtcatccaactgtaacagaggctttacatctgcaccgatctcggcatcctccggcagtaccagcagtccgttgtagcctgcaccggggtacagatcctcagtcagtcccagctcggtaccggaacacagcataccgcaggactcatagccgcgcagcttgccttttttgatcttcatggtgccctcgatggtcacatgatcttttgcggtagcgtatacctgcgcaccttccagtgctacggggtatttgccgcctgcatgtacgttgtccgcaccacagcagatctgcaggggctctgcgccgcctacatttaccttacatacatgtaagtgggtctcagggatgggctcacactcttctaccagtccgactaccacgccgctgatgtccttacctacttcgtaggattcctctacctcaaaaccgcaggagaacagcttctcttccagttctttggcttctacatctatatccacatattcttttaaccaactaagtggtactaacatatcttttacctccttcgatgccgttttgtacgacatcctctcgtaatgttccttgcatcgttactgttttaaaatcatattcctgtgatcttagtcatcattgatctgatccagtacacgcatatcagattgatataacagcttgatattgttaataccgtactttaacattgccagacgctcaataccgataccgaatgccagtccgctgtactcctcggagtcaatgccgcagttctccagcaccttcttatttacaatacctgcacccagtacctcgatccaaccggtacccttgcacagccggcagccgcagccaccacaggcgaagcagctgacatcgacctctacggaaggctcagtgaacgggaagtaagaaggacgcagtctcgtggtggtaccttccccgaagatcttctgtaccagtacttccagcatacccttcaggtcacacagagtgatggtcttgtccactacgagaccttccatctgggtaaacatcggagaatgggtcgcatcatcatcggaacggaatactttaccggggcttaagatcttaatgggaggcttctggctctccatcacgtgaacctgacctgcggaggtctgggttctaagcaggaattccggagacaggtagaaggtatcctgcatgtctcttgcggggtgatcctgcggggtattcagtgcggtaaagttataataatcagtctcgatctcggttccttcgtatacgctgaagcccatggatgcgaagatatcgatcaactggttacgcacctgggttacgggatgcagattaccggtcttgcggctctttgccggcatggagatatcgatcttctcactctcgtagcgcaactccatctctttttcttttagcttcgtgttcagctcgtcaaaatgctcgcttgcccagttcttcaggtcgttgaccttcttaccgaagtcagccttctcttccttgggcacggaacccatctgcttcatcagtccgccgataataccgttcttgtcgagaatggtttttttgtactcgtagacacccttggtgttctcgatcttctccagctgttcccggatgtcggctttgatctgttcgactttttcattcaattcgtttaaatctgccatcttactcctcatttctgtgtgaatgcttcacacgtatttttacttgtgcctggggatgtgtattgcatttttatattgtaactattcagagcctcattcgcaaaatcgcatctgcgatgcttactttttgctcattgaggctagctcgccaaagaaatttccaaaattatgctcattcatgcaagcatgattcgcaaatttatgcaaatttcctcggctctgaatagttacaaaaaaaaccgcgcatacaacttcaccccattgggacgaatttatatccgcggtaccacccaaattccttatgtgaaaaatgaaaattatttttacattcacgataagactcttaactcacgtaacgagtgaggaaacgtcataccctaccaaatccatgctctctgctctcgaattcttccggtatgcggctcgcgtgggaatttcgattctgcttgaacctcaggaagcttttcagccggtgggcttccctctctgtcaggaaaatagaaccttactgtgcacgttcattgcctttaccttgatatgataataccgaaatagcggaaatgtcaaggtatttagttctcaaatttccgtataatacttcatttttttcatatcactaactccactttatttagataatcgtttgaaataaataaaagaatacttctcctaaagtctggcagaagaactctttaagagaagtatttccttttaaattacgttttataaaagttcaaggctaaccttctatttcgttaataggtatttttaacaaaaaatgttcctgagagttctcacaggcaatataaatcaaattcttttgcgaatccacaaatccatgcggataaaagaacggttcatcaacctttgtcaatgggatttttttattccatgtccttgttccatcactacttacccacatttccaatggttttcttttgttccagtcgcaaaattcctgacacatggtaggattatgtattaataatatgttatttcctgatttcagcaaggtaatttttgatgctggatttggaatatctgttttttccggtttgctccatgttttcccgtaatcatcactaaaagaacgataaagatatcccgtgaattctgccctcataagcataaccagcttaccgttttcatactccgcaatattattttcccaaagcggtgtctgtgccttcaagtatccttctatgtgaaagcttttgccattgtcttctgttcgcagcacgccgcatcgaaatggccaattttcatcaataccatcatttggtacggaatgaagtttccaatcccatgctccacagcattcctgccaatatatcggaaatacccatgctccattgctaagcacaattccttgtctgacacttccacttataattccattcggaagagactgtggctctgaccaggtttctccgttatctgtgctaaaagaacgatataaaatcagctctctatatcttgacggagcataatacgtcatcaaaaagaggcacactgtattgtcatggcaaaacagttctgttgcccacacggcacgttcactatgttgaaaaattatttccggtgcactccatgtacagccatcatctttgcttcggctgataattaccagattttgattcgacggttctgtcttacctccacttaagcagacacatactaaatcaccgtttggcatgcgcctcaaaagaggttctcttgcatactcaaagtctggttttgctctcaatattaaattagccgtgtaattaaaaaggtctctattatttgtcatatctctctattcctttactgcacctacggtaataccttttgtgaagtacttctgaaaaaacggaaaaacaatgataaccggtaatgcaccgataaatgccattgccatcctgaccgttcctgacggtacattcgctataatggaattaacatctgatgtagctgacatattctgtgaaaggaactgtaggtctgtcattattttatttaaaaaattttgtaaggtgtaataattaacatccgtaacaaacagcaatccattataccagtcattccaatagccaactccaaccagaagtcctatagtagctaaaataggttttgatatcggcagtacaacatttcgaaaaatagatatttctcccgctccatcaatacgtgccgcttccaacagcacttccggaatgttttcattaaaaaatgttcttaccagtaatacattaaaaccattcaccaataaatggggaaagagtaatgcccacattgtatttttaatatggaaaatttgtgtatacatcaaatatgttggtaccattccaccattaaacaacattgtaaaaaaaacaaaaagcatgatcagctttcgtccaaccagttctttacgtgaaatggtatatgccaaaagtacggttaccattatccctaaagcagtccccataaaagtaactaaaattgaatttagaaaggatttcgaaattaccgttccctgtttaatcagaaattcatacgcttctaaactccatttttggggaaaatatgtatatccgtataaattcaaaacatcattatctgtaaaggatgccactgccatcaaaaccacaggagcaatgcacataaatgaaaagattcctagcacgacatatgccacaataatcactatactatttcgttctttttgtttcctcataactccactcctttagaacaaagcatttgaaggactaattttccgaaccagcagattagttaaaaacaccagaataaatccaacaattgattgatatactcctgctgctgatgccattcctacatcacccagctgaatgagagatcgatacacgtaggtatcaattgtatttgttacgctaaacagtgctccggaattctgcggaacctgataaaacaatccgaaatccgaatagaatactttaccaacagcaagcaaaaccatcattataattgtaggttttaaaaatggaagggtaatataccagatttgcttcatctttcccgcaccatctaattctgctgcctcataataatccttgccgattgaaatgacacttgcataataaataattgcaagaaatccaaaattctttaatgtatttacaaataaaagaataaaaggccaatacttcggttgactataccactcaatggtattcattcccagtttggtaagaatttgtgtattgacaaatccaagatcatttcccagaaaagcataaaccagatatcccacaataataattgataaaagatatggaagtaatatgactgtctggaaaaatttaatgtgtatgctgttacgaatttcattcagcagtatagctattgtaagtgcaaccagtgtattcaacactataaatgctaaattataaagaagtgtatttctggtaataatcaatgaagttgaagtgctgaataaatacttaaaattgttaacaccattccatgggcttccccaaataccatctctataattaaattctttaaatgcaaccacaagcccagtcattggtaaatagttatttatcaataaatataaaattcccggtaaggccattaaatataatggcaactgccgttttatttttttcagtttttgctttttcatcaataaatcaccttcctaatttagagacaataagacacggtttattttattaacagatgtcgatactgacgaaatcacaataaaccgtgtcttgcttccatactgcttacttctcagccacccaactgtccaactgtctctgtttctctgcaatcaccttttcaataccagcctcgcgcagagcctgtataaatttaggcaaatattcttccggatctaattcgccattttccaaaccaagtcgatattctgctaatacactatccaaagcagcaatttctgacttaactgaagaggaatcaaacataaaaccaattgcctgcgactgaattgcattctcattgaaagctttcatctcatcataataattatcatttcctactgattcccatgcataagaaatcagctgattaccaaacgaccatccctggttaagcccatatccatcattttcagaggtaacaccttccgggtaagtaattaaagtgttggtacctttcacgcgttcataatgtacaccctcaataccccaatcaataatattaagcacatccggatctgaatacagcaaattcagaaactttaatacagggatctcatcttcacatgtaataggaatacccataacaactccattaatggaatccgttgtagcaacggcctgtgccatacgtgcatccagggtaggaacccctgttgaattctgtacatctacatagctgcccggctttttatctcccatgtaagagaatagtcttcctgacttatataagcctatacccgtatccgggttgatagaaccatcacttaaaatccagcccttattgtaccaatcacgaatataattcagcgtatctttataccattcggtttcataaagatttaccaactgatagtcattttcgccgcaattcatcagaaccccatagtaatcgcccatcttatcaaatgaagcaaatccggattccagtacactttttccattatcctgagaagacgtcataaccatacccggttccttctcagaaacaattgcaaataattccgccagatcatctgtattggaaatattttctgccatttctaccaggtcatatttctccagaatctctttgttcaaagaaattcctcttgcctgtgccatatctttatttaccggcagaccgtatattttgtccccaactgttgatgctttcagataatcccctaaagcattgactaccccaggtgcatattcctgcagtgtatcctgtgcaatcggcagaagcttattctgactaatcgcagaactgaaatcaccaccaaacataatatataaatctaacttttcattaccagaaaccattaggtttatttgctggttataagtaccaaggcttaatggcacgagttctacttctacattaatctttttacgagtctgttcatttaaggcctcttcaatcatgtccatatcttccggaatgaataaattgcagaaaaatgcaaatgttatcttgtccggttctgtgctttgttgctccgatgattctgacaacacttctttggttgaattttcagataccgtttctgtttttccgcaaccttgcagcaacgacgaaaatgccaacaaggcagcacacataatagctacatatttttttcttttttt

SEQ ID NO: 11313 - DNA, 2367 bp, Unknown
  gut microbiota DNA sequence
ctgcatcattatcaccgtctcaacatgctcagtgaacgggaacatatccacgcctacgcccttcgccacacggtaacccttcttcttaaaatacttcagatctctgaccagtgtctcgggattgcaggagacataaacgattcgttcgggaccgatctggactacggagctcatgaattcttcagtgctgccgcttctgggaggatccatcaggacgacatctacttttgcgccctgtccagccatctccacgaggaatttcccggcatcgttctggtagaactggatgtttcggatctggttcgccttggcattgttgcgagcatcccgtacagcatcggcatttaactccacaccaatgaccttgccggccttgtcgctggcgatcatgccgatcgttccggttccgcagtaggcatccaccacagtctctttgccggtgagtccggcatactccaaagctttcccatagagtatctcggtctgtaccggattcacctgatagaaggattggggagaaatgcggaacctctttccgcacagttcatcctcaatgtatcccttgccgtagatcacatgctccttgtcgcccagtaccatgctggtatttcgattgttgacattgatgaccacagtggtgatctccgggtgcagcttcagcagtgccttcacaaaattattcttggagggcaggattggggaagccagtaccagcaccaccatgatctggcccgtgacatgtccggtgcggatcaggacatggcgcagcagtccgtatccggtatcctcattgtagggacggatatggaatgatttcaacagtccacggatagatacgatgatctcatccgccttggcattctcgatcaggcagctgtccacgggaacgatccggtggctcttctgttcataaatgccggagatggcatcgtgataccggttctcgccgaataccgcatgtaccttgtttcggtaatgctccgggtgctccatggggatgacaccctcgaccttgcaaaaaggagccagaagctcctttaattgcttttccttattcttcaactgttccacatagggcttgttgatccagctgcacccgccgcatttatcagccaccgggcagagaccactcttctttttaacagccgtcttttcccggccctgtcctacgggcacccggttttccttgcctgccgtcactttagtttttcccaccgcattggcttttcccgttgctttggtctttcccgtccctttcacaggcccggatgttcttctgtcatttctgttatcgttcttcatcatcacgcctggcttaatcgtccagtctcctcatctcagtgtaggctaataatagcggtcccacacccttggcatcgtcttccacgatgggctctgacatatagtattcgaagctgccgtcacggcggcggttatcctccggtcccagtcctgctacgaggcagataccgccgagacttaaatgtccgtccttctccttcagatagcggtcacagataccctggaatgcctttaagccataggctctgtaagactccggtaaaaatccgagtctcacgccctttaacagggagtacgccatgatcgcacttccactggtctctaagtagttcggctccctgccgcccagtgcaggaagctggtaccacataccgctctcatcctggaattttaacatggaatcgatcagatccacgaataccttcttcagattgtcatactctgccttatactcttctcccggctcacatttgctcagggtatccaaaagtgccatggaataccagcccagtgctctcagccagaaattctgggaaagtccggtctccttgtcacaccagaaggctttcttcgaagcatcataaccgtgataatataatccggtttcagggtctctcatatattttacgacattggcaaactgatggaaaatgtcatcgtagtgcttcttgtcatcgaatttggtctcatactccatgtaaaagggctgtcccatatacatgccgtccagccatacctgattggggtagatcttcttgtgccagaagttgccctcctcggtacgaggctgcgtctccacctgactgtagatcaggtcgatcgccttgcggtatttttccttgccgtttaaagcatacaatgcgaacagggtcttgcccgcattgacattgtcaatattatattcttccacggaatacttcgtaatcgtaccgtcttcctgtactctgtggtcaataaatgcatctgcaaattcgtaatactttttctctccggtagcgctgtaaatctccaaaagtgccaggatcatgcagccatcaatataattccagccggcagctttccctt

SEQ ID NO: 11314 - DNA, 14703 bp, Unknown
  gut microbiota DNA sequence
tcttgatttttcgcacatactagattcttgtttttaacttccgcacatgtattctcaaatgctctgtctaaataattgggatgtttttcataacccagcagaaaaggactgctcccctgggcgtagatgcggcggagactgtgagattttcttggaaagtggctggacctcaggggcaacgcgaacacgatgttcgcgttagccaagccatgcttgcatggcttttggtgcacatggatggcaacgtaaaggcggccccgtcatggtgagaagcacttggccactttcctttagaaaatccacagttgtagctagcatccgagtccggggcgggcagccctttctgcgtggattttagaacaactatttcactaactttcaagttagcaaagccaaaaataccacccggaaaggagtatatcacaaaactctccgggcggtattcaaggaacgatcaatgattgctgcagtgggttatttcgtctcgtcagcggcttcggcttcggtctcgtcagcctcttcctgaccgtatgcaccgatatggaacagctgctgttcaccggaggttgtgacatggacgcccttctcctccagcttcaggtcttttacatacatggtcttggtcgtctggggcagtgttgcaagatcgatctcaatgggctccaacagatgtgcgggatcagccttgtaatgtacttcggacaactctgcttcaaagataccctgtaccttgtcctcattcagatatacaataggaacggtagcagatacgacttcaccggctaccagagcctggaagtccagagccatatatttcttcgtcagaggatcaaaatcaatattcttcaccagaacatctacattttttccgtccagttccagataagcctgcgtgccttctttcgcgtttttaatgaaagcagctgcatccttctctgtgaatttcaaggatacgttttccttcatttctttgccgtacaggacaccggtgataaaaccgtctcttcttaatttctttgccttttcctcaggatttcttttctcagcttttaatgtcaacataacaattgcctcctctatctctacgttggtttggtgtagatgagagcttgtcggaagttcttttcacactatggttattatagcacatatagaacaaagtaaacagtaaaaatgtcacaaaaataaggaaaaaaaagtaaaaattacaagcaaatttcaaaaaatgctcagagaatgtcatcttcaccattgcatcataagaacatactacaacatatacaacacgttacaacaagaaagtaaatggttgcacgaagcagtaaaatagggtatacttttcgcaaatacatttgaatttactgggaggacacaaggatggatatgaatattgtatgcctggatctggaaggagtactggtaccggagatctggattgcatttgcggaggccagtgggatcccggagctgaagagaaccaccagagacgagccggattacgataaattaatgaaatggagaattgggatactgaaggagcatggtctgggactgaaggaaattcaggatacgatcgcgaagatcgacccgatcccgggcgcgaaggaattcttagacgagctgcgctctattacccaggtcatcattatcagcgataccttttcacagtttgccggtcctctgatgaaaaaattaggttatccgaccattttctgtaattctctggaagtagctgagaacggagagatcaccggatttaagatgcgtgtggagaattccaaatatactacggtcaaggcactgcagtccatcggcttccagaccatcgccagcggcgacagccataacgatctgggtatgatccaggccagcaaggcaggcttcctgttcaagagtactgagcagatcaaaaaggatcatccggagctgccggcatatgagacttatgatgaattgatggcagcgatcaagagcgcactataataaaagacatcctttaaaataaaagacatctttcattaagagaaaaggaagcaaaaaaaggaagcgtgggtatcgagcaggatgcctgcgcttttgacgcccacattatactaatttggaatgaggtaatcatgggaatggagcaggaacagacaccccataagcgccgtgtgcggtataagggaaaatatccgaaaaaatacgaggaaaaatataaagaattacagccggaaaaatacggagataccattgcccatgtcattagcaagggcaatacgcccgcaggtatgcatagatccattatggtacaggagatcctggattttctgaagatccagccgggagagaccggatttgacgcgacgctggggtacggtggacatacaaaagctatgctggaacagttacagggccgtggtcatatctatgccacagatgtagatccggaagagtctgccaagacgaggaaacgtctggcggatgctgggtatggagaggatatcctgacgattaaattgcagaatttctgtaccatagatgagattgcaaaagaggccggtggatttgattttatactggcggatctgggagtatcttctatgcagatcgataatccggagagaggattttcttttaaggtggacggacccctagacctgcgactgaatcagacacagggtatcagtgcggctgagcgcttagatacgatcagcagggaagaactggcgggaatgctctatgagaattccgacgagccctactgcgaggagctggcgaaggcgatcaccgatgagatccgcaagggacaccggatcgataccacgacgaaattaagagaagtgatcgggaagaccctggattttctcccggaaaaggagaaaaaagatacgatcaagaagacctgtcagagaacgttccaggctctgcgtattgatgtgaaccgtgaatttgaagtattgtatgagttcatggaaaagctgccgggagcattgaaacccggaggaagagtcgcgattctcacgttccattccggtgaagacaaactggtaaaacgagcactgaaagaaggctgccgggacggaatttatgcagactattccaaagatgtagtgcggccctcggcagaagaatgcgcgcagaacggcagagcccgttccacgaaaatgcgctgggcgatccgggcggaagaataacagactgacagatagaacaaaggaggtgtgggaatgactgtcatggaatatatgaatgcacatagggaagatatggagccctgcgagtgcgtgatcctgccggacggcagtgtagaggaaccgcagccttcccatatcaagaaactggaagagatctccggcgaagataaactgacactgaacagccgtatggagaaaaatatggagcccatatttttcatggtggagtataccggctgtatgctagtatggagcacccgtgtagtggtgccttcccatcccacagcggcacaggaagagacactggagaatctgtattttgcggcgatgcttgctccgggctatcacagagaacaggtaggaccgacctatgaggaatgcgtgaaaaaagcaaaagaactgcactagaaagggaacagcaaaatggcgtttacccatcttcatgtccatacagaatattctctgctggacggatccaataagattaaagaatatgtagccagagtcaaggaactgggcatgaacagcgcagcgatcaccgatcatggtgtgatgtacggtgtgattgatttctaccgcgcagccagagaagcggggatcaagccgatcctgggctgtgaggtgtacgtggctcccaattcccggtttgacaaggaactgaccggcggagaggaccgttatcaccatctggtgctgttagcggagaacaataccggttatgcgaacctgatgaagatcgtcagccgtggattcacggaaggctactattataaaccccgtgtggatatggaagtactgcaggagtttcacgagggtatcattgcgctgtctgcgtgtctggcaggtgaagtgccccgatttattttaaagggcatgaaggaagaggcgagaatggcggcccgcaaatacgaggcatgcttcggtaagggtaactatttcctggaattacaggatcacggcattccggaacagcgaaccgtgaatatggaactggtccagatgagcagggagctggatattcccttggtgaccaccaacgatgtgcactatacctatgcggaggatgcgatccctcatgacattctgctgtgcctgcagacgggcaaaaagctggcggatgaagaccgtatgcgttacgaaggcggtcagtattatgtcaaaagcgaggaagagatgaaggggttgttcccctatgcctgggaggcagtggagaatacccagaggatcgcagaccgatgcaatgtggagattgaattcggcgtgacgaagctgccgaaatacgatgtgccggaggggtacgattcctggagctacttaaataagctctgcgatgatggactggcagaacgctacggcgacggtgatcagcccgccggagagaccggacagacgctcagggagcgcctggattatgaacttggcgttattcagagaatgggatatgtggactacttcctgatcgtgtgggatttcatcaattatgcgaaggagcacgggatccccgtgggaccgggacgaggctccgcggcgggaagtatcgtggcatattgcctgaagatcaccaacatcgatccgattcattacaatctgctgtttgaacgattcctgaatccggaacgtgtctctatgcctgatattgacgtggatttctgctttgaacggagacaggaggtcatcgattatgtgggcagaaaatacggcaatgacaaggtggtacagatcgtcaccttcggtactctggcggcgaaaggtgtcatccgcgatgtgggccgtgtcatggacctgccctatgcgttcgtggattctattgccaaaatggtgccgaacgaactgaacattacactgagcagagcactggagatgaatccggaattccgcaagctctatcaggaggacgaacaggtccaccacctgatcgatatgtgtaagcgactggagggactgcccagacatacctctatgcatgcggccggtgtcgtgatctgtcagaaatccgcagacgaattcgtgccgctgtccagaggctccgatggttccatcgttacccagttcaccatgacgacgctggaagaactgggcctgctgaaaatggactttctgggactgcgtaccctgaccgtgatccatgatgctgtaaaattcatagagaataccaccggcagacacattgatgtggatgccctagattataatgacccgaaagtactggcttccatcggcaccggcagaacggaaggtgtgttccagctggaaagtgccgggatgaagagcttcatgaaggaactgcgtccccagaatctggaggatgtagtggccggtatttctctgtatcgtccaggtcctatggattttatcccgaagtatatccaggggaaaaaccatccggaggatgtgacctatgcctgtcctcagctggagccgatcctgaaacccacctacggctgtatcgtataccaggagcaggtaatgcagatcgtccgtgacctggcgggatatactctgggccgaagcgacctggtgcgccgtgccatgagtaaaaagaagcaggccgtcatggaaaaagagcgggcgaacttcatctacggcaatccggaggagaatgtccccggctgtatcgccaacggcattgatgaacagaccgcaggacagatctacgataccatgatggacttcgccaaatatgcgtttaacaagtcccatgcggcatgttatgcggtggtggcttaccagacggcgtatttaaaataccattatcccgtagaattcatggcggcattgatgacctccgtcatcgataacccgaaaaaagtatcggagtatattttgaactgccggaacatgaatatcgccattctgccgccggatgtaaatgcgggagaagccggattctccgtgacagacggcaagatccgatatgccttgacggccatcaaaggtgtgggacgtccggtcatcgacagcctggtgcaggagcgtaaggagagaggccccttcacaaacctgaaggacttcatcacccgcatgtccgacaaaaaagagatgaataagcgggccattgagaacctgatcaaagcaggagccatggacggactgggcggcaccagaaaacagttcatgagcgtctatgtgcagatcgcggatcacatcgcccatgacaagaaaaacaacctggcaggacagatttccctgtttgatatcgccggcgaagaagataaggaagaatttgatatccggatgccgaatgtaggtgaatacagcaaggaaatgctgcttggctttgaaaaagaggtcctgggtgtctatgtcagcggtcatcctttggaggaataccaggagctgtggcagaactgcatcagcaataccgccggagactttgcgctggatgaagagtccggagaggtggaactggtcaaggatcaggcgaatgcagtcatcggtggactgatcgcggacaaaaacgtaaaatacaccaagaacgacaagatcatggcatttttaaatgtggaggatctgatcggcaacgtggaagtcgtggtatttccccaggtatacgagcgctacaacactttgcttacagaggatgccaaagtgttcatcctgggcagagtgtccctggaagaggacaaggacggcaagctgatctgcgaccagatcatcagcttcgaggatgcacaggcagccagagcggcgaaccagcctctattcccaaaaaattacggaggccggggaggcagccgcggcggatcctatggaaatgggaacggcagtgggcagcagccggtcggtgccatgtcaggcggacagacaggccgaacagtggaacagacacaaccgggtcagcggccgcagaacgccggaaccgggcagaaaaaaggcatgcccgcgggggcctggatccagtttcccaatatggaagcctataaggccagagaacaggaattgttacaggccatcgctgactccgacggcaatgacgatgtggtgatctacctgagggatattaaaaacatcaagatcctgcctgcaaatctcagggtaaaagccgatgagacattaatggaaaagcttgcatcgcagtttggaaaagaaaatgttaaatttataacgaaacctattgaaaaccgctcaaaaatagattaaaataaagaatcgagaagagaaaattattcgttcgtttacttaggaggtaacagtcatggcaaaagagattaagacgatcggcgtactgaccagcggcggtgatgcaccgggaatgaacgctgctatccgtgcagttgttcgtacagccattgcaagaggactgaaggttaagggtattaaaaaaggttatcagggtcttttgaatgaagagatcgtagatatggaagccaaggacgtgtccgatatcatccagcgcggtggtaccatcttaggaaccgcacgttgtctggagttcaaggaagcggaaggacagaagaagggcgctgagatctgtaaaaagcacggtatcgacggtatcgttgtcatcggtggtgacggttcctatcgtggtgcacaggctctgtccagactgggcatcaacaccatcggccttcccggaaccatcgatctggatatcgcatgtactgagtacaccatcggcttcgataccgcagtgaacactgcaatgcaggctattgataaagttaaggatacctcttcctctcacgagagatgcagtatcatcgaggtaatgggcagaaatgccggatacattgctctgtggtgcggtattgccaacggcgccgaggatatactgcttcccgagaagtacgattacaacgaacagaatattatcaataatatcattaccaaccgtaagcatggcaagacccatcacatcatcatcaatgccgagggaatcggacattccgcttccatggcccgccgtatcgaggcagctaccggtattgagacccgtgctacgatcttaggttacatgcagcgtggaggaagccctactgcgaaggatcgttactatgcatctatcatgggtgcttacgcagtagacatcatgctggaaggcaagaccaatcgtgtcgttggttaccagcacggtgaattcatcgatttcgatattgaggatgcactgcagatggagaagggtatcaacgattatcagtttgaggtatctcgtttactttccgtctaatttaacagttcagacatcatgaatagaaaatatgcgtgggtgcttgcacactacgcatatttttctactcatgtctgaacggatacgaagacaaaggcgtttcccattgcgtggaagcgcctttttgactataataaactcatccatagaatgcatcacgtctgcttgcagacaggggatgcattctatgagaggagtaaacagacatgagtatgaaggacgatagtccggaatacgaatggatgttgcgattttgagagtgcgtagcacgaaaaatcgcattattatgtattattatggatatatagcagggagcagacagatatgatcacaagcagcaacaatgcaaaagtaaaacaggtcgtgcagtggcagacgaaggcgaaggaacggcgtaaggatcacatattcctggcggagggcgtcaggatgtgtgaggaagcgccggtaaaaagcgtaagagaggtctatctcacggaagaactggagcagaagctccgccggaacgcacagaacggcgatactgcattctgggataagcttcagcagaccggctatgagaccgtatccccggaggtatttgcaaaaatggcagatacccagactccccaggggatcctcaccgtgttggagcagccttcctatgatctgacacagcttttggaacatccggagcctttatttttgatcctggagaatttacaggatcccgggaacctgggaaccatgatacgtaccggggaaggagcaggaataacgggcgttattatgaaccaacagactgtggatatcttcaatcccaagaccatacgggccaccatgggctccatattccgggtaccgtttgtctatgtgccggagctatccacggtgctgacgcagatgcatgagcgagggatccatacctacgcggcacacctgaagggacagaaatattacgacagcttttccttccgggagcccaccgcattcctcatcggcaatgaaggaaacggactgaccaaagagatctccgaccaggccgggcaatacctcaaaatccccatggagggtaaggtggaatccctgaatgcctcgatcgcagcggctcttttgatgtatgaggcgcacagacagcgaaacctgtaggtatagtagcggttcggggctatatgatatttagatagaaaacagagcaggaggacagatattatgaagattggatttatcggattgggaaatatggcaacggcaatgatcggcggcatgctgcagaagggcattgcaaagccggaggacatcatcggttcctctaagacagaaacaactgcagaaaaagttaaaacaaaatttaatattaacacaacaacagacaatactgccgtggctgagcaggcagatatcctgttcttagccgtaaagcctatctttttcccggaagtgatcgccgagatcaaggatgctgttaaggccgataccctgattgtcagcatcgcagcaggcaggaatctacagtatctgaaggatgcatttggcagaccggagcttaagctgatccgctgcatgcccaatacgccggccctggtactggagggctgtaccggtgtatgcatcggagaaaatgtcacggaggatgagacagagcaggtgctttccctgctccgttccttcggcatcgcaagtgtcgtaccggagcgtctgatggatgtggtcgtgggagtcagcggaagctctcccgcatatgtatttatgtttattgaggccatggcggatgaagctgtggcagccggaatgcccagaaaacaggcctatgaattcgcagcacagtccgtactcggcagtgccaaaatggtgctggagaccggaaaacatcccggggagctgaaagatatggtatgttctcccggaggtactaccatccaggctgtcaaagtactggaagagaagggcatgcgtgccgctgtgatggatgccatggacgcctgcatcgagaagtcaaaatgtatgtagtgacagctcgaccatgaacagagtcgagagcaaaaatcatgttaacatgattttgtgaacgaatatgttcatgagttgagcgccggttcatgagcaaaggtagtcacgcagtgacgaaaagcgtgataacgcgactttgcgaatggcgcaagccgagctgtcatggctaaatagcgcccaaaacccaataacttgacaaaaaatttgtcatctgctatgatattccgcgtaacaaatttaacatttttgtaacaaactggtgaaaatattaagaaatacatcatatactattcactgggagatccgcaggtataccaccccgtccggggaattttcctgtgggaaaggcgtgtatcaagatgacaaaaagcagaagaatgctggttgtatgtgcaggactgctctgttctatcttcctgagcatgcaaatgagcatgaccgcacaggcaagcaatacaaaaaactatgtcaatgatctgaacggtggtgtcgcatcgatcttagaccccggttccaaaaacagtactgaggtcatcaatgcaacggtgcaggaattgaatctgacattcccctctgaggaagagatcagttccgggctggtcatggcaaacgtaagagatgccgtgaatgtacgaagcaatgccagtgaggatgcttccaaggtcggcaagctgtacaaagactgtggaggtacgattttagagcgcagggacggttggaccaagatccagtccggtacgctgatcggctgggccaaagacgaatatctcctgttcggggatgatgcgaaggcactggccaatgatgtgggcagaatgatcgcacagatcaacacggagactcttcgtgtgagaaccgaggcggatcaggaggccggagttctgggacttcttcccaagggcgatatagtggatgtagtagataacagtaatcccgaatgggtctgcattgactacgaaggagcagacggatatgtgtctgcggagtatgtaacagtagatttccagatcgactccggtgagactttagaggagatcaaagcaagagaagccgcagagcgtgaagcaaaacgtcatgtgaactacggcgaatacaccaccgatgcggataccacgcagctgttggcagcattgatccagtgcgaggcaggatgcgagagctacgaaggacagttggcagtaggtgctgttgttatgaaccgtgtacgaagcggcgcttacccgagtagcattcatggtgtgatttatgcgtccggacagttcactccggcattgaacggtaaggtaaataccgtatacgaatccggcaagatcaacgcaagctgtatcaaggcagcggaagaagccatctccggcgtatccaatgtgggagatctgacacacttcagacgtaacaacggccgtgacggaatcgtgatcggtaatcatgtattctattaaaatcacaaaattacaacaaaagaggcggtgccccaaaggggatgccgtctttttgactacaaagacatctacagacagcacaataaccataagtatcgtgcgaaggttgcagttgccatacacatacatttgtagtacactggatacaactacaaaaccaaaggagtgattatatgagcgaaatggtaaccttgtggcttgtggtattgatcgtatcgatcggggtggaggtcgctactctgggactgacgagcatatggttcgccggaggcgcggctgtggcagtgatcgttgccgcatttcatggaccggtctggttacagatcctgttattttttgcagtatctctgctgctgttatttttcaccagacccatcgcagtcagatattttaacagagaccgcgtaaggacgaatgtggaaagcatgatcggcagacaggcgatcgtgaccagtgagatcgacaatctgcagggcatcggccaggtgacggtaggtggacaggaatggagtgccagaacggaagaagacggactgaatttacagcccgggaccgtggtggacattgtggcagtcaacggggtcaagctgatcgttaaagtggatccccagatggcaaaagtgacggaaaacttatcagagccgcagtcgtaagaattgtgtagaaccaatacatgagggaaaagtgcgtacaaggggtacgcagcgtacacaaacgtacgcagaaggaggaaaaatgatagtattaattattattgccgttttagtattatggatcttcgtatcctgtatcaagatcgttccccaggcacaggcctatgtcatcgagcgtctgggtgcttatcaggctacctggaatgtaggatttaacttaaagatcccgttcatcgacagagtagcgagaaaagtcaacttaaaggagcaggtagcggattttccgccccagcccgtaattaccaaagataacgtaaccatgcggatcgataccgtagtcttctatcagatcaccgatcctaagctgttcacctatggcgtagagaaccctatgatggcgatcgagaatctgactgccaccaccctgcgtaacatcatcggtgacctggagctggatcagaccctgacctcccgtgagaccattaataccaagatgcgtgcggcactggatattgccaccgatccctggggtatcaaggtgaaccgtgtagaactgaagaacattatccctcctgcagagatccagaacgccatggagaagcagatgaaggcagagcgtgagagacgtgaagccgtaacccgtgccgaaggtgagaaaaaggctaagatcctggaggcagaaggtgccaaggaatccgccatccttcgcgcagaggcagataagcaggcagccatcctccgtgcagaggcagagaaggagaagatgatccgcgaggcagaaggtgaagccgaagccatcctcaaggtgcagcaggcgaatgccgacggtatcaagatgctgaaggaagcaggtgcagatgccgcagtcctgaagttaaagagcctggaagcattcgagaaagtagcggatggtcaggccaccaccatcctgctccccgcagagctgcagggcattgccagcatagcagagaccttcaaggcagcagccggcaaaaaagcagaataaaagtcataacgaatagaatcagacagatcaaagaggatctcttccggaatgccggtagggatccttttttgctccaaggatcagaaaacgtggcatgaagtgcatgctgcgaggggttgaaaaacgccggataatgaagtatattgattacgtatagctaaaaataatacagaggccgaagcctcggaaaagaggagtattatggatttaaagggacgcgattttttgaaattattggatttcacaccggaagagatcgaatatctgctggacctggcggcagacctgaaagataaaaagaaaaaaggaatccccgtagataccctccgaggcaagaatgtggctctgatcttcgagaagaccagtacccgtaccagatgtgcttttgaagtggcagcgcatgacctgggaatgggtaccacttatctggatcctaccggatcccagatcggtaaaaaagaaagcatcgccgataccgccagagtactggcaggcatgttcgagggtatcgaataccgtggctttggacaggatatcgtagaggaactggcgaaatactccaaggttcccgtatggaacggactgaccaatgaattccatcccactcagatgctggcagatcttctgactatccgtgagcatttcggacacctgaaggggatccgcatgacttatatgggagatgcccgttacaacatgggaaactctctgatggtagcctgtgcgaagatgggtatgcactttaccgcatgcaccacggcaaaatatttcccggcaaaagagctggtggcagagtgtgaagcaatcgcggcacagaccggtggcagcatcaccctgaccgaagatgtgaaggcaggtaccaaggatgtggatgtcatttatacggatgtctgggtatccatgggtgagccggacgaagtatggaccgagcgtatcaaggaattgtccccttatcaggtgaataaagcggtgatggataatgccggtgagcaggcgatctttatgcattgtctccccgcattccatgatctgaagaccaagatcggtgcccagatgggtgagcgtttcggcatcaccgagatggaagtcaccgacgaagtatttgaatccggacagtctctggtatttgaagaggcagaaaatcgtatgcacacaatcaaggcagtgatggcggcaactttatgagtatgaaagcaaagatattggagctcctgcgggaaaaggagacttacgtctccggacaggaactctgtgagcagttcggagtatc

SEQ ID NO: 11315 - DNA, 17534 bp, Unknown
  gut microbiota DNA sequence
atgggtaacgcaaccatggtagataccatgatcaaagatgcactttgggacgctttcaatgattatcatatgattaagaccgcagacaatatctgcgaagagtggggacttacccgtgaagaactcgatgagttcgcattaaagagccagttaaaggcagaagaagctcagaagaacggtgctttcaaggcagagatcgttcccgtggaagttaagaagaaaaaagagaccatcgtattcgataccgatgaaggccctcgtcatggttctaccatcgaaggtctggctaagcttcgtgccatcaatcccggtggattcgttaccgcaggtaacgcttccggcatcaacgacggtgcagcagctatcgttgttatgagtgaggagaaggctaaggagctgggcgttaagcctatggctactttcgtagcaggcgctctggcaggcgttcgtcctgaggttatgggtatcggccctgtggcttctaccaagaaggtaatggctaagaccggtatgaagatcgaagacttcgatatcatcgaggctaacgaagcattcgcagctcagtccgtagcagttggtaaggaactgggtattgatgtagataagcagctgaaccccaacggtggtgctatcgcactgggtcatcccgtaggagcttccggatgccgtatcctggtaactctgctgcatgagatgcaggcaagaggtgccaagaccggtctggctactctgtgcatcggcggtggtatgggatgctccaccatcgttaagatcgaggattaattcaataacaattcgctggggcggtagaatctctatcgccttagtgtggttttgaaaacacaaactgaaatgtgaaatgaggtaaaaaaatggattacattttgtatgagcagaatggtaatgtggcaaccatcaccattaaccgtgagaaagcactgaacgcactgaattctcaggtgctggatgaactgaacgctacattggatgcagtagatctggcaacggttcgctgtttggtgatcaccggtgcaggtaccaagtccttcgtagcaggcgcagatatcggagaaatgagcagcctgaccaaggcagaaggtgaagcattcggcaagaagggtaacgatgtgttccgcaagatcgagaccttccccattcccgtgatcgcagctgtcaacggcttcgctctgggtggtggatgtgagatctccatgagctgtgatatcagaatctgttccgataatgcagtattcggacagcccgaagtaggactgggaatcactcccggcttcggtggaacccagagactggctcgtctggtaggtgcaggcatggcaaagcagatgatctacaccgcacgtaatatcaaggcagcagacgcttacagaatcggtctggtaaatgaggtatacagcgccgaggttgatgctgacggcaatgtagtaaagagcgcacaggaagtaatgctggcagcagcacagaagatggcagcgaccatcgccaagaacgctcccatcgctgtacgcaactgcaagaaggctattaatgatggcctggatgcagatatggatcaggcagtagccatcgaagagaagctgttcggagattgcttcgagacagaagatcagaaatatggcatggctttcttccttgacaagaacaaggaaaaagtaaaagagcctttccagaataaatagttataatagtttttcaaataatgatagaatgtatagaaaacaggaggatttaccatgaaagtaggtattatcggtgcaggtactatgggacagggcattgcaaaggcatttgcccaggtagacggatatgaagtagctctctgcgatatcaagcaggaatgggctgaaggcggcaaagccaagatcgtaaaaggatatgcaagactggtagaaaaaggaaaaatgacccaggaagcagttgacgctatcgtagctaagatcactccgggtctgaaggaagacctgtgtgcagactgcgatctgatcgtagaagctgcattcgagaacatggaagttaagaagaccaccttcggtgagttggacaagatctgcaagcctgagtgtgtatttgcttccaacacttccagcctttccattaccgagatcggcaacggactgacccgtcctctgatcggtatgcacttcttcaatcccgcagaccgtatgaagctggttgaggtaatcgcaggtgtgaatactcccgcagagaccgtggataccatcaagaagatctccgaagagatcggcaagacccctgttcaggtaaacgaggcagcaggctttgttgttaaccgtatcctgatccctatgatcaatgaagcagctttcatcaagatggaaggtgtatccgatatcgcaggtatcgacgcagctatgaagctgggcgctaatcatcccatgggacccctggagctgggtgacttcgtaggactggatatctgccttgccatcatggatgttctgtacaacgagaccggcgacagcaagtatcgtgcatgtcctctgatccgtaagatggtacgtggcggcaaccttggtgtgaagaccggcaagggcttctatgtatacaatgcagaccgcaccaagactcctgtggatgcacagtaaagtataaacaatccgtaggcatcaaagtcggggttcttagaccccgacatcatgataattacaaccaagtataaataacaatggaggattaacatcatggattttacattatccaaagagcatgagatggcgagacagctgttcaaagagttcgccgagaacgaagtaaaacctcttgcacaggaagttgacgagaccgaaactttccccagagagaccgttgagaagatggctaagtacggcttcatgggaattcctgttcccaaggagtatggcggacagggctgtgataccctgacctatgctatgtgcgttgaggagctttccaaggtttgcgcaactacaggcgttatcgtttccgcacatacctctctgtgtatcgatcctatcatgaccttcggtaccgaagagcagaagcagaaatatgttcctgatctggcaagcggccgcaagatcggtgctttcggtctgaccgagcccggtgcaggtaccgatgcccagggtcagcagaccaaggctgtattagatggcgatgagtgggtcatcaatggttccaagtgcttcatcaccaatggtaaagaagcagatgtttatatcgtaatcgcagttaccggcatcgtagagaagagaggcagaaagatgaaggagatctcttcctttatcgttgagaagggaactcccggatttaccttcggtaccaaggaaaagaagatgggtatcaagggttcttccacttacgagctgatcttcaccgactgccgtatccctaaggagaacatgctgggcaagcagggacagggattcaagatcgcaatgcacactttggacggcggacgtatcggtatcgcttcccaggctctgggtattgcagaaggcgctctggagagaaccgttgcttacaccaaggagagaaagcagtttggaaagtctatttccggattccagaatacacagttccagctggctgatatggctaccaaggtggaagctgccaagatgctggtatacaaggctgcacgcaagaaggatgagtacaagaccaatcctaagatctcttactctgtagaagctgctatggctaagctgtatgctgctgaggttgctatggaagttactaccaaggctgtccagctccacggtggttatggttatatcagagagtacgaagtagagcgtatgatgcgtgacgctaagatcaccgagatctacgagggtacttctgaagttcagagaatggttatctctgcagatctgttgaagtaagcgttgttgaatgaataattagaaaagtaaggagaaaatacaatgaagattgttgtttgtattaagcaggtgcccgataccaagggcggtgttaaattcaatcctgacggaactcttgacagaggcgcaatgcttgctatcatgaatcccgatgataaggctggtctggaagctgcactgaagctgaaggacgagttcggcgcagaagttaccgtactgaccatgggtcttcccaaggcagcagatgctcttcgtgaggcgctggctatgggtgctgacaaagcaattctggttaccgacagagtactgggcggtgctgatacctgggctacttccactaccattgcaggtgcattgagaaaccttgactatgatctgatcattaccggtcgtcaggcaatcgatggtgataccgcacaggttggtcctcagatcgctgagcatctgggacttcccgtaatctcttatgcacaggacattaaggttgagggagacaaggtgatcgttcagagacagtatgatgacagatatcatgtagtagaagctaagatgccctgcctgatcactgcattatccgaactgaataagcctcgttacatgactcccggcggaatcttcgatgcatgcaaggcagagatcactacctggggcagagctgatctgaaagatgttgatgacagcaaccttggtctgaagggatctcctaccaagatcgcaaaggcatccgataaggttcgtaagggcgcaggtgagaagatcgttcccgattcacccgaagacggagcagcttacattgttgctaaattcaaagaaaagcacatcatctaatataggaggcaaaccatggtaaccaataatattgaagaatacaagggtgtatatgtgttcgcccagcaggtagacaatgagatcagtggtatcgcattagaactgctcggcaaaggtaaagagctggctgcaaagctggagaccgaggtaaccgcggttctgatcggttataacgtaaaaggactggctgataagctggctgagtatggtgcagataaggtgatcctcgtagatgatcccgaactggagacttacagaaccgagccttatgcacatgcactggcatctgttattgaaaaatataagcctgagatcgttctggtaggtgcaaccgctatcggacgtgatcttggacctaccgtttccgcaagagttcagaccggtctgaccgcagactgtaccgtactggaaatcggtgatttccctctcgttgctatccccggacaggagcagaagcacaatcagctgctgatgacccgtcctgcattcggtggtaacaccatcgctaccatcgcatgtcctgacaacagacctcagatggcaactgttcgtcccggcgttatgcagaagatcgctcctatcgcaggtgcaaaggctgtgattgaagagtacaatcccggatttactccgaacaacaaatatgtaaccatcaaggaagtcgttaaggctgtatccgataccgttgacatcatggatgccaagattctggtatccggtggacgtggagtaggcagcgcagagaacttcaagatcctggaggatctggcagaggttctgggcggtaccgtatcctgttcccgtgcagtagtagataatggctggaagcccaaggatctgcaggttggacagaccggtaagaccgttcgtccccagatctacttcgcaatcggtatctccggtgcgattcagcacgtagcaggtatggaagaatctgatcttattgttgccatcaacaaagatgagactgctcctatcttcgatgtagctgactacggtatcgtaggcgacctgaataaggtagttcccgctctgaccgagcagctgaaggctgcaaaggctgagaaggcagcaaactaattcgtaacaacggattaaaaacatataagaactccgcctgattccccggtccgtccgggagtcgggcggagttcttttctgcaaaaaactgatgcagcttgtgcaagtttctagccttgtatgcttgcactgagggaagcaaaatagtaaaataaaatgataccaaggttaacaagaatgtgagatgatattttatggcaaaacaaaaagaagtaaaaaccaacgccatgcgtatcctggaatctctgaagattccttatacccatcacacctatgagtgcgaggaattcgtggatgggcttcagatagcagacaagctgtccctgccctatgagcaggtctacaagacgttggtcaccgtgggcagcagcaagaattattttgtattcgtcatccccattgcggaggagctggatatgaaaaaagcagcgaaatccgtcggagaaaaaagcgtggagatgatccacgtaaaagacatcaatgccatcaccggctacatccgcggcggctgcacagccatcggcatgaaaaaacagtatgtgaccagaattgatgaaagtgcgaagacacaggaacaaatctatgtcagcggcggcaggatcggctctcagatccaattgaaaccggatgaccttgcgaaagcagcgaaagcggagttcgcagatattatcagacacgaaaattaatgcatcaaatgtagcaaaaggatgctgaagataaaggagtacacatggaaaaccaaaaaaacatccttgattacgataccgtagcactggacgaagcacaggatgcggtgatcatcatagaccagaccctgcttccgggtaagatcgaactgatcgcattacatacggcacaggagatgtgggatgctatctatctgctgaaggtccggggagccccggccatcggtgtagcggcggcattgggcatctacctgctggcgaatcgcatcgagacggaagacttcgaagaattttatcagaaattcacagaatataaggaatatctggattcttccagacccaccgcagttaatctgtcctgggcactgaagcgcatggatgctgtggctgtaaaggctggcagagaagagcacaagactgtcgcaaaagtgaaggaaatcctgcatgacgaagcactgcagattcgggcggaagatgtggaagtatgtcgcaaaatcggagagtttggacttgaactggtaaaaccgggagatggtattctgacccactgtaatgcaggacaacttgcaaccgtaaaatacggtaccgcaactgcaccgatttatctgggacaggagagaggttacaacttccatgtatttgcggatgagaccagaccgctgttgcagggagccaggctgacagcatttgaactgcattccgcaggcgtggatgtgacactgatctgtgacaatatgtccgcttccgtcatgtccaagggttgggtgcaggcagtgttcgtaggctgtgacagagtggcagccaacggagatactgcgaacaagatcggtaccagtgtggtggcagcagtggcaaaacagtacggtgtgccggtatacatctgtgcaccgacttccacgattgatatggcgactgccaccggtgcggatatctgcatcgagcagcgtaaggcggaagaggttactgagatgtggtacaaggagcgcatggctccggagggtgtaaaggtctacaatccggcattcgatgtgacggaccatgaactaatcgccggaattgtcacggaatacggggtggcgagagctccttacacggagagtctgaaggagatcatgaaacgcaaggcacagagaggctgatggtgtagatatgaagcgaaatgtaagtcttgcggagatatccgacggacgattatacaaagcaaatgatatggtgaaagcggattgcggtggttgtaatggctgttcccggtgttgtcacggcatgggcaattccattatcctggatccctatgatgtgtaccggatgactacaggaatggggaaaagcatgcaggagctattagcggcatcggtggagctcaacgtggtggatggtgtgatcttaccgaatctgaaaatgcaggggaccaaggaagcctgcgcttatctggatgaggaaggaagatgtagcatccatccgtaccggcctggaatctgtcggctgtttccgctgggaagatattatgaaaacggaggattttcctattttctccagaccggggaatgtgcgaaggagaaccgcagcaagataaaagtcagtaaatggatcgatactccggatctgacgagaaaccagcaatttaccctacaatggcatgacctgttacatgccatggaagagagactgacaggagaagacgaagggaaacagcaggaggaaaatctgctgctgttgcgtctgttttatttattgccgtacaaagggacaacagatttttattcacagtttatggaaaggatggaatattggaatgaacagatcagataagttaagtaagctccccatcgaaaagcggttaatgagtgtatttcgcataatttctctattattaagtgcaacaggtattattgcctgtgtcgccatgggaatcgtcagttaccagtattcctatgcgttgcgccattacggtttcgcacagggtgacatcggtaaggcgatgatcgttatcgcggagatgcggagcgagacccgtgccgccatcggctatgatgacgatacgctgattgctaaagcaaaaaatgcccatgacatgacggcggaacagctggatacctatatcagtgccctggaagatgatatgatcacggatgagggaagagctacctaccagcagatcaaggatggcgtagcttcttatcagcagatcgaggcacagatactggaactgggaacagcttccgatcctgctaagcggatgcaggcacagcagatggcaggcgaacagatggatcccgtgttccagcaggtctatgcagatatgacgagcctgttggacagcagtgtaacgaacggaaatgccatggaagccaagctgaatgttttccgtgtagttatttttatcgtaatccttctgatcatcggagtaggctttgcaggatctgaaaaggcgggaaaaagaatagccaaaggaatcgccggaccgctgaaagcgctggcagacagactggatggcttcgcagcaggtgatctgacatctgatttccccaaagtggagacagaggacgaaatggcagcgatgaaccgtgcggctacagcaatggcgacaaacctcaggatgatcatcgaggatatcaaccaggcattaaatgctatggcaaacggcgactggacagtgaagttccgttatcctgatctttatgtgggcgatctggatgaactaaaagaagcgctgagagatattaagtataagatgaatgaggcactgtacaatgtcaatgaagtatccggacaagtatccatgggtgccggaagtctggcagatgcggcacagtctctggctgagggggcaaccgaacaggcaggagccgtacaggagcttcaggcgacgattaccaatattacttctatggtagacgataccgcagaacatacgaagaattccagcagacaggcacaggaatattcagctaaggcggatgaaggacgtaccgaaatgaatcacttgatggaaatcatgggtcggatcaatgaaacttccgagaagatcagcaatatcatcggcgagatcgaagatattgcaagccagaccaatctgctgtccctgaatgcttctattgaagcggccagagccggagaagcaggcagaggctttgctgttgtggcagaccagatcggtaagctggcagagcagagtgcccagtccgcagtcaataccagaaatctgatcggcgataccctggaggagatccatgccggcaatgaagctgtggatcatgcatcccagaccttaagcactatcgtggacggtgtccgcaagatcgcacaggattccgaggaactgacccagatcgcagctacccaggcggatgccatgaatcaggcggagagcggtgtgaaccagatctctgagatcgtacagtccaattcggcggcagcagaagagctctctgctaccagtgaggaactgttggctcagtctgagaatatgaccaatcttgtaaaacagttcaaactgatcgatgaggagaagattcaggccagaaaaaaggaggttaagcatgccggtatttgatttcagcagtactccggaaaatgaaaagaagcaggatcctatatgcacctatactacgtttcgctccaatgagggatcagcctctgcggagaaaccgattttgattctggataacagcagtgaaaaatggaaccatcatgccgtaggtgtattcggtaatcagagcaaacggaccaatttcgaatttaaagaggaaggcagcagcgcttatgccgatattttgcagattgatgcccgttttgtcagtctgatccgctggcttggtgagaaccacattaacgtgcgtctctccggagaaaacaggaatgacggctatgcagtatataagatccgagagacagctttcggtgggggcaccaagctgtctgcagaggatggatttttacaattcatgatggagcggctgtttttaagcagtgctcccgcggaagaagaacagggcgaggacgaaggggaagacggcgatgatatgaaacttaccagccttcagagtatctccgatttcatgacctgtgccggaaggaccatgccggaaaatatccgcctgtgggcgagaagaaacctggcagtggcaagatccaacgaggtatctcccgaggagagaaggcatgcacagagagccttgtccattatgatgaacattcagtggaagggcaactattttgaggctattgaccccgtggaagccagacggatcctggatgaggaattgtacggcatggagcgggtcaaacagcgtatcatggagaccatcatccagatcaaccgtacccacactttaccggcctatggcctgcttctggtgggaccggcgggaaccggtaaatcccagattgcttatgcggtggcaaggattttaaagcttccctggactacactggatatgagttccatcaacgatccggagcagctgaccggaagctccaggatctacgccaatgccaaacccggtatcatcatggaagctttttccatggcgggagagtccaatctggtattcatcatcaacgagctggacaaagcggccagcggcaaaggtaacggcaatccggcggatgtactgcttaccttgctggataatctgggatttacggacaactatatggaatgtaccgtgccgaccttcggggtctatccgattgcaacggctaacgataaggagcagatcagtgccccgttaatgtcgcgttttgcagtgatcgatataccggattacacaccggaggagaagaagattattttctccaaatttgccttgccaaaggtactgaaacgcatcggactgcaggcaaacgagtgcactatcaccgaagagggactggatgcggtggtggagatctattccaacaccagcggtatccgtgatcttgagcaggcggcggagcatctggctgccaatgccctgtatcagatcgaagtggacggattaacagaagtcgtatttgacgcggaaaaagtgaagaaattatttctgtaagtaagagaagcaggtagtcgcaggatgcggttgcctgctttttgtgcaaagtcgggggcttttgaccccgacatcattatataaaaacgagtagaggagagggaacatgacaaagaaagtattagtgatcacggatgcacagaacgaattcatcaccggagcactgggcaacaaggagtgcgaggcagcggtaaaaaatatcgttgctgcagccgaaagcggggaatactataaggtgatcatcaccaaggatacccatacggcagattatctggacacccaggaaggaaaaagactgcccattttgcatggacaggaggggacagcagggtatgagatccatccggatattgtaaaggcggtacaggaacattatgcgccggaaaatgtgttcacggtgaaaaagccaacctttggcagtccggaattcgggaaactattaaaaaccatctgggcagaggtgacggcagcaggagaggcagcagagggggaatatcccatggaagtggactttaccggattctgtaccggaatctgtgtgttaagcaatgtagtcatggcaaaggcatttgtaccggaagcaagagtatgtgttatcgagaacgcctgtgcctgtgtgactccgcagacccaccagacggcgattgctgccatgggaccgatccaggtggatgtcatttagagaacatatcatatttacacagctgtgaagctaagagagaaagaggaaaaatcatgatattaccacagatcatcaacagtttactggaaaacgatatgtataagttctccatgggacagtgcatttaccaccagttcagcgcgtataagactacctggacgtttaaatgcaggaatacagatgtattttttacaacggagatggtggaagagatcaaggcgcagatccgggcgtattgtgacttacgttttacggaggaagaattgaattatctggaaaatgtaaaatggatcaaaggttcctatgtggatttcctgcgcctgtggcagcccagatatgaagatttcgagatcggaacggaggcggactgcggtctgactatcgagacgaaaggctcctggttaaacacttccatgtatgagattccgacgctggctatcgtcaatgaagtgtttttccgtatgaattatgattatgacaggctgtatgcttccttccgggagcggttggaggataagattcagaaacttgtagatgggacctattgtctaggtaatttcagtgaatttggtctgcggcgccgcttgtccgcggaagcacaggaactggcggtgcaggagctggtggcacataataaggactatcagacttctgcctgcatcggtacttccaatgtctatctggcaaaaaaatggaatgtgacaccggtgggaaccatggcgcatgaatggatcatgtgtaccgggcagggcaatcacaagcacaatccggcgtattccaactggtatgccctggatgcctgggtgaaggagtatggtgtattaaacggcatcgccctgacagacaccatcaccacagattgtttcctgaaagattttcagctgacctattccaccctgttttccggagtgcggcatgacagcggggatccctttgcctggggcgagaagatgatcgcccattatgagaccctggggatcgatccgaagcgcaagacactattgttcagtgacagcctggatttcgcacgggcggataagctgcggaagactttcaaggatcgcgtgacggtggcgttcgggatcggcacttatattgccaacgatacctgtgaggagcctttaaatatcgtcatgaagaccactgcctgcaacggcatggatgtggcaaagatctcagatacgcccggcaaggaaatgtgcaagaatgaggagtatgtggattaccttaccagatgtatccaatggagactggagcacgacagataggagcagcgaaaacgatggaatatgaacatattgagcacacctttgcaccggtgtatgatgcagattcggaggtgctgatcctgggcaccttgccatctgtgaagtcgcgggagaatcacttctattatggacataaacagaaccgtttctggaaagtaatggcaaatctgtgtggggaaccggtgccggagaccattgaagagaaaaaggcgatgctccttgcacatcatatagccatctgggatgtcattcagagctgcgacattaaaggctccagcgacagcagtatccggaatgtggaaccgacggatatccgacggctactggcagaatcgaagatcacgagaatctatgccaatgggaataaggcgggagaactgtaccggaagtaccagctgccgcttacagggaaggaagccacggtgatgccctctaccagcccggccaatgcggcatggtccctgcaaaaaatatgtgaagcctggcggaataccattgacataactaacaaaatcgcatatgataatataaatgatacatgaagtaccaaaaatatacgggtaaaaggggattataacatagaacaggccgcacgtcttttatggatgtgcggtctgtgttataatagggaaatagaggaaggaaggtgccttatgttcccattaatcaacaaacaagaaacgggtgttaacttacgtagaatcatggacatgcgtggaattgcgccaaaggatgtgcaggaatatcttggacttgggtgtgtgcagagcgtgtaccgttggatcgatggcgtcaatatgccgaccattgataatttgtatgcgctaagcgagctgtttcaagttccgattgatgcgatcgtgcgtggcaacagggcaccgattgtgccggatattattataaagccactggattctcgcgaaagcagactgtctgcttattatgaaaaattgcaggagaagcgtgctgcataaattttttgaactacagcttcaatgacaaatagaatatcctcctttagaatagtcggtagagacaatattctaagggaggattttttatgagcgagaagatgttggtaacacaggctctggatgaaagagatctgttggtaaagaagatagcagataagattgctaaggcaagctttgttgataccattaagccgaatgaggacaaggttttcgcaaagcgcaccagcaaagaagagtatgcaaaagaagcagagtcagcatatcagcagattacagatttgattgaccgttttcagaagattgatgcggcgattgtggcttctaatgcaaatatggaaattactacttcctacggaactttcacagttgccggagcaattgcactccgaagcagacttcgtggggctggtgcttacggaggcaatgcagattttgaaggaagacttcagaaaaagctgtctagtgagtataatgaaagggtgcagttctgcgacagaaagaacagtcagctgcagtctacggcagaggagatgcgtcttagtattctcggaaaagacagcaagaccaaagacgaaaaacctttaggagttgtagaagcttatgtaaaggaaaatacaacagagctggtggatccgcttgatgttaagaagaaaatggaggcgctggaagaaaagcgcaacactcttctgactgaattagacacacagataaaagtatcgaatgcaacgacctttattgaggtagcgtaaggtgtttgcctgcattacgaaaactccaaatccggcttccctgtaacagggttacgttacataacagatattaccaattctgaataaattgggttgcttgactttaaaagtggcgcagttggcagcgcacatgacttgtactcatgatgtcgcaggttcgattcctgcctttagaaaaaagttgggttcaaagacggtgtagaatgcacctccaatttaactgttttgcgttttatttgaaccgttaaaggtgaatcgtcaacgattttattcttgaatggttttaggtgaagtgaaaacttttatgtagacatagaaatgtgttgaaatccatgagaaaggttagagcgttaagccggttggctggaggtaatcctcgtggctgtaatgtaggcatatattaaaagtgatgaagccgtggcgagagctgcggcttaaattttatggaaccgcataaaagacacatattacggagaaacagacgatggaagagaatagaatcactcgttctggctgtgatataataacataaaacattgtataataacagaaaatatgttattatacaaaaaaatatgttataaggagacgccatatgaaaaaagaattagagcagtatttcggctgcgaagtaaaaatagcagaatacaagaataaattgccattgccaatctttatgactatgcgtgatattatgatagttgaaatatatggtgttaactttgccataatagatgttatgaaggaaacggaactaagtgttgctgcaatgaaaaagcagaaagcaaagtatgaggaagcattgcagtgccctgtagcatatgaagtagcgttaaacaacgtatccatgagaaatgctctggtaaaaagcggagttccgtttgtggatctgccgggaaatgtattcttaccatttatgggaattgtattgcaggatgtgtatcgcaagcagcttgtcaaagcggataagatgatgccggcaacacagatggtgttccttgaattgttatatatgagtgatgaggaatctgtgttaaaaagtgaagttgcgaacaagctgaatcttaccaagacgtccattacaagagcaacagcgcaattagaggaaatgggactcatccagcagatgaaatcaggaacagagattgctattaagagaaattactcacggaaagagtattatgaaaaggcaaaaggatatttgattaatccggtccagaaagtgattacaattatgcgatatgaagcaacctttgaatcatttagcgcaggagaaactgcacttagtcaggagtcagaattgaatccaccaagaatagaggaacgtgcaatctacaagggcgaggaagttgttgaccagttggaaattgtggatgccagatctgaagacccagacgactgcttgaagatacaattatggaaatacaatccttcttattttgcaagagaaaggcgtgttgatcctgtttcactggcatgtacattcaaaggtaacgaagacgaaagaatagaaatgagtattgaggaactgttggaggaattataaatggtaccagggatagactcttttagagaaaaatttaaagattatacggattattacactattatcggcggaactgcctgcgatattctactctcagaggcagacttgccatttcgagcgacaaaagatattgatatgatcctgattatggaggataacttcccggaatttgcgagcgtattctgggaatacataaaagaaggcggctataagtgcggatggaagaatgaacagaatatgcacttttaccgcttcacagaaggaaaattcggttatcctactatgattgagttgttttcaagaaagccgggatatcatcttgaaatagaagagggaatcattccgattcatattgatgatgatacttctagtttatcagcgattcttctgaacgatgacttctataaatttatgatgtccggacgcagagtggttgatggtattggtgttctgagagcagagcatctgattccgttcaaaatgtatgcgtggattaaccttttggacagaaaaagagccggcgcgcatgttaatgaaaaggatttaaagaaacataagtacgatgtattccgattgttgcagattgttacagcgggaacaaaagttgaatcagaagggctggtgacagagagtatacatagatatgtcgaggaaatcagtgcagtagatgaatcggaggtacgacttttgcagatgggaatgccttttgatagagatagtggtgtggagttgttgaaggagatttatttgtaagataaactaatataagttgtgtttcaattttaggagagggagttatgctagtac

SEQ ID NO: 11316 - DNA, 2486 bp, Unknown
  gut microbiota DNA sequence
tggatattcgacagggcagagaaaatcttaagagatggtaaggcagatcgggctgtatgcctaatggatatgccggatgactggaatatggaatttcagatagaacgatataaagaaacatttgatcgagcaatcgcatttgctgaggactatccggatactctctggtgttacggtaatcatgatgtcagctactcgtggggaagacttgagaccggatattctccctatgccgagaggacggtaatgtcaaagcttgaagaacttgagaaccgccttaagagtccaacacagatcgacataatgcatcggattgacaatgtgcttttctcacatggagggcttacggctgattttctgaaatggttagacgaggatttgctggatgccgagatagatgatgtcattgcagcggtgaacgatgcttcccatgattttctctggaatgacgaatcacccttatggttcagaccacagtatgagaccagagagatattcaggccagatacctacaaacaagtggtagggcacactccggtggagaagatatttgaaaaagaaagcatcatatcgacagatgtgttctctacctatagagacggaagacagattggagaatctgcgatgattgttattgattcggaaaccggaaaatacgagaagatagaggttatggggaagctgggagtgtgataacgatgaatgaacatacacagcaatattcagattttattaattcattacaatccaggatacaggcattggaggatgaaaaccgatttttgaaagagcgtttggatgaagccggtgtttcgtatgcggatattgtgtctggcgacgctgaaggagctgtggaagtgtatgacccggatcagagtgctcgtataaagaaatttgatgttacggataagattgcaagtgatgcaaaggcggagatgaagagagttgttgcaatttaaatgtagtaaatgaggcaaaggcgtaggggtacgttttggtatttgtacccctaatttctcaaaaatacgagattttatgagaaaatatgagaaaatacatgattttgaaaaagttccacaaagcctgtaaaatcaagacttgagactatgtgagaggatataagatattatgattaaagtacttttcatctgtcacagcagtttagttttactataatgtagggtttggcaaagtggggcagagtacggcataatatgtcgggaaaacgcataaatactacggtttagactactaaggcgcaggatttgacgtttacgaaacgctcctattactggggcgttttttcgatggaaaaatgataatggtgacgatataataaatgggaaagaactggaattttgagatggaagatgtgttaaaatttttaatataaaaacggagagcgtatatggtaaaaggatttattatatataaaaatgggaagattccttttgtaatagataaatacagaatggaattatttactgatgataaaatattgaatgactttatgcaggaacataataaaaagagaaattatattctttcaggagtatattttagccttgggacggaacccagaaaaataaccatcctagttgagcattcattgggaagtacttgctatctgtcttgttacattgtggaaaatcttcatgtgaaagagggatataacgaaattggtattcagtcgtcatatttagatgacgtttttcggtataaatataactatatcgatttatcaagaactgggataaattttgctgtagatattaaagaggtatattcaattccgtttgaaatgggagacaatacttataatctaaagtactgtataggacacaacggaaacttgggtttattagaggattttgaacgtaatggagatgtgaggataaggcttaaagaagggacaatcttagagtgtgctgaaattgtacgcactttgcataggttttccatgtttatgaattcacaagcagatgtttcttttaaaagaattgctctgtataatgatggtatgctggcagggtggttttgttctgataatatatgtgaagataacatttctgtaaaagatgtaatgttttttgaacttgatgttatgaagtttgtacctaagattttgaataatattgctcaggattgtggaagtaaaataactagaagtgttccgttaggtcatttatcaaatacaaaaacagaatattcaccgcaacggttcattgagcaggttatggcttttgaatatttatttgaaaaaatagaaccaaagaaagcaaaaagtaaaagttggacgttaaaaaaggaattagtatttatgtttgatctatttcctgaaatattagagaagtcaactcttaatactcaaatggtgagtgaagagataaagaaaacaaggattgatattgtacacggatatgcatattattatgattttgcttcagataataaattacaatatattattattcagtttgataggc

SEQ ID NO: 11317 - DNA, 5068 bp, Unknown
  gut microbiota DNA sequence
atcctgaatgtagtgcttctgctcatcggttttgtcacctgcgggaaagaattcggggtaaagacggtgtataccagtgtgatgctgccggtattcttagggcttttcgagatgctgtttccaaatttcggttccatgacggacagtcaggaactggatgtactgtgctatattctggtggtcagcgtgggactcagcattttgttcaaccggaatgcatcttccggaggactggatattgtagcaaagatcatgaacaaatatctccacatggagctgggcagggcaatgtctctgtccggtatgtgcgtggcactgtccgcagcattggtatatgataagaaaacggtggtgctgagtattctgggtacctatttcaacggaatcattctggatcattttatttttgacaataatatcaagcgacgtgtctgcattattacgaagaaagaggaagaactgcgccagtttattacaagagatctgcacagcggtgccacgatctatgaagccatcggtgcctatcattttgaaaaacacaacgagatcatcaccattgtggacaaaagtgagtaccagaaattaatgaaattcatcaatgaactggaccccaaggcgtttattaccgtatataatgtatcgagtatgaagtatcagccgaagagtgggaccttttgaccctggcatcttaataatattatggagaatgtgaaatgaaaaaggtacggaatatcgcagtgatcgttttatctgtcatatgcgtcggaattctggtttttttgttgtggaatttaagaagtacagaggagtctgcacaggaaataataccggaagtccagccggagcctatgtcggaacagagtgtatcggattctgatgtgagcggcaacggtgcggagaacagtggagatcctacggaattgccggagacggaagaaagtgaaccggcggaaccggtggatcttgtagagcagaaggcagaagaactcctggcaggaatgaccttagaggaaaaagtcggacaaatgttcatcgcccgttgtccggagacggatgcagcatccaaggtgacacagtatcatctcggcggatatatcttatttgcacgggattttaccggtaaaacaaaagaggaagtaacgtcatccattcaaagctatcagaatgctgcaaaaatacctctgctgatcggagtggatgaggaaggcggcacggtaaaccgtgtcagcaaaaatacgaatctgcggaagaccccctttgcatcaccgcaggaattgtataccgcaggcggatgggatatgatccgaagtgatacgcaggaaaaatgtcaattactgcagagcctgggaattaatctgaattttgctccggtatgcgatgtatcacaggatccgcaggattttatttatgcccgcagttttggacaggatgcggaacagacgacggagtatgtgaggaccgtcgtgcagaccatgtcgcaggaacagatgggaagtgtattaaagcatttcccgggatatggcaataactcggacacgcacacagggatcgcttatgatgaacgtcccatagagaggtttgtaaattctgattttctgccgtttcaggcaggcatcgatgcaggggcggatatggtgctggtagcccacaatgttgtctcctgcatggatgatcaggtaccggcatctatttctctaccggtacataatattttgcgtaatgaattagggtttgacggcgtgatcattaccgatgatctggtcatggaaggagtacggcagttcgccggggatgcggagattgccgtgcgggcggtacaggcgggaaatgatatgctgtgctgcaccgattttgaagtacaggtacccgcagtcatcaaggcggtcgaaaccggtgagattaccgaggaacgcctcaacgaatcggttctgcgtattttgaaaatgaaaataaagctgggcatcattgcggatactgcggatgctcaggattagagaagattccgtagtacttcctcgggtcggggagtgtgctgcggatatttttctctcaacggaccggcagctccgtccataatataaggatgtcccacgatatccagcatggatacatcgttataattgtcaccgaaggccatgacatccgcgaggtcaaagccaagaattttacaaatggattgcacaccgatgcctttgttggcaagggtagtatcgatccagtaaggtccggccactgcacagttcgcctgctcccagcgggggacaaaacggtcagcgtaagccgctacgccttcatggagatatacggagacctttacgatgtcctccggaatttcggagggatcctgaatgacctgatagttgttgccaataaactttattctgtccagcattcccagcccacgttccatcagataagccgtattctgtccggagagcatgacttcgccctgcccgtcactccggctccacagatcctccgcaatctcttctgccagggcacggggcatgggatttttcgcaatacactgctcgtccttatagatcacgccaccgttttcacataagaaaatacagcaatccgccaccggagcgaacatcttccgcaggctggtatactgtcttccagacgccgggcagaacaggatcccccggtcatgaagtgcccggatctggtcaaagatctcgccttccaattctttttttccatattgtaaaagtgtaccatcgaggtcactgcagattaatctaattcccatagtcggaattcctttctctcagaatgataattttaaatagtatatcataaattatacatgaatacttatttttatttaatagctacttttcctgattattacaagatatattgaaaaaaatgcggaaacatgctattatttatgtataaaaaatgcggaaacaaggaaaatattaaaatagaaaaatgcggaaaggagaaagaaaatgtttaagcgaaaaatatatagtaaaatgttaaactggaaacaagagtcggatggaaaaacagcattgctaatagaaggtgctcgtcgtataggaaaatcaacggttgtagaagagtttgcaaaaaaagaatatgaatcttatattctaattgatttcgcaaaagcatcatcggatgtcaaagctctttttgatgatatatctgatttgaattatttatttctgcagcttcaattacagtatagagtggatctccatgaaagaaaatccgttattatatttgatgaagtgcaattatgtcctaaagcacggcaggcaataaaagcattagtagaagatcatagatatgattatattgagacaggctctttgatatctatcaagaaaaatgtcaaagatattttgatacccagcgaggaaagaagacttaatatgtatcctatggattatgaggaatttctttgggcagtgggggatcagactactttttcgctcttggcaaaatgttatgaagcaaagactggattgggtgataatggaaatcgtaagcaattaagacagtttcggttgtatatgctcgtaggaggaatgccgcaggcagttcagacttatatagaaactaataattttagaaaagtggatgaaataaaaagagatatactaaatttgtatgagtcagattttgccaaaattgatgcaaccggaagactggcaatgctttttgatgcaattccggcagaactaaataaaaatgcagcaaggtatcaggttaattctgtcctgggaggagagaagattgagaaagtacttgagttgattgctgaattaaaagattctaagacagtattggtgtcgtacaatgttaatgatccaaatgccggaatgtcgaatactaaggacttatccagatttaaactgtttttgtgtgataccggattatttgtaacattaatgtttaaagacagagattttacagaaaatgaaatatatgaaaaactgcttagtgataagcttagtgtcaacctgggatatttatatgaaaatgcggtagcttgttgccttgccgtaaatgggaatgaacttttttatcatactataatgaatgaaacatcaaagcataattatgaaattgattttttgttagcaaaaaagaataagatcattcccatagaagtaaaatcttccggttataagactcacaaatcactcgatatatttacggaaaaattttccgacagaattttgtgcagatatttggtttatacaaaggatattagcaaggagcaggatattttctgcatacctgtttatatggttccgtttttataattcgttccccattcctgcatggcatccaggatcggacgcatggtttccccgaggtcgctcagcgcgtattccacgcggggcggcacttccgggtagacggtccgcgtgatcagtccgtcctcttccatggagcggagggagtcggtcagaaccttctggctgatgccctccagacttttcttcaattcattgaatctccaggggcgcatcattaaatttctcaatatcaataatttccatttacttccgatcaattgtaccgtggttgccaccgggcattccggcaattcgtccttcgtcaacataggatcacctctcaaaagtgtaaaatgtgatgtaagtatcaatttccgcgcggacaataccttcgtccaggatgcgggatgggatgctgccgcgaagcgttatgagaagttcatggaagatcatagaggacaaaacgtcgtatttctggagctgggtgtcggttacaacacaccaggtatcatcaaatataatttctggcagtatgcgcacaactggcggaatgcattttacgtctgcatcaacaagggtgatgcctatgttcccaaggagatcgaaaacaaggcggtgggaatcaatgcggatcttgcggaagtgctttatttatgcaattcctgaaataaaaagattgctaatgatatcccaaacgagtaagataataagcaagatggagtgacaaaatgttggagtttgtttcttctatatctgaatatgataaagatagaaaatgtatttaccggctatagggggag

SEQ ID NO: 11318 - DNA, 4452 bp, Unknown
  gut microbiota DNA sequence
atgccgaggaaaaacaatatcctctggcctacctgcgcagtgatgacaacgagaagattctggtcatcatcaatccggcggacagagaggtcagcttcgacggagactatgcggtaaaggaagctttatataccttcggcggtgaagctgtatttgcaggcggaaaggttactgtgcccgggggcagcgccggattttatctgttgtagttggtagaatgtattttaaaagaagtggatgatcagtctggcgtagcggaggagctttcgaaaaaatgattgcggcatctctaaaaaaatatgctataatgagcgtaatgctagagtataaatgaaaagagaaccgtatgaatcaggtaaattatcagaaagaattagagaaaattttaaataccttacaggagaagggcgaggcagcgtcggattaccgaccgccccgcctgtttctgcatagctgctgtgcaccatgcagcagctattgtctggaatatctgtgccgttattttttgatcacggtattttattacaatcccaacatttccttttcggaagaataccgaaagcgcgtggcggagcagaagcgtctgatcgacgcttataataaagaagaaaagggatggcccatcgacatcgtggagggagattatgaaccggagcgtttttatgagatggcgaagggctacgagaactgtcccgaagggggagagaggtgttttcgctgcttcgacctgcggctgcgcaggactgcggagctggcggcagatggcggttatgactattttgccacgaccctgaccatcagccctctgaaaaatgcggcgaagatcaatgagatcgggcaggcactgtccggggaatatggtatcccctggctgccctcggatttcaagaaaaagaacgggtataagagatccatcgaactgtccgcagagtatgagctgtaccggcagaattactgcggctgtgccttttccaaggcggagcgggaagcacagattgcaaatgcgtaattgcgtcttgcgggatgaggaattttaggatatagtagaaatattgaaaacagcgcagaagcgtgagagatagaaattgtgactgcacaagatattccggtacattacaggaagtaacggaataccggcagattactgaaaggtatgaggattgactgacatgaagaaatttttagaaatgctgacagaggaaatgcagcaggcatttaccgcagcaggctatgacggaagcttaggaaaagtaatgctttccaaccgtcctgacctgtgcgaatatcagtgtaacggcgccatggcgggagccaagctgtataaaaaagcccccatcatgatcgcaaacgacgtggcagagcagttaaaagacagcaaggtattttccgaagtggtggcagtagcccccggattcctgaacctgaaggtcagtgaggcatttttgctcacctatttacagggcatggaggcaaatgaaaaattcggtctggagaagcccgaacatcccaagaagatcattatcgactacggcggccccaacgtggcaaaacctctgcatgtgggacatttacgttccgcagtgatcggtgagagcgtaaaacgcatcagccgctatgtgggacatgaggttatcggtgatgtgcatctgggtgactggggattacagatgggtctggtcatcaccggtttacaggagagacagccggaactggtatattttgatgagaactacgccggggaatatcccgaggaagctccgtttaccatcagtgaactggaggaaatctatcccgcagccagcgccaagtccaaggaagatcccgagtacaaggcaaaggccatggaagcaaccttcaaattacagagcggtgtcagaggatatcgtgctctgtggaagcacattatcaatgtgtctgtgaacgacctgaagaagaattattccaaattaaacgtagaattcgatctgtggaagggagagagcgatgtccatgacatcatcccggagatggtcgcttatatgaaggacaacggctatgcacacttaagtgagggtgcgttggtagtggatgtcaaggaagataccgacaccaaggagatccctccctgcatgatcttaaagtccgacggggcctctctgtacaataccacagacctggctactattatggagcgtatgaagctgtatcatcccgacgagctgatctacgtggtggacaagcgtcaggaattgtacttcgagcaggtattccgctgtgcccgcaagacgaaattggtagaacccgagaccgagctgaagttcttgggcttcggtaccatgaacggcaaggatggcaaacccttcaagaccagacagggcggtgttatgcgtctcgagaacctgatcaaggatacccaggatgagatgtacaaaaagatcaaggaaggccgcgatatggaagatgccgaggcgagaaaggtagcggacgtggtagctatctccgcgttaaaatacggtgatctgtccaatcaggcatccaaggattatgtttttgatatcgaccgtttcacctccttcgagggagataccggcccctacatcctgtataccattgtgcgaatcaagtctattttgaataaatacaaggagcagggcggagacctgaccgctgtaaaattacagcagcccggtaatgcgtccgagaaagagcttgccatggaactggcacagttcaataccatgatcgctaccgctggagaagaactggcaccccataaggtatgtgcctatatttacgatcttgccaatgcgttcaaccacttctaccatgagaccaagatcttaggtgaagagaatgaggagcgtaagcagggactggtagcacttttagtgctgaccagagatatcctggagacctgtattgatatgctgggattcgaagctccggagaaaatgtaataaaaataatatctatttagtaaacccgctgaaaaacggggacacaaagccagatgggtctaaggtctgaacatagagaaaaatcagactatgacagccggttgcagcagattcctgagtgtaggggagtatgtttatcgtgagccgtctgtcagtgcacatttttggcagacggcttttattgtgccgtagaaggggaaaacgatgtctttaaactatgagcagaacgaaaatgacatcctgaataaattattgccggaatatagacagcattctgtacaaagaaaaagcaatccagaagcagttacaggacacattggagaaagtgaagctgagtaacgagatcatttcctccatcgccagaacttaccagtatatttcacggatcgatattcaggcagattatttcgaagagatcaataaccgggataccgagcatctgaagttcacgaaatcgggaaagctgtcggaaagcaatgaaaaggtatgcagacaatacgtggcggaggagtatcaggaggcatttttcaaatttgtggatctgaagaccctgccggaacgcatgaagaatgaagagacgttagtcctagaataccggatgaaggatggcgactggcacagactccgttttgtggaaaaaaagagagacgaaaacggtgtactgacccatgtgctctgcctgatccgcagcatcagcgataccaagaagtgggaacatgaactgatgtatcaggtggaggaagccaggaaggcagcagctttgaaggcccgtttcctgtcaaatatgagtcatgatatccggacacccatgaatggcattatcggcacgctgaatctggcaaaccgttatccggatgatctggaggtatagagaaagtgccgggaacagatcatgacttcatcgaagtatctggtctctatcgtgaatgatattctggatatgaacaaactggagtcgggaggtgtagtggaacaggagattccgtttaatctggcagaactgctgaaccgggttaacctcggcaagcagaagcaggcggcagaaaagaatgtggaatatattgttgactgggaacagagtgatatccgccatatggatctggcagggaatccaatctatgtggagagactgctgaccaatatttctgataatgcggttaaatttaccggaccgggcggcagtgtgcgtgtctggtgtgcagaaaaatatgcggacgaggagcgggtagtctatgaattcggctgtgccgatactggtatcggcatgagtgaaacctttctggaacatgcttttgaaccgttcacgcaggagaatgagaccagcagatccaggtacgaaggcacaggactgggacttgccattgcaaagaaaatcgtggacaggctggatggagacattgccatagagagtaaaaaaggcgtcggaactactgtgaccatgacacttccgttcaaaatcggggaaccggtggagaaggagaagaacgtaaagagtgaaaaataaagtagattttag

SEQ ID NO: 11319 - DNA, 1753 bp, Unknown
  gut microbiota DNA sequence
attttggaacaggatattctaaccttcattgtatccgtgatatgaatccgagttacgtgaaaatggatagggattttactgccaaggcgatgaacagtgacagggattatgaattatataaaaatatcatccgcatggtacatagtattaatgtcagaatatgtgcagaaggcatcgaggaaagagaatggcttctgaaaatgaaagaaatgaaggtggattatctgcagggatattattttggcagaccatgcgggaaggaacagtttctacagcaatatgccagtggcatccatgttaaataaagagagtaaggcagactcagctatgtgaggctgccttattttatggtcttatcagaaggatgagttcctaacggcttgtctgagtctctccaggtcatctgcatcagggtgagacaatgcacagtcaaaattctggatcaatacatcaagatttgctggatgatcaggagcttccttcattttcaagtagcgttcccggacagactgcggcattctgcccggacacatatactctccgacgataacattgcttgcgtcaacgaactgcttaacctgattcaggattttccggaaatagatatcactgccaccaaagcctgcagttccaaacagaaaaatctgtttgttctttaactgcgataatagctgtaatgtcttggtatctgcatttcccttgtctgtccaaaatccgatatagagcagttcggaagaagggatcactgtgtcggacacaccgaaatactcacattcatcctgtggtaatgcctcgtggatcgcatcagccagcaccttggtattacctgttaagctgctataaatgatggaatattttttattcttcatatcatgttgtctcctttcataggatcatgaaattatcatatcgcattcctattttagttcggaaagcatgatttgtcgaataaattttccataaacattttacggggtaaaatagatagttacttttttcagctacgtgtgataaacttgttgataagtgggtaaaagatcatggacagaactccgataagggaataaaagcgggggctgccatgatcgcagtcatgctggaggtgacagcagtgtatcgtgttgtgtctctgtccggaatctttatcgcaaccggactggtggtcctgctggtcgttactctgatccagacaatagaccgcatccgcgagctggagctggccaggcagagagaggcaagggaaagtctggattatctgacaggccttcccatgcgtcataagggtgaggcactgatccttgagaaaatgcagaagcagggtggctgtctgggatttgtggatatggataatctgaagaagatcaatgatgtctatggacataaggcgggagatcgtgccctcagactggtaggagaggtgctcacagagtgcatggagaacgccgtggtctgccggctgggaggagatgaattcctgttctatctgccggaggtatcggaagcagagataaacatgcgggtgagaaaactgtttgacagctttcgtgcggcaaaagatgctgcggcggagacttcagcggcatccctgtcctgcggcctgtgcatgtgcagacagggagacaactttgaagaatattatataaaagcggacaaagcattgtattatgtcaaacagaacggcaagaataattaccggttctatgaggagctggaggaacagcagccggatgcacagaaattagatggaatcccg

SEQ ID NO: 11320 - DNA, 6616 bp, Unknown
  gut microbiota DNA sequence
gaagccttcgcaagaccgaagaaacccacaggagtggatgagaagaatgcttatatcgtaggcagcggactggcatctttagctgcagcatgtttcctggtacgtgacggacagatgcccggttcccacatccacatcttagaggctatggatatcgcaggcggtgcgtgtgacggtatctttgatccgaccagaggctatatcatgcgtggcggacgtgagatggagaaccatttcgaatgtctgtgggatctgttccgcagcatcccctctctggaagtacccggagccagcgtactggatgagtactactggctgaacaaggaagatcccaactactccctgtgccgtgcaacgaaggattgcggacaggatgcccataccgatggcaagttcaacttaagccagaagggctgcatggagatcatgaagctgttcatgaccaaggacgaggacctgtatgacaagaccattgaagatgttttcgatgatgaagtatttaactccaccttctggttatactggagaaccatgttcgctttcgagaattggcacagcgcactcgagatgaagctttatttccagagattcatccatcatatttccggactgcctgacttcagtgccctgaaattcaccaagtacaaccagtatgagtctctgatccttcccatgaagaagtatctggaggcagcaggcgtggacttccagttcaataccgaagtgaccaatgttattttcgatatcaatgacggcaaaaaggtggcaaaggctatcgagtgcaaggtaaaaggcgtagagaagggcattgtcctcaccgagaacgacctggtattcgttaccaacggaagctgtaccgagggcaccatctacggcgaccagaaccatgcacccaacggtgacgcagaggttcgtaccagcggtgtatggagcctgtggaaaaatatcgcaaaacaggatccttccttcggacatcccgagaagttctgttctgatgtttccaagactaactgggaatccgctaccgtgaccacactggatgacaagatcattccttatatcaccaatatctgtaagcgtgatcccagaaccggtaaagtcgtaaccggtggtattgtaagctgccaggattccaagtggctcatgagctggaccatcaatcgtcagggacagttcaaggaacaggacaagaatcaggtatgtgtatgggtatacggcctgttcaccgacgtacccggcgattatattaagaagcccatgaaggattgtactggtaaggagatcactgaagagtggctgtatcacttaggtgtgcccgtagaagatatcgaggatctggcagagcacagcgcagtctgcgttcctaccatgatgccttacattaccgcattcttcatgcccagaaccaagggtgaccgtcccgatgtcattcccgacggctgcgtgaacttcgctttcttaggtcagttcgcagagaccccgagggacaccgtattcaccacagagtattccgtgagaaccgctatggaggctgtctacggactgctgggtgtagacagaggtgtgcctgaggtatggggcagtgtctatgatatcagagagcttctggacagcagcgtgaagctgatggacggtatgtctcctctggagatcgaactgcccggacctttaaatgcactgaagaagccgctgctccgcgtagtgaaaggcactgtagtagaaaaactgctgcgtgaccacaatgtgatcaaagacggcatgctggattagaattgtatatggaataaaagtgcgaagactcccaccggaaaaatccggtgggagttttttaaaaatcatacaaagaaaattgaacaaatgtaagcgtttacataatactaaagtactatacaaaacaaacaaaaacggtatgcctgttttcaacattgtgcacgaaaatcggtactctgtcaaaaaattatcaatttcgtcttgatattcctttggcagattgttacaatatcaaagtactaaaaaccgaagccgaaatgctccggtagtggtttgggttacaaagttttgtcaaaaatattataaaaagggagacaaagaaatatgaagaaatgggtatatttgtttaccgaaggtaatgcaaacatgcgcgaactgcttggtggtaagggtgcaaacctggctgagatgaccaacattggtctgccggttcctcagggcttcaccattacaacagaggcatgtacacagtattatgaagatggacgcgagatcaatgaagagatccagggtcagatcaacgagtacattactaagatggaggagatcaccggcaaaaagtttggcgaccacgagaatcctctgttagtatccgttcgttccggcgcgagagcatccatgcccggtatgatggataccattctgaaccttggtctgaatgagaccgttgttaacgtaatcgctgagaagtccggcaacccccgttgggcttgggactgctatagaagatttatccagatgtattccgacgttgttatggaagtaggtaagaagtacttcgagcagctgatcgatgcaatgaaagagaagaagggtgttaagcaggacgttgagcttaccgctgacgatctgaaggaactggctggtcagttcaaggctgagtacaaggctaagatcggtgtagacttccctgatgatcccaaggaacagctgatgggcgctatcaaggctgtattccgttcctgggacaaccctcgtgcaaacgtttatcgtcgtgacaatgatatcccttattcctggggtactgctgttaacgttcagtctatggcatttggtaacatgggtgatgactgtggtaccggtgttgcatttaccagagatccggctaccggcgctaagggactgttcggtgagttcctgaccaacgcacagggcgaggacgtagtagcaggtgttcgtacacctatgaagatcgctgagatggctgacaaattccctgaggcatttgctcagttccaggaagtatgtaagactctggaagatcactacagagatatgcaggatatggagttcaccgttgagcatggtaagctgtacatgttacagaccagaaacggtaagagaaccgctcaggcagctctgaagatcgcttgtgatctggtagatgagggcatgagaaccgaggaagaggcagttgcaatgatcgatcctcgtaacctggatactctgttacatcctcagtttgacaccgctgctctgaaggctgcaactcctatcggcaagggccttggtgcttctcccggagctgcatgtggtaagatcgtattcaccgcagaagatgcagaagaatggcatgcaagaggagagagagttgttctggtacgtctggagacctctcccgaagatatcaccggtatgaaggcttcccagggtatcctgaccgttcgtggtggtatgacctctcacgcagcagtagttgctcgtggtatgggtacctgctgtgtatccggttgtggcgacatcgctatggatgaggagaacaagcagttcactctggctggcaagaccttccatgaaggtgactggctgtctatcgatggtactaccggtaatatctatgatggcgagatcaagactgttgacgctaccatcgcaggtgagttcggccgtgtaatggcttgggctgacaaatatcgtaagttaaaagttcgtaccaatgcagatactcccgcagatgctaagaaggctcgtgagctgggcgctgaaggaatcggtctgtgccgtactgagcatatgttcttcgaagaggacagaatcgcagcattccgtgagatgatctgttccgatactgtagaggagagagaagcagcactggagaagatcctgccttatcagcagaacgacttcaagcagctgtatgaggctctggagggtaaccctgttaccatccgtttcctggatccgcctctgcatgagttcgttcctaccgaggaagctgacattgagaagctggctaaggcacagggcaagagtgtagagaccatcaagaccatcatcgcttccctgcatgagttcaaccctatgatgggtcacagaggatgccgtctggctgttacttatcctgaaattgccaagatgcagaccaaggctgttatccgtgcggcaatcgaggttaagaaggcacatcccgactggaatgtagagcccgagatcatgattcctctggtatgtgaagtgaaagagcttaagttcgttaagaaggtagttgtagagaccgctgatgctgagatcgcagctgccggtgtagatatgaagtacgaagtaggtaccatgatcgagatccccagagcagctctgactgccgatgagatcgctaaggaagctgatttcttctgcttcggtaccaacgacctgacccagatgaccttcggcttctcccgtgatgatgcaggtaagttcctgaacgcttactatgacaccaagatcttcgagaatgatccgttcgctaagctggatcaggccggtgtcggcaagctgatggagatggctatcaagcttggtaagcctgtaaatcctaagctgcacgttggtatctgtggtgagcacggcggagatccttcttccgtagagttctgccacaagatcggtctggattatgtatcctgctcacctttccgtgtacctatcgcaagactggctgctgcacaggctgctattgctgataagtaaggaaagtcggaaagacgatctgagagggtattacgcaggtaataaattggggtatatgagaatatgacgagaacctcattactgatagaaatatcagtaatggggttcttttttggaaaaatattgtgtgggtgtcataccgtagtattttttgaaaacccggtaaaaataggacacgctctggaaaccgcaggtcttgctgatgacagagagggaattgccgccctgttccatctggtgtatggcgtgacggaggcgaagcttattaatatattcttttacggtgagagattccgtctgccggacagcccggtggacataactctcggagactccacaggattcagcgatatcccggacggtctgaatcgtggtgtagttggtggtaatataattaatgatccgctgaaacccggaggctttattctcactgacgggaatctcattatctaacggatactgatgacgaaaatcgttgagatctgtaagaatctgtgccaataacaggtaggcagtggaagatttgcagcaggaagctgcgttccagtcgaggagcttttgtctgtaatcctcaggtatgaaaatgatcggtgccttgaaacaggtcagataggaagatactacgacgggtaaaaagtatttttccaggtaggcttttgaaaaatgaatgcagatcccggtataatccgtgtcaccgacacttcggtgagagatattgctctcaaacaggcttgccatgccggcttctacccggtaggtgatatcgccgatggtaaccagacgctctccggagagcagaatatagatttcatagttggtgtggtgatgcgaatagggcatggaccaccctttttttgtatcttcataggatatttcaaaatcttcatataaaaaagttcttctatctgtcatttctgattcactccttcacacatattatatcaaaaaaagttcaggataatgcaataaatataaaaaatagttcacgatagtgaatttaaaacactaaaagtaagctatataatgattccgtaatgaagaagaaaaatatcagaaaaattactgtggatttactatggaatttttctgtaccgaaaagcgcatgtgggatggagtcatatatgaaaatattgttggatggaagctggcacgtggaactggaggacggaaccacgggacagatggatttgccgggaacattggatgagaacgggatcggacatcgagatgtgggagcgaatcagtggcacccggatgcggcgttggggaaagcagaggaagagatagataaagatgcaccgatcgctacaagatttaccaggcggcatacctatgaaggaaaagcgcggatcagccgcaggataaaaataccggaatatggcatggagcggctgttcgtacgagtggaacgggcgcgtgcgctgcgattgtttgtggatggagccgaaagctgcatctttcggcagggaacgctgagtacaccttacatttttgaactgaccggagtgacaccgggagaacatgagctcacgttcctctcggataacagctatccgggaatgccaaaaactgctatctgctattcttccgcggcaacagatgagacacagacgaactggaatgggatacttggcgaatgcagcatgtatactcgaccgcagaattttatagacagtctccgagtatatccgagagcggtaaaaaaggaagagaaaaataaagcaggcagctatgtgatagatgtctgtgtggagctggcaccgggtgcaaaggaaatattaatagatgcaaaaatggtattacagtcagagactctggcagcaggaaagttagaaaacacacagatgttgaaggaaattttcagctgttccggggagaaattagcggaagccgaagc

SEQ ID NO: 11321 - DNA, 3473 bp, Unknown
  gut microbiota DNA sequence
gacgaagccgaaggcaatctctatgagatggcggcaatcctggacagtggtatggcggcagagtatggggacgacatcgtcgacgagtgccggatccgtttcggcatccgctcctttggcgataacggcagtggcaggctggcgctgaatggcaggacaattttcctgcggggtgaggcgaactgcgcagaatatccggagaccggacatccacccatgacgattccggaatggaaagagatgttattaaaatatcgcagttatggaataaactgtgtaagattccattcccactgtgagccggaagcagcttttgcggcagcggatgagctggggatgctgctgcagccggaactgtctcattgggatccgaagaatgcctttggaacggaggaaagttaccggtattaccgggcagaacttacagcgattttgaaaacatatgccaatcatccttcttttgtaatgcttactctggggaacgaattgcaggcacaggggaaaggcagagagcggatgcgggaactggtcagaacagcgaaaaggctggatcctaccaggctgtatgcgaacggatccaatgccttttatggggaagaaggatgtgactcagagagcgatttctatacatcgcagagttgcaggaatgtggtcatccggggaactttctccggtatgcggggatacattaacgaaaattatccatcggcagatcacgcttatgatgcagcgatggtagagatccgaaaggaatatcctaagccggtattcagttttgaagtggggcagttcgaagtgctgccggattttgaggagctgaaaagctttcatggaatatcggatccggtgaatctgaaactgatcaaaaaacgtgtagaggaacggggacttttgccctcatggaaaaaatatgtggaagccaccggagaactgtcgaggctggcataccgggaagagattgaagcagccatgcggacgagagagctttccggaatttcacttctgggattgcaggacttcccgggacaggggacggcactggtgggcatgatgaattcccatttggaaccgaagccgtacgattttgccagaccggaacgattccgtgagtttttcagagagtgcaggatcctggtgaaactcccacgttatacctatgaggcaggagaacggctgaccgcggaagtggaagtggcaaatttcggcaggaaaaatatcacaggagtattgcactgggcacttacagaaagaaaatgtgcatcttagggcggaaacagtaaacagggagcaacggtaaaatgcgaaaatacggtggtagcagccggagcagatacagagaccaaaagctgtcctccgggcagctatactacgatagggattctggatattccactggatgtgatgtcaaagaatacagcactcacccttacggtgagtatcggcaacagcaccggctcctatccggtgtgggtatatcagaagacaacccaggtctgcccggaaaatgtatatgaagccagaatttttgatgagcggacaaaagaggtgcttcaaaacggcggaagagtctatctgtctccggacgcggacgaagagagcctgccgtattccataaaaacacagtttacgacagatttctggtcggtgggaactttcgcggatcaggagggcggtatggggcagctcatagatacggagcatccgatttttaaggaattccccacggattttcacacggactggcaatggtggatcatggcaacgaagcgggcggtgattctgccgcatcccatgaagatgatcattacggagatggacagctacgcttttttacgtcccatggcacaactgatagagtttcgatgcctgaagggaaaagtattgctatccaccatggaattgcataagagtcagcagtatccggaggcgagggcactgcaggcggcaatttatacatatctgtcgggagagaattttgaaccggcggaggaattaacggaagaagagttaagcacactggtgcgaggttaaaattatatcgggcggcgcagtgaaagctgcccggagataaaaggaggaaaccatgaatagggttcaggtctgggaagaaaaagtgatcattcccacatacgaagcaggaaagccggataagaatccgatgtttttggagaaacgtgtctatcagggaagctcgggaaggatctatccccacacggtgatcgagaagatcagcgatgagaaagtggataaggagtatacagcactttttctggagaacgattatctgaaagtaatgatgctgccggagctgggaggcaggatccagagagcttatgacaagacaaatggctacgattttatctattacaatcatgtcatcaaaccggcgttagtgggactggcgggaccctggatatccggaggtattgagttcaactggccgcagcatcacagacccagtacctttgatccggtggaatatacctatgcggaaaatgaggacggaagtgcgacagtctggatgggagagatcgagaacatgttccggacagagggcgtgctgggcgtgactttgtatccggataaggcatatatcgaattgtcggcaaagctgtataaccgcacgaaaatgccccagaccttcctgtggtgggcgaaccctgcagtagcggtaaatgatgacaccatctccgtatttccggaggatgtgacggcggtatatgaccacggcaagcgggatgttatcagtttcccctatgcggagggaacctactataagcacaaatacgatcatgtgaatatcgcacagtataaaaatattccggtgcccacctcctatatggcataccgttcggattataattttatcggggaatacgattacggaaaacaggcaggacttctacatgtggcagatcatcatattgctcccgggaaaaagcagtggacctggggatgcggagaattcggcaaagcatgggaccttgcactgaccgacgaggacggtccgtatatagaactgatgacaggctgttttacggataatcagccggacttcacctggatccagccccaggagaccaagaatttcaaacagtattttatgccctataaaaatatcggctatgtgaaaaatgctacgatcgatgcggcggtgaatgcggagtatgatgagactaaggggcagcttacggtatcggcctataccacgtccgtgcaaaaaggagcacggatactgctgacattgccgggagaaaacggcagacaggaaaaggtactgtatgaggaaacctcagatctgttaccggagaaaacatatgaagtgaagattgaccgtgaaaaattgcaacagataccggcatatacagagggagagcagaatggcacagaggtactctgcggcctacgggtatgtgtttgtgccgcagatgggagagaactggtctcttaccattttccgaaaaaaattgaag

SEQ ID NO: 11322 - DNA, 27271 bp, Unknown
  gut microbiota DNA sequence
acaataccggcatgccacttatcatcccgaggattattatctggaggggctgcgcagggatcctaccgatatccgcctgaacaatgcctatggaagatgtctgcttaaaaagtgtgattttgccggggcggaaaagtattttcggaaggcagtggagaaggctattcgttccaatccgaacccttacgattatgagccgtactataatctgggactttctctgaaatatcaggggaaagaaaaagaagcttacgatgctttttacaaagccatctggggcgacagtttccaagctcccggattctatgaacttgcctgcctggatgcgaaagcgggaagatatgcagaggctctggagcatgtaaacgaatctattctcagacagtaccagtgcatgaaagcccgggcgttgaaggaaaatattttaagaaaaatgggcagagtgctggaagcggaagaattacataaggagagcctgaagatcgatccgctctatgacagacggccggagaagatcaaccataacaccctgctggagctgatgatcgatctctatgaggcaggagactacgcacagggaatcgcccttgcaaaaaaatgggtggaacaacagaacgtatcacggcaagaggatatttatccgctggtatattattatattgcttacggataccagaacctgcataggaaagaaaatacgaaacagacaaatcattacatgacagcgtatgtgacactgggagaaaatgcggtagcggacggctgtttccctcacagaacggaagattatatcgtattaaagagtctggcagatgattattatctggatatggtttactattatctgggctgcctgctctatgacaggagagcgtacggcgaggccatagcggattatgaagaagctgcgcttaggtacccggatttcccgacggtacacaggaatctggcactggcatattacaatgtgaaaaagcagccgcagagagcgtacgaggaaatggagaaagcttttgcgctggatgagacggatgccagagtgtatctggaactggatcagctgaaaaagcgtctgaatgttcccgtgaaagaacgatggagtgatatggaaaaacattttgacctggtggaaagcagggatgatctgtatctggagtacgtgacacttttaaacactctgggagaatctgagaaggctctcaatctgatcaaagcaaggaagttccatcagtgggaaggcggcgaaggcaaagtggcagcccagtacctgaccgccttgtatcagctggcaaaagcggctgcggcagaaggagaatatgtagaagccaaaacaattctcctgcaggcagtggatgaatatccccaaaatctgggagaagggaaattggagtctgcacaggaaaataatctgtactacctactgggactggcgcaggaaaagctgggagagacagaggaagctttcgcaagtcttacgaaagcctgtcacggagagtcggagccggtgggcatgatgtattacaatgatcagccccccgagatgatctattatcagggactggcgtacagaaagcttggaaacgaagaacaggcggttcgcagatttagaaagctggtggagtatggcagagagcatatagaggagaatgtaaaaatagactattttgcggtatccctgccggatctgctgatctttgaggagaacctggacgagcggaaccggaagcattgtctgttcatgatgagcctgggacttaaaggactgggacggtcagacgaagcggaaaagtgtgcggaagaactacttgccatggacaatgctcatcagggaatctgggtacatgatctgtaaaaaagcttgaaaagaaagacttgaataggaaggcttttgaggaaaggattacaaaatgaaaaacatggaaaaagaagtatatagctataacagcgaatacttaacctgcaacgccagaccgatcctgcccatcatgggagaattccatttctcccgctatccggaagaggaatggaaaacagcacttaagaagatgcaacagggcggtgtagacatcgttgctacgtacgtgttttggatccaccatgaggaagcggaaggtgagtgggatttctccggtagaaggaatctgaaggcgtttttgagttgctgtcaggaaaccgggatgaaagtatggctgcgtatcggcccgtgggcacacggagagtgcaggaacggcggtttcccagactggctggtggagaaagaaaagcggggcaaactgtctcttagaacggatgatccgcagtatctcaagtatgtggacctcttttttaccaagattgccgagcaggcggatgggtatatgcataaggacgatggtcccgtcatcggcattcagatcgagaatgagtacgggcatgccggtggcccttccgacagggaagagggcatggcgcatatgcgcacactcagagctatggcggagaaaaagggactgaccgctccctatttttcagcgaccggatggggaggcgcttatgtgccggaaaacttcctgccggtgcttggcgggtatgtggatgctccgtgggcgaatcatacccacgaacttgcggcaagcgagaatttcctgtttcagccttttcacgacgatgcaaatattgcatcggatttcgccgaaggacagagtggttttacctttgatacgtcaaaattcccttacctgacggcggaactgggtgggggactgcaggtgacggcgcacagacgcacctacccttacccggacgatatcgaggcacaaacgatctgcatgttgggagcaggggcaaatctgatcgggtattatatgtaccacggcggcgtgaatcctgacggaaaatataccaccctgcaggagtcgaaggcaaccggctatgccaatgatcttcctgtgaaaagctatgattttcagacgtgcctgcgggaaaacggtctgccgtcagaaagttattatcgactgcgcaaacaccatatttttatcaaaaatacagaagaactgctggcaccggcgaaagtgtatctgccggataatatccccgagcccatgggtgcagaagatatggagacattgcgggcagcgttccgctataataaaacggcggactgcgggttcttatttatcaataatcaccagagaaaacggaaaatgacggagaaacagatcacaccggaaaagccattacagtttacggtgacagatgttgaaggaacacagaggcagattattttcgaccggatccatgtaaggacggatgcgattctggtgctgccttacaatctgccggtggtgatacggggagagcagttcaggcttcggaaaaccaatgcctcttatctgggatgctttggcggaacttattatttctatacggatgaggagccggaggatatttatttcgagtggagtgatggcaaagatcatgcggaagcggtaaggatccttaccatacacgatgcggagcatttttgttatgtgcaggaaggggcagatgaaaagggcaaggtgagtctgctgccggatctgcactttacggaagccggtaaggtgcagatcacggatgttggacaggcagtggaaagcatctggaatgtatatggtcaaacagaaccgaacgtctatgaattaacattggaatatgagtatcacccggcggatacactgtcaggtgatgtctggctggaactggatttcggcggggactacgcacgcttgtatcaggacggaaaactgattgacgactggttctccaatggtgaactatggcgtgtggctctgaaacgttacgactgcccgacacatctgaccctggaactggatccgttcaaaatggatgtctattacgatctgcctccgaagcgggagatgcgtctggcaggggcgagactgctgcagttgagttgaccggaacccggtctggctggactcgctatggaaacagacggataaaaaagaggacacatacatgaaagatatgacgcagggtaaaccattaaaactgatcattgggtttgccataccgatgttgatcggcaacatattccagcaaatatataatgtggcagacacagtgatcgtgggaagatttttgggagagagtgcactggcaggcgtgggaagcacaggaacgctgacctattttctgctggcgctggtcagcggcatgtgcaacggtgccggattggtggtggcgcagtgctttggttgtggcaataaagagagactggcgaagactgtgacggcacttgtctgggtggcagggatgctgaccggcatcatgtcactcatcggaatcttcggcgcggaatttttcctccggctcttaagtgtgccggagaatgtcatgggctattccgcagaatatctgcatatcatctatacttttgtgttcggcagtgtgatctataacggatgtgcggcgatactaaacagtgtgggagattccaggactccgctgcgggcagtgattgcttcgtctgcagtgaatattgcctttgacttatttttcatcattgtgtgcaaaatgggagtagcgggagcagcttatgctacgattctggcgcagtgcacttcagcggtgatctgttttataaaagtgtggaaaacgagagaagagatcggattatccccgatgaagtggaagccggaagccggttatatccatttggtggtaaagactggattcccggcggcgtttcagtcctgcatgatcgctttaggcggcatgagtgtacagagactggtgaattcctttggctcgtccaccatggcggcttatgtggcggcaaatcgtgtggacagtgtggcaattcaggtcatcgtatctatcggaacagcactttcggtatttaccgggcagaatattgcaaagaatcagtatgacaggatccgggaagcactctataagacgctgggtgtcatggtgggagcaagtatttttattgcctccatggtacttattttccgggtgcagttaatgacgctgtttttggatgcaaacgaatcgggagaagccatcggcatcggctgtacgtatctgacgatcatcggcgtggcctatgtgatcgccggtgtgatgcagagttatcagaatgtgatacgtggcgccggagatgtgaatacctgcatggtagcaggcttaacggaactgaccggcagaatcgtgttcgcgtatctgttgtccggaatcttaggcgtgacgggaatctggatcgccacacctctgtcctggagctgcgggtgcatcattcccgtgatccggtattactccggcaaatggaaacacaaacgcctggcttaatggccggagctaccggaatacagaatgcagttattccggacgcatccagccggcgaattccagaatggactggttttccgcttttttctcgctctgctgcatctgcttgcggtattctctgggagacatctgcatcagcttggcgaagtagcggttaaagctggacacagaatggaagcccaccatttcggagatgtcgagaatggaatgctccgtgcttcgtaacaggatacaggatttcaggatccgggtattgtttacatagtccaacggggaggtgcccatgatatcgtggaagacccggcggaaatgggtgggactccaatgacacagatctgccagatattcgatggtaaactgttgcatataatttttctcaatatattccagagcgggtgagatcaccagagagttttcggcgatctcaccctcttttttgcggtcctgtagggccaagatctcgggagaacccggtttcgcagtgccggggttgacaccgccaaggctttcgatccggtacagctcgatatagagggaacacaacagacttctggcactgatctggtagcagggattctgctcctccaactcatgaatgatataggacaccagatagttgatatgggggaaatcctctttgctgaaaatatagcggaatcccgggaagccgtctgtggacagatcataatttttccaggaagcgggaaggagattgcggaacagctccctcggatccagaaacagataagaccagtggctcctggtaccgggagcgctgtaagtggtgtgggggacgttacggggcaggatagtgacatcaccggcatggaaggacttcttctcaccgttgatctctaacgtgccgctgtcggaatgacagagtccgatctccagacaattatggaagtgaagacttccgctgggaatatccgagatcttccaataatcaccggacagaagcagtacggggaactgcatgggcagatagtagcttctgtattctgtaaccactcgcttggttttcgccattttcaacctcctgtgaatcttgtataaatccattgtgcatcctgtatgacactgtgaaaaaacgacttactgacatggaaataatacctatacattatatataacaattaaactggacaaaatcaaccattatattgtataaataataagtgcacttttggaaccgtctctgaaaatgtggctaaaaatggttaaaaatattgaaaaatgcggctctttttcaagaaatatacgttattaaatacaaaaacaaacgagaaaataaaatcaacgaaaaacgaacataatttataatggttgtttttgcatagttttctataacgtttgattagaaaaaagtgacaacatgtatgataatatgcttacaaggttgcaaaaagtgtacaaaatgacgagaaaatataactgacacttgaggaggttcgatatggcgaagaagaatgcagccaatgtggcgggcgtgaaaatgaaaaccacttggaaacaagcttttaaaagagactggcagttgtatctgttgttattgtttccactgatcatggtaattgtattcagctatggtgcttacccgggactgcggatggccttcatggattacaaaccggcgaagggatatgcaggcagtgaatgggtgggaatgaagacattcattaaaatattcaaggatgccgacttcatgagagcgcttcgcaactccgtagtgttcaatctggcagacctgttagtgggtttcccgatgccgatcattctggcactgatcctgaatgaattaagatatcccagattcaaaaaggtatcccagacgatcctgtatctgccgcacttcctctcctgggccatcatcggaagcgtagcgatgacaatgttccgccccaactccggtctggtgaatatcctgttaaccaacatgggagtgatctccgaaggaattcctttcctgaatgagaaatggcactgggcaatcacttatctgctgatcggtgtatggcagacaatgggatggggcaccatcctctacctggcagcgatcaccggtatcaacggagaactgtacgaagcagccatgatcgatggtgcgaaccgctggaagagaatgtggcacatcacacttcccggtatcaagagcacggtagtaacactgctgatcttaaatctcggacgtgtcatgggaagtaacttagagcgactgacggcgttagaaaactcgcaggtcaaggacttccagtatcagctggctgtctacatatacaataaaggtattggagccggaaagttcagtgcggcgaccgcggttggtctgttccagtcactgatcggactgatcctggttctgttatctgataaatttgccaagaagcttggcgaagacggattactgtaggaggtgagagcgatgaagaaaaaagaagtgaatatcaacgaagaatctacctccgcaggcggagctcatgcggtcaacaaattccgcatcagtgattttgtcatgatggcagtgatcgttatcctctgcgccagctgcgtattacctttcctgcatgtggcagtgaaatccatttccggcaataccgcagtaatgtccaagagcgtttacttctggcccaaggatatcaccttcgatgcttataagaaggtgtttgcagacaactccatgacctattccatgatcttctcggtgatcgttaccgtgatcttcacggctctgggaatgctggtatgtacctgcgcagcttacccgctctccaagaagcggttgaaaggtaaaaagttactgacattcctgctgatggtgccgatgtacttcagcgcaggtatcattccctgctacctgttatatcagaagttacatgtgctggatacgatgtgggtattgatcttacctctgatctactccccgtacaacatgctgatcatgaagaactatttccagagtacgattcctgacagcttggaagaatccgcattcctggatggcgcaagtaatttccagatcttaagcagaatcgtattaccgctgtccaaaccgatcctggcaacgttgtctctgttctatgcggtaggccgctggaattcctacgcagacaacatgtactacaccaagagcgccgatctgaaactgatccagtataagttatatcagttggttgcatccgcagcggaagcacagacttcatccctggcagataccggaagcgcgatccagtccactcccgaagtgttacaagcagccagcatcatgttcgtaacaattcctatcattatcatctacccgttcctgcagaagtatttcgtacagggtactatgatcggagcagtaaagggttaagagaaacaaaagcaaccatgttagttttccccgaagctgggggtacacataaaactatgtatttaaaacaaggaggattgagttatgaagaagaatactcttcacaaggtaatggcaacggcactggttggtgctatggcaatgggaactctgaccggatgcggtgggagtactgacgcaggtgcggatacttccacaaaggataccgcagcggtaagcacagaagcaagcacagatgcaggaacttccacagcagtagcaggtattgacggatgggaggctttcgcagacaatgttactctgcagatccccgtatacgatcgtggttcttccggaaacggatgctccgatgtagagaacaactactggaccaaatgggtacaggagaatttcggagacaagtacaacattacagtagaatatgtaggaattacccgtagcgacgttatgaccgattacgctatgctggcagcaagccagagccttcctacgatctgtatggaatatgactatgataagctggcaagctggcaggcagacggctatctgcagacctacgatgtagaagagttcaagcagattgcccccacctactgggagaccatggtagagcatggcaacgacgcttacaccaagctgtctgatgaagattatctggtacttggttacagaccttacggcaataccacttatacctggtgtactttctatcgtcaggactggttggaggaagcaggattttctgagtatcctgttggcgacaacaccaagctgttagagctgtatgcaaaactggtagaaaatggtcacaagtatcccttaagcggtaagaaagtaagcggtgcaggtatcgaccagaactacggttacagagattatcctcaggatgagactacatgggcaaccaccggtgactatcagattccctcactgtccacggaagctcagaagagattcttaaaatgggagaacgagctgtacaacgatggttactacaatcctgagtactacttaagagatgcttccgaggcagaggcagacttcatcaacggtgaagcatttacctggaccggatatgtatcttctaccatgaacgtactgaattccttctatgagaccaaccccgatggcaagctggcagtagcagttactccttctacctggacacaggatgagacctggggatcttccgcttcttacagacccggaaccaactttggtatgatgatcggcttcgctaacgatgctaccgaggatgaagtaaaagcagctatgatgtatcttgagtggctgaaccagcccgagaacctgttcaccatgcagtggggtattgaaggcgtgaacttcaactacgatgacaacggtgatcccgtagcagtagcagatcagaccggtctggatgagcagcagggtcacaacaacaacgtagactactggtgtgcagtaaccgcagttaagactcttggttctatcgagaaggacatcaaggctgtaagccctcagggactgcctcaggacttctatgatcagatcctggctaactacaacggacaggttgctctgtacgaagcaggcaaggctaactccgactgcctgttcgcaacctctatcgacgctgtatccgagtacaaccagactctgtatgatctgtataccgagtaccgtgacaaactgaccatgtgctccaaggatcagttcgacgctctgtatgacgaactgagccagaagtatctggatgcaggttaccaggaagtgatcgatcagagacaggaagctctggacaacggtcagaccaccagacttcagtaattgaaaagataaagttttaaagtaagtacatacagccccccggcatgatctgcttgggggctgtattaaaaagatataaaaaagataagcttatgctttttttcgacagacatagttggtttttggaccccgacatcatataatgtacccaaagtatggctgcggaaaaagagtataaacgacaaagcctgacaagaacggaggaaatgaaatgttaaaactggagtatgacaaaaaagaaatagaggaagtcattgataaaattgtgaaaaagaccatgaatatggatctcacctgggattggccctgtggtgtggcatattacggaatcagtgatgcttatgagaagaccgggaaaaaggaatatctggagctgttaaaggatcgcatcgacgaactgatcgatctggggctgcccaaggtatggaccgtaaatgcctgtgctatgggacattgtctgatcaccttataccaggcaacgggagagcagcagtatcacgatattctcatgagcaagatcgcttatctgagaaaagatgctcttcgctttggagatcatgtattacagcatacggtatctgccaacaatgatttcccggagcagtgctggtgcgacaccttgttcatggcggcatttctgatgctgcgtgtgggagtattggaacacgatgaagagttaattgatgatgcgctgaaccagtattactggcatatcaaatatttacagaaccccagcagtgggctctggtatcacggctatgacaatattgccggagaccatatgtccggtatctattggggaagagcgaatgcctgggcagcatttaccatgtcacaggtaggaggcatcctgccccagtgctatctgtatcccaagtatatcgatgtggcaggttctctgaatgagcagctggcagcactgaaggtataccagacagagaacggactgtggagaactgtggtggatgatccggaatcttatgaagagatctccgcatctgcgggaattgccgcagcaatgctgaccagaggcaatcctttacatagcaaatacatcaataaggcaatcaaggggctgcttgccaacgtaagtgaggacggtaaggtaatgaatgtctccggtggtaccgctgttatgagagacaaggaaggctaccggggaattcccaaggcgtatatccagggctggggacagggactggcattatcattttttgcaactttgttagtatccgacgagattgagaaggacggtgcgttataaatgtttcgcaggaattttctgttcgggaaggacggaggaactgccaatctgatcgatgtgggcagtgacgacctctatcagcccggaaaaggctatggctttgtaacagagaaaaacagaagagaacaggaaggactgcagatccgggaactgaattcgtcttttgaaccgatgtactggtatcagaacgagaatctgaccttccttagagaagatgagaatggctgctatctggattccacagaagaagtggcagtcctggaggcacagtcaggagaaaaaatgccgggttctcccagacggatcccgttactcttcaaagtggatgtgcccagacagggcaattataaggtcacgctgacaatccgctccgaggaagagatgggagaggtattgatctttaccggtagaagacgtcttgcttttcgcggcagagtacaggcaggagagttcacttataccatggcggtgaatgtctgcgatattgtaccggtggggtattcgcatatttttgcggataagaccgtggacattgcggtgctggcagacagaccaagaatcagtgctcttacggtggaagagatgaattgtcccaccgtatatctggcaggagattccacagtgacggatcagcccggagattatccctattatcccggtacctgttactgtggctggggacagatgcttccggcatatctggatgccagactttccgtgtcgaaccattctcattcgggattgaccacagatacgttccgcaaggagggacattatgcggtgatcgaacagtacagcagacccggcgattatgtattttaccagttcggtcacaatgaccagaagcttccaaagctgcaggcaaaggacggctatcaggcgaatctgcaccgctatatcaaagagaatcaggcaaggggtgtctatccggtactggtaacacccattgcaagaaatacctggagattgcgggaccagacctatctggatctgttggaggaattcgcagatgtgtgtctggagctgggagcacagtacaatattcccgtgctggatctccatgcccacagtaaggaatacgttctggaaaagggattacaggatgcaaaacccatctttttcccgggagattatacgcataccaatgacttcggcgcttacaaaatggccggttatgtggcggaggagattcgtgaaaaatgctccggatattctgagagagcttatgcatatctggcagagtgtgtgacgaaaggcttcggcgcatgggaacctgtggggcagataaaagtgccgaagaagccggagatctacaaagacattccggacccggcgggagatcaggtattgttgtctgaggcagagcagttggagcgtgtcgtaagactgtgcctgaaggaagaacttctgtaacgggaacaagtaagaaaataagcaagaataaccagaaaaaagcaggaatatgaggaggaactcagaatgggaaaaggtggttttaccttaccgggagaatcaggatatgaagaactgactctgaaaatggcgggaaaatggggcgcagatgtgatccgtgacagtgacggcaccgtgctttccgatgagatcacccatgccggctacggcatctactccaccatctgtattatcagagatcataatgcctgggcaaaggagaatcaggacaaattgcagcagacttttctgtgtacccctccttgtgtggcagagtctgatacggtggccatcggattgatggacagcttttttgcggagcagttccggattaatgacagtgtggcggcattggaatattgggaagtgtacgacagaacagccaacgttaagatcgacaattcccactggaactatgacaaagagaaaggaagtgtgatcctgtgcggcatcacgccttttcataagtatacggtgagcttcttagcctatcgtatctgggaagagatctccatgtacaaccacactacgaaccattgggacaaagagcatctgatgcagatcgatcccagataccctgaaaatcaggagtatctgcttggctggatgaagaactggtgcgagacccatccggataccacggtggtacgctttacttccatgttctataatttcgtatggatctggggaagcagtgagaggaaccggaatctgttctccgactggggttcctatgatttcactgtgagtgttccggcattgcaggaattcgagaaacaatatggttaccgtatgacagcggaagattttatcaataagggacagctgcatgtgacccatatgcccggcaacgcaaaaaaggcggactggatggcatttatcaatgacttcgtcatttccttcggcagaaaactgatcgatatggtgcattcctacggtaaaaaggcgtatgtcttctatgatgacagctgggtaggtgtggagccttacaacggaagatttggggagtttggcttcgacggactgatcaaatgtgttttctccggttacgaagcgagactgtgcgcaggcgtggatgtgccggtacatgaactgcgtctgcatccgtacctgttcccggtgggactgggcggagcaccgaccttcatggaaggcggcgatcccacgctggatgcgaaaaaatactggaacagtgtaagacgcgcacttttacgggccaggatcgaccggatcggtctcggcggatatctgcatctggtagaggatttcccggacttctgcgattatatggaaaaggtggcagacgaattccgtctgatccgcagcttccacgatgagggtgagccttaccgtatcaagacccgtgtggcagtactgcactactggggaagtttacgttcctggacattatccggacatttccatgagacgtatatgcatgacctgatccacattaacgaagccctgtctggacttcccgtggatgtgaaatttatttcctttgaggatgtaaaacatggtatactgaaggacgtagatgtagtgatcaatgcaggcagagccggaagtgcctggagcggcggggatgcctggaaggatgaggaacttgttaccacacttacaaagtgggtacacgagggcggctgttttatcggtgtgaatgagccttctgctgtggaaggatacgatacgtatttccgtatggctcatgtgctgggaatcgatgaagataccggtgcaagagtctgccatggaaaatgggctttcgaggcagcggatccggagagactgatcccggaaggtgtcggtgtggaagcgaaggagaaccgttacctgacagacggcagggcacaggtgcttttgtcagacggcgggaagccgcaagtaaccgtgaaccgtttcggcaggggactggggatctatctgtcttccttccaagtgaatctgtggaataccagaatgctgtaccagctgatccgttatgcgggcggagaaggcatttccggtaactatatgaccgataatctgtatacggagtgtgcttattatcccgagagcaaaaaactggtagtcatcaataacagtgacaccgagcagaccaccacaatccctacggaagctggggcatatacggtaaccattgcaccatacgatacgacattcgtggagatcgggtaaccggtcaaggtgaccggatccgaagattctgtgcccgcttcctgtgggagcggaacgcaaaggagacggagaatggataacgaggaagtaagacagacagagtattttcctgacggaacccctatagacgactggttctatgagacgaagattccgcagctgtcagaacttggaaaacaatatgttctgacggaatacggaatctgggatgatggaaagatctataccaaagagatccagaaggtcattgatctggcggcagaggaaggcggcggtgtcctggtggtaccgcccggaacctatctgacaggatcgatttatttcaaacagggagtgaatctctatgtttccgccggagccaccttaaagggcagcaatgatatttcggattatgatttgcgtgagacccggatcgaaggagagacctgcctctactatacggcactgatcaatgcagacggggtggatggctttaccatgtgcggaccgggtacgattgacggtaacggtcttaaggcatggagagcctgctggcttcgctggaaatggggaggcggtggtaacaaggaggaacagcgcccccgccttgtctatctgtcgaattgtaaaaatgtcctgatcgcggagctgcgtttacagaattctcatttctggactacacatatttataaatgcgatcatgtgaaatacttaaattgtcagatctattccccggcaggaccggttcccgcacccagtacggatgccatcgacatagatgtctgtacggatgtgctggtcaagggctgctatatggaagtcaatgacgattctgtggtattaaaaggcggtaaagggccctgggcggatacccagccggagaacggcatcaatgagcggattctggtggaggattgcgtctacggtttctgtcatgggtgtctcacctgcggttcggaatccgtacataaccggaatattcttatgcgcagagttaagatcaagggagcagcgagactgctgtggctgaaaatgcggccggacactccacagcgctatgaatacattaccgtggaacagatcgaaggcagggtaaaggaattccttaagatttatccttggacacagttttttgatctgaaggaccgaaaggacaggccgctgtcctatgccgatcatatcaccatgcgggactgtgattgtgtctgtgatacattttttgatgtgatcgcggatgaagagcagtatcttcttacagattttacactgaaggatctgcggatccgggcaagagtggataatttttcagaagacaagttaagaagtgtagtatatgagaatgtacaggtggaagaaagtacggagcctgcggagaactggcatgaagtgaagggcttccaataataaatgctctgaggaagggagattaatatggcaaaggtgtatattaacgaaaaaaacaagaagggacatatcaacccggaactctacggtaacttttccgagcatctgggcagatgtatctatgaaggactgtatgtgggagagaattccgagattcccaataccaatggtatgcgtaacgatgtagtggcagcgctcaaggagatgaagcttccggtgctgcgctggcccggtggctgtttcgcagacgaataccactggaaggacggtatcggaccgaaggagaaccgcaagaaaatgatcaacactcattggggtggtgtgaccgaggacaacagcttcggtacccatgagttcttcgaactgtgtgagcagatcggctgtaagacctacatcaatggcaatgtgggaagcggtaccgtacaggagatgtccgagtgggtagagtacatgaccttcgatggggtatctcctatggcagacctgcgtagaaaaaacggcagagagaaagcatggaaggtggattacttcggtgttggtaacgaaaactggggatgcggcggcaatatgactccatcctactatggcaatctgtaccgtagataccagacctatgtgagaaattatgatcagaagcacccaattttcaaagtctgttgcggccccaatgcgggagatacttattggactgaaaatgtgctgaagacctgttttgaaaatgcaccggaatggatgcatggctttatggacggactgtccctgcattactatacactgccggaggatgactggtctcacaagggaagtgcactggattttgatgatgcagcatggtacaagactctggcaaaggcttttaagctggatgaactgattcaaaagcattctacgatcatggacaaatacgatcccgagaaaaagatcggtctgatctgtgacgagtggggtacctggtacgatgtggaacccggcacaaatccaggatttttataccagcagagcaccatgcgtgatgcattggtagcgggactttccttaaatattttcaacaagcattgtgaccgtgtgaaaatggcaaacatcgcacagttgatcaacgtattgcaggcagtgatcctgacggaaggaccgaagatgctgcggacaccgacttatcatgtattccatatgtacaaataccatcaggatgcggatctggtggaaagctatatcgatggcgtggaacagatcggagaagacgaaaagttcaaggttccccatttacaggaatccgcttccgtggacaaggacggtgttgtgaccatcaccctgaacaacctgtccatcgataaggcagaagaggtggagatcgctttcgcagagtgcgacccgaagcaggtaagcgcagcgattcttaccaatgatatgcatgcttacaatactttcgaggatcccgacaaggtgcacgaggaagtgtttacagattataagattgagaacggaaagattgcatttaccatgccggcatgcagcgtggtgatgttccgggtgaaataatgccaggcgaagaaataaggcagaaatacccctgccgaaaatgtctgctccgggagatggatcagaatgcctatatggaaagtctgtatgcgtatattgccaggctggagcccgggatcaaggcagatgagacaatttatgaaaagcggctttctgtatgtaaaagctgtaattacctgaatgaaggactgtgtggagcctgtgggtgctttgtggaactcagggctgtgatcgcccaaaatgtatgtccctaccagaagtggtaggggcatatttttgtatgcttcactattttaactgttaattcaactgttaatttagcgtaaataaatgcaaaaacaatcagaatatgttatactacatttgctgtacactaagcaatgagaaaacaaatgatagatacataggatattgcaatggaaaattaccaggaacagtataatcaggaattacatcagcaggagatacgctcaaacttgcagactttgaaaggctttttttggatctttgcgaccgttttagtgatctgggtactgacactgctacggatctttatcgtggatgccggaatttttacaatggcagtgggaatatctgcggtcataggaatccctatagtctatatttataagaaagtggacttgtcgaagcaatgggtcaaatatgtgttcctgacgctgatctgtatgatttcagcgatttttgctacttttttatcttttcacgcagttcttatctatgtgctgccgttgcttttggcagtgcagtaccgacagaagaggagtctgtggatcacgtatttcgtgaataatatcaccatgacgatcagtatgctggcaggattttatcacggtatatgtgatctgaacctgctgcttggaagcaatcatacaagaagctggtatctggagcagtggagtgcaggagctttacagtttgactttgagccggatccggtatttgtaatattgttctatggagcactaccgcggacagtgattcttctggtattcacactcatcctgcgctatatcagtatcagcagccatgaagatgcacaaaggatcgctgatctgacttatcgcaaagagacggatctgggtacccatgtgtataacaaaaataaatatgaggaaatgattgaaaactactatccgcaggtacacaggctggcagctgttttctgggatgtgaataatctaaaatatgtcaatgacaaatacggtcatgcagcaggagatgtactgattcagacattgtcttctgtattgtatgaattatctacggacagacgtaaggtttatcgcgtgggtggagatgaatttgtcatgatcattgagaatcctgtggattttgaaattgaatccatggtagaatcggtcagcgcagcactgcttgagcgggatggacagggtgagatgccgatctccagtgccgtgggctgggcagtaggctgtggtgtggatattcgcaagatcgtaaatgaagcagatactaaaatgtatgagaataaaatacgtggaaaggaagggagagaatagatgggaaactgggtgagtgcaggctgcggtgtcatagccaatgaactggcacaggctatggaaaaaagagggcagaagctgtatggtgtcgtgaaccgtacgcaggagaaagcagtagcttttgcaaagaaatacggtgtgcagaatgtatttacaagttttgaggaggtctgtgcggatcctgcggtggatatcatctatatctctacgcctcataatacgcatattcaatttttacgaaaagctctggcagcaggtaagcatgtgttgtgcgagaaatccattacgttaaactccgaagagctggaagaagccatgcagctggcgaaggagcacggcgtagttctggcggaagctatgacaatctatcatatgccaatctataaggaattgttaaaacgagtggatgcgggagacctcggagaacttcgcgtgatacagatgaacttcggaagctataaggaatatgacatgaagaaccggttcttcaaccggaatctggcgggcggtgcattattggatatcggcgtatatgcgctctcttttgtaagaatgttcttaagctcccgtccggatcagatcgcctctcaggtgaaatttgcacctacgggagtggacgagcaggcggggatccttttaatgaatccgaaaaaggaaatggcaacagtgacattatctctgcatgccaagcagcccaagcggggcatgctctcttttgacaaggcttatgtagagatgtatgaatatcccagaggacagaaggcagtgatcacctacacggaggacggtcatactgaggagctcctggcaggagccacagcggatgccctcgtctatgaggtagaggatatggagcgggcaattgccggacaaccggaggtcatgaagttgaattatacggaagatgtcatgcgcatgatgacagagatccgaaaacagtggggactgacctatccagaggaagagtagaccaggaaaaaatctgataacagtattccggcggtaaaaagagccgaagaaaatatgaccaaccgtcggcatgcagggagaatactgatgatacgaaacaagagtctggggaagagacttctggcggcggggattatgctgatatttagtatgagcggctgcggaacagacaatgagatagagttaacagggaatggaataggaagtgatggaatagaagctgcggcaacggtggattctgctgaggtgaccgctgccggggaaacggcatcggatgtcacgggtggagatgctgcatccacaggaactgcggaggatacgaataaaacggcaccgactcctgccccggcgcctcggaaggagcttactactgcggaccgcatggcggaccggacgaaagtgaaaggcatctatgtcaccggtcctaaggccggcagcgccggaatggaggagctgatcgggcttgtggatgagacggaactgaacgctatggtcattgatgtgaaaaatgatgaaggaaatgtgacgttccggctgacgaatgaggagattacacagaacattcccgtactggaccagatatccgaaatgcaggcaggagtgcgctacatccgggatattcaggctttgatgcaggaactgaaggatcataatatttataccattgcgaggatcgtatgtttcaaggatcccattctggcggcggcgagaccggaactggcattgacgaaaccggacggcaagccggtgacggatgccaacggcctggcatgggtgaatccatacaggcaggaggtctgggaatatctgacagaacttgccgagatggcagcagaccttggattcgatgagatccagtacgattatgtgcgttttccggtgggatcagatgccaatgtggcggactacggtgtggatatggatgcctatccgaagaggcaggcaatacaggattttcttgcctatgcaggagacagactgcatgaaaagggatgcgtggttacggcggatgtcttcggcactatcatcggaagtgagaccgacgtgcagacggtagggcaggattacacggcgctgggacagaccgtggatgccatcagtcccatggtgtatccctctcattatgcgaacggggtattcggactgaaggtaccggatgcgaatccttacgagacggtatcggcggcaatgcagggttctgtcgaagaactgcaggagattccggaggcagagcgggctgtggtgagaccctggctacaggcatttaccgccacctgggttccggggcatatttcctataacggaacacagatcagggaacagattcaggcagtctatgatgccggttatgaggaatggatcctgtggaatgcaacaaaccgctattcggcagagggactgcttggtgcagacgaggtagaggataatgaaaataatcaataagatcatgatagggattgcagtgatctgcctgctgttatgtggcgggatcctggtatttgcactgaatccggatatgaccaatgctctggcacagaggctgtatggaaacggaaataatgcggagactgtaacagagacagcagaggcaatcggaaatcccagcaatataggtacagatggaagtgtttcggtaacgctgccggatcagcctgaaaacagtctgagcgattacatcaatccgaatccccaggaacccctgcgatatcccggcggtaataccggaagctccgacagcggcacagcagccacaccggctccccgaagtgacgctgtgacggatttaaactcttattatgcgaactgtattacacagttaagcattctggggagcggagatcagcattttgacaatgtggtttccaagagtctgtggagtaccattgagcaggcgtataataccggagcctacgagcagggatatgtagcggaggtgctgaaaaagcttggcatggagaactttgtgattcagctgcagttggtagacctcggggatgggtattacagagtatatcacaacgtggtgacctactaagaggaacgtacaatatttataaaagtgagaaacaccgatatcttaggctatcggtgttatttttaaatataaaataagaatcattactattattattgacagataattacagttacgctataatcagggtatgaaatacataagagatacgaaaagagaaatacaaagtaaataaattgtgttatgtaagagatactaaaagaaaacaactcacaggagaaaaggagaagttatatgaatcataaggcaatgtacaagttaagctacggattatacattgtaaccacacgggatgcagagaagataaacggttgtatcgtcaataccgcgatccaggcagcttccactccgaatcagatctgcatctgcattaacaaggcaaactatacccacgatatgctgttaaacaccggtgtatttaatgtatccgtactcagcaggacggcagagtttccactgtatgagcggtttggttttcagtcaggcagagaagtggataaatttgcggattatacagcatataaaaatgcagagaacggcgtgccctatatcacagaaggcactaacgcatacattgcagtgaaagttactcagaccgtggatctgggatctcatactatgttcatcggagaagtgacggagatggaagtattaagtgaagagccatccgcaaactatgagtattatcaggaaaatgtaaaacccaagccggtagatacagggaagactgtggacggtcagacagtatggcgctgcaccatctgtggctatgagtatgtgggagaggaactgcccgaggattttatctgtccattgtgtaaacatccggcatctgattttgaaaaagtgataaagtaaatgacaggaggtcagaattatgagtattgacagtagaaaggtagttgtagtgggctgcggatttgtgggatcttcttccgcgtttgccctgatgcagagtaagcttttttcggaaatggtattgatcgatgccgatcatgatcgtgcggaaggagaagctatggatatcagtcatggcatggcatttgccagccccatgaagatctatgcgggtacttatgatgatattacggacgccgcagtcattgtgatcaccgccggtgccaaccagaagcccgacgagacgagactggatctgatccggaaaaacagtgccattatgaagtccattatcggggagattaaaaagagaccctttgaaggaatcctgctcattgtctccaatccggtagacattctgacttatatagccctgaaggaatccggctatccggccaaccgggtcatcggctccggaacggtattggataccggtagattccggtatgaactgggagaacatctgggagtggacagcagaagtattcatgcctttattatcggcgaacatggagacagcgaactggcagcctggagtgaggcgagagttggtggcatgcctatcaacgatttctgtgaactgcggggacattatgaccatgaggcatccatggagaaaatatttaacagtgtaaaaaacagtgcctatgagatcattgcgagaaagcacgcaacctattacggaattgctatggctgtatgcagaatctgcgcagcaattgtccgtaatgagcagtccattctgccggtatccagtctgatgacgggagagtacggactggagaatgtggtgttaagcattccggcagtggtggatgaaaacggtattgagacggtggtgcccattgaattaaatgagaaagaactgtcagaactgcagcaatcggcaactgtattgaagaaggtgatagcggaattttatccggattagtctaaaggttttaataatgtgaaatgactgcgctgtgtctgcaggatcccaagctttgtaagcttgccgagttccgcggacatggcgcttctttctactcccagataatccgccagttcttgacggttgaaggagatggtgaaatcgttggaacctttcatttttgcctgatcggtcaggtacgccattagtttttctcgggtggttttgcgggaggtatatttgattttctggttcagatacatgttgttttgtgccacgatccccaagagattgcggatcagggtatggtgaaactcacagccgttgtcacaggtatttaacagttttttcccatttaaaaacataatattgcaatcctccgcagccacgatatccacaggaagatgaggaatcccggcacagacaaaagcctccccgaacagggagccctcggagatggaggcagtaatattacggttgccgtagtaatcgtcctgtaatacatggatcgaaccggactcgacaataccgatgaaatccgccggatcgccggcatgcctgatatactcctcctttggataggattttgtataggcgtgcaggcgcttcagcataacggggatatcttcaggtaaaatattctgaaagagaggattgtgcataataaattctccttttgttggaaaaccaacatacttgatgggatgattctagtataatcccctcagaaagtcaaggagagttcaggaaaggaaggataacgatgtataaaaatattgaaaaacagacgaaattaaatctgaaggagctggtgaaataccaggaggggcaggtagtcagcaagactcttgtacagaacgactatgtgagtatgacgattttttcctttgacaagggcgaggaaatctccacccatgcagcaggcggtgatgctatggtaaccgttttggaaggcaagggcagattcaccgtaggcggcgaagtattctacgtggaagagggcgagactctgatcatgcccaaggatatccctcacgcagtatacggtgaggagagattcaagatgcagctgacagtatctttctgagttgtagaaaaaatgcggttttcttttgaggtttgtgcaaaataccgtttgtttggatttctttgttggaaaaacaacataatgaaattctggattttgcaatactgatcttgtgatgaaatataggacgaataattaaggtcagatgtttagaaaagtaacggatgatttagagacaagctaagagcatagagaaatcgaggaggtaaacatgatccgaaaaatcattcatattgatgaagaaaaatgcaatggctgcggtatttgtgcgactgcatgtcatgagggtgcgatagatattattgatggcaaggcaaagctggtcagagagcatttctgcgacgggtttggcgattgtctgcccggttgcccgacgggagccattactttcgaagagcgggaggcacctgcctatgatgaggcggcagtgaaacaggcacagcagttaaaacaacaggaaaaaatgcagcgggagggtatgcagattccacatggaggatgcccaggaagccgtattcgtcagatgaaccggaaggaagatgcagctaccgtgacagaaaacagtaacgccaatgacgtaatcaaatctcagctgtgtaactggccggtacagatcaaactggcaccgttgcaggcaccctactttgacggagcgaagctgctcattgcggcagactgtaccgcctatgcttatgaaaattttcataaggaattcattcgcggaaaagtcactttgatcggctgtccgaaactggatgcagtgaactacagtgagaagctgacggagattctgcggaacaacgatattcagtccgtgaccattgtgcgcatggaagtaccctgttgcggcggcctggaaatggcggcaaaaaaggctatacaggacagcggaaagtttctgccctggcaagtagtgaccatctccattgatggagagattcaggaataaaatgtttttgctgaaagtaagtgtctgaaaaaggagattgtatgaaaatgcagggagacagcatcatcagtgccctgatcgggttggtgggagccgtatcaaataacggaaaaacagagcagaccgacagcgtgatccgggaagcgtttctgtgtttgacggacgcaggcagtgaggaagaaatggtacagaagatacatgcggagaaattcatcattgcgccggactgtgccacctgcctcaatccctgcggcaatacttcagattacgatatggcgcaattttatgcagcagatgcgaaggtcatctctgcgaagcgggatctgatcgaaactgtttgtaaaaagctgggttcgtcggaaaatgtcccggaggatgtttatcagggaattgcctatcttgggtatgatctggaaccggaggcttatacgcagatacagcagaagattatgtgctaagatttgattcaataaattgagagttagttgaatacattggcaaaatccacgaactcccggagcatgcgatacacatgtctcgatgtaaggtctccggatgtgaattttctacga

SEQ ID NO: 11323 - DNA, 3383 bp, Unknown
  gut microbiota DNA sequence
tttttgtattttttcagcccaaaatagcgattttaatacaaaaaagcttgcctcttcacacacagtataaagtcaaaaacaaaaacagcgacttgtgagcaagcacccaatcacggttcttattttgcctatgcgcggctattctttcgtaactctcaagttagcaagttcttaaaaattctactatttataccaaaatcagccaaaatagaagaaaaatgcatctgtaaataagtggatttttgaaaaaatattgattttgcactgcatagtggaatatacttcttaaaaagataaattcgtccactattttgtctagtcatgccttaaatagtagaatttaggatgcataacaaaagagacagcgttatttgcaaaaagcggaaactaaaatagtaaaaaaagaagatataaacaacttgtaaggagaatcatctatgagtgatgcaattcctgtgaacagaataaagggcgtgggagagaagacggcggcgctgttcggcaagatcaatgtctataccgtagacgatctgatccgccattatcccagggattatgagacttacgatgctccggtatctgtccgtgaagcagttcccggtaaacttcagaccatctacggtcagatcacagcaattcccaacataaaaaaagtgcgcaacctgtcgatcctgaacgctgtattgaaggacagcaacggggaatctatccagcttacttttttcaatatgccttttttaaaaaaagtattaaagcccggcggattctatctgttccggggtctcatacagcagcggggaattcataagatcatggagcagcccaggatgtttacctgggacgagtatcagaaaaagaccgggagactcctgccaagatacgccctgaccaaaggtctgaccaatcagacggtgcagaaatctgtggcacaggcgctggaatactatccaccggaaaaagaatatctgccgcaggtgatattacagaaatatcccatgctttcccacagggaagctgtctatgccctgcattttcctgagagcagagaggaactgttaactgccagaaaccgtatggtattcgaagaattcttctcctttttactggtacttcgcaaaaataaggaattggcggcgaagacagaaaaccattttcccatgtacgagactgcggatacagtgcggtttttagaacagttgccgttcccgctgacaaaagcccaaaaaaaagtctggggtgagctcagggaggatatgggaagtccttatgccatgaaccgactgattcagggagatgtaggctccggtaagacgatcctggctgtgctggcacttcttatgtgtgcggctaatggttatcagggagcaatgatggctcctactgaagtactggcagtccaacattttgagaccatttcaggctatgtaaaaaaatacggcattgctttccgtcctgtgcttctgacaggctctatgacggcgaaggagaaacgggaggcttatgcaaaaattgcttccggagaggctaacctgatcatcggaacccatgcgctgatccaggaaaaagtggaatattcttccctggcgctggtagtaacggatgaacagcaccgctttggtgtaaggcagagggagacattagccgccaaagggagtgagcctcatgtgttagttatgagtgctacgccgattcccaggacattggccattatcctatatggggatctgaaggtctctgtcattgatgaacttcctgcgaatcgtctgccgatcaaaaactgtgtcgtagggactgcctatcgacctaaggcttatgaatttatcgcaaaagaggtggctgccggcagacaggcttatgtcatctgtcctatggtggaagaaggggaatcggaagacctggagaatgtagtggattatacagagaagctccgggcagctctgcctccttccgttcaagtggcttatctccatgggaaaatgcgcccggcagacaaaaaccgtatcatggaagaatttgctgataagaagatcgatgtcctggtctccaccacggtaattgaagtaggcatcaatgttcccaatgccacagtgatgatggtggagaatgcggagcgcttcggtctggcacagctgcaccagctgcgtgggcgtgtgggacgtggggaattccaaagctattgtatttttatcagcacttccgaagccaaagagaccatggaacgattacagatcctgaaccattccaacgacggtttccatattgcttccgaggatctgaaactgcgaggtccgggagatatcttcggcatccggcagagcggtgaatttgcatttgtactgggtgatatatatacagatgcaaatattttaaaagaggcttcagatgccgtagaacagttgcttgtatctgatccggagctgacagatgacgacagtctggcattggtgaactatttcaaagaacataccgcagtaaatgttgttgactttcggaccatctgacagtaaaattatttttatgttcaaagttttatacttaggatcagataatttatgttaatttatgcaaagggaaggtttagataccagaatgtcaaaaatcgcaattgtaaccgacagtaacagcggcattacacaggcagaaggagcccgtcgcggaatccatgttctgcccatgccttttatgatcgatgaagtcacatactatgaagatattgacctgacacaggagcagttctatgaaaagctgaaatccggtgccaatattgccaccagccagccgtctcctgacagtgtcaccagcctgtgggacaagcttttacaggaatatgacgagatcgtacacattcctatgagcagcggtctgtccggttcctgtcagagtgccatggcctttgcggcagattatgatggcagagttcaggtcgtgaacaaccagagaatttccgtcacccagcgtcagtccgcactggatgccctgcagcttgcagcagccggtaaaaatgctgcccagatcaaagaatttctggaaaacgataaattcaacagcagtatctatattatgttggatactctgtattacctgaaaaaaggcggacggatcactccggcggcggcagccatcggtaccatgcttcgcctgaaaccggtactgaccattcagggtgaaaaattggatgcttttgcaaaggccagaaccacctcgcagggcaagaccatgatgatcaatgctattaagaaggacatcaacgagcgtttcggcggcatgacagaggacaagcacatctggctgcagattgcctatactcatgaccgagcagccgcagagcagttccgcacggaagtggaagcagaattccccggctatgacatccatatcgatcc

SEQ ID NO: 11324 - DNA, 14105 bp, Unknown
  gut microbiota DNA sequence
aataaggaaagttcaggaaatctctccacaaattccgatttgttaagctatctatataatatacaatatcatctctctctgattattacaataccgaccgccctcgttagttttcaggtctaacgaaagtggtcggtacataaaaaagcattattatttttattccactgcttccataaagtaaattcgggaggaaaaatccgggaacagtcgggtgtcggaattatatccggttccggcgaaagcgggtttcagggtaatacccgcacgcatcagggtatctccgtaagcagtcagttcttctttttccccatccatatttacaaatcgcgaaagaatctcctgtaatgcagatccttgcttgatatgaaccggagaaactgtgttcacaaggtctccgaagtctttcagattgtatttgatattcctaccgtagaaatgatatttcacatccggaagtaaccccaccgggcgataccagtcatgggattggttcggagttgtcaggcgccggaagaacagtcccactgctcttctgccatccggggacacgcaggtccaggataaggtttccgagtcggaagcttcgttttctgctccacgataaaaggatccaaactggaaaacatcccgccattttttataaagtgcaatctgctcccggattgcgttgaggtcacttccggacagatcctttaaattacattcatatcctaagacaccgaaggaagccacctgaaaacgggtctcaaggggcgtgatccttaaggtctgatgatttggacaagatgacacatgtgctgtaaataccgataagggatatccatagctgtaactgttctgaatcccggtacggcacagtgcgtcagtattatcgctcgcccagatctgcgggaaataacttaatattcccagatcaaaacgatttccacctgaactgcagccttcaaacaaaatttcagggaaacgtgtggtcagctcattcataatgtgatacagccccagtacatagcgatgtgccgtctctccctgtttcgcagcaggaagataaggggaataaatatcactgaaattacggttcatatcccactttacataacggatgtctccgaaggaaaataccttcgtcatggaatctattacatattgctgtactttgggattgcacagatccaagaggcgctgattacgtccctcggagtgaggatgtcccggaatcatcattgcccagtctggatgttcttgatagagacggctgttttcgctgatcatctccggctctacccagagaccgaaatccacccccagggctttgagttttttactgagggaagcaattcctccgggcagcttcttcggatccggttcccagtctcccagggaggaagtatcgtcattccgcccggaaaaccacccgtcatccatgacaaacagttcgatgccgacatctgctcccacttttgccagctgcaacagtttcctctcatcaatcttaaaataacatgcttcccagctgtttaacagaaccggacgaggtcttctcttccacactccccgcacaatatgctctctgataaaggaatgtaactgtcggctgagtccgccataaccattcgaagaatagctgaaaacagcctctggtgtatcaaaatgcgtttccggagtcaactccatggaaaagctctgtggattgatcccacttacaaagcgaagtttcccataagagtctttctcaagggcttcataatgatttccactgtagatcagattgcagccgatacaggagccgaaagtctcacaggtgttcttatgtcccaggatcataaaaggattcgagcggttcgaagaggttcccgtataagacgcatttataaatttgccggaacgtaaggaaatctgttctctgtgcatctctcttgcccaggcaccgctgaaatgagtgatcacggaataatcctctgtcagatctaactgtgcactgaggcatcgatccaaggtgacagatgcgtcactatggttgatcagccgtgcactcctggtaatgacatcacattcttcgaatacggtataaaacagctggaactccaaatgattcataacatcctgcaaaataatctgaaggcattccgcgtaatcagtttccgcttccgaataactgtgaggaagtccggaatcctgcaggcactgttctctttcctttaaagtaataatttcataggaatcaaaagtaaagtcagaggtgacacttccgtcggcaaatctgacttccagaaaaggttctctgatatctccctttcccaacgtaccaacttccaagcagacatcttccatggagatctgcggatgttccctgtcataggtacaggtatttcccggagcgaaggctctctgtatgacaaggggcgcgcaggaggcgggatcctgtgaatccacagtgatacgttccccgtaatacagatgttctaaatgtccggtattcatgatacgcattccgtaggttgtgtgggcagtctgtaaaaagaaccatggtctcgtatctgcatcttttacaatctgaatcatgcttttaagcctcctgaatctcttttaaccgttcttcggtcagctgatatttcttatgaaagaaaatgacaccaatgataaggagcagaatggggaacagtgtcatagtcatacgaagtcccaccacagagcttccggaagctcctgcagttgccactgcatcgctggtatcagagcttaagttgcagaggttcaggcacagggatgccactaacgcagcaataccggaagccagttttacaacgaaggtctgcatggagaaaatgacactctcgtctctgcgatgatttttccattgaccgtaatctacggtattggctaaaaatacagtagtcagtactgtcagcataccattggcggcaaagatcaggaagccgggaatgaacaataaaaaaacagtacgcatattcgtaaaacataaaagaagcaatacagcatatccggcaattgccatcaggaagctgacatagaagatccggatggtactcataaacttacgaagtaacgggaacaaaagcatcatggcgagaatctgtactgccccgccgaaggtgttgaacagtgtataggaattgtaccaggtatctccgccaaaatcgtatttaaagaaataaattaccaggttggaggtggtatagatcgcgcagttgatcagtacgatggtaatgaccactgccatcgcctgatcgttctgaattaacgccttgaacatttgaccgatggaaggtgcgtccacatctaccgtagatttttccttgatattaatacaggtaacagcaataaatatcacgaacagcgcggcaatgatcagggtgaaccgggaaaaaccgacccgctcttctcctccacccagggcattgacgcagagcatggtgatcacggtgatgatggcagagccgacaccggcgcaggaacgtcccaacgtagacaatccttcacgctcttttccgctgtgagtaaatgccggtatcatggaccagaagggaatatccatcatggtataggtcacgccccagagaatgtaagtgactgccgcataagctaccagtccattgccatccagtgcaggtggtgccgagaacatcagatacagaacaacggcattggtcactgtgccgatcatcagccaggggcggaacttcccccatctggttctggtctttgccacgatgacgcccatgaagggatcgttaaacgcatcgaatactcttgcaaccagcagaatgatacccatggctacggcgttcacgcctaaaatatcctgataataatacaaaatatagctggcagacagcatatataccatatccttgcctaccgcacccagtccataagaaaatttttcttttccacttaaacccataatgtaaccctgatcctttcttatgcaatcttttgaaatcctttgaaatctttctctcaaatgaaaccattaaatcgttatatcataagctcacgaattcgtgctatcgcactctgcatcctgcttcgcaggatattcgttcgctaatgagcccagaaaaacaaatgtctgctttgcagccacttgtttttccttgaggctcattaaatcttaatctgaaaaggtatccgtatttcccctgccgtctgtgactgcagcagcaaagctccccgaccggatcttcccgtactcttaacataagttccacccatgcctccctgtaaagcaatggtgtcaggtccgatgatggagatgtcaccttccgtaatcagacgaaccggctcctgataaaagggaagcacatttccatggtcatccactgcacggatccgcaccagtgccacatcataggtgtgctgttccgtcagaatggtatgatccgcttctgcttccagccggatttcgcgaaccggttctttggtgacggattttacgactttgccgtctttgatagcgtcaaaccggtatatggtagccgtaccgccccagtcaccgatgtacttcgtatacagtctggtcacttccgcaaaatcgatatgatagatcagaagcagttttaaagccgtaagatataatctctttggaatgtggttcaggcttcctcgcgctacgagattcatggcatccgtgatctccttggcatgtttcggacggaatctttcgttctgtgcaagagaatctccgataaaatcatcgatcaggatgggaccgtgctttaagtgcttataaggtgacatttccggcagatattccttgataaaacggtcgtttttgtacatcttcacgctgtctgcattggacagaatgtagatgttgccgcggttacagccgggatgctctccgatatccatggaggaagtgatctccaatacaggagtctgttcctgctcacaggcatagatatttgatgccagcttcggattccggaacatatccatgacaccatgataacagatccggtcaccgcttccgaagtctttgtgggtgttgtagtcgaacatgcaccagccgaagcttccggcgatatcggactgacctgccacagcatccagtacattggcgtggcggatggcatgctcactgcggcgctcttcgttgtcgaaggcctttgtgggatacatatgcccgttgtactcactgatcagataaggcttctccatatcagatgtgacttttttcttcggatcacagccgggcatctcaccgtcgtgcagaaaatcattatacgtatagacatcttctaacagatgactttttttcatggcacggacaccaccggtaggtcttgatggatccagcttatgtgccacggcattggtcttttcgtaaaaagcatcgtcatccggtgactcattgatgcgtattccccataaaatgatggagggatgattacggtactgtcggatcatgtcttcggcatttgcaaccgcctgtgctttccaggaatcatctccgatatgctgccagccggggaattctgtaaatactaaaagtccaagctcatcacagcgctctaaaaaataatggctctggggataatgggaagtccttacggcatttaaacccagctcctttttcagaagatccgcatccaaccgttgcatgctcttaggcatggcatatcccacataagggaagctctggtggcggtttaagccgcggatccgcaacttcctgccattaagataaaagccgtcctttttaaatactgcttcccggataccaaacgtggtctctgtctcatccaggagcgtattatcctgatatagttgtgtctttaaaatataaagattggcttcttcggtgtcccataacagaggagcggtaatggttgccgtgagggagaactccttgtcgcaggaaacatccgcagaaacagtctgctcgcacaaaagcctccaggattcctgcgcggttgcggtacttttgggcatgtagtactgtcggatggtcacgttctcatcactttccgtaagcgtgatctcagaggtgatctgcgctgtcacaggagacgatctgaaatctatcgctgtatggacgaagatatccgaaagggagactttttccttcacttccagccggacatcccggtagataccgccataggtcatataatcgatcacatagccaaagggcggaacgtttaaattctctctgctgtctaagcggacacagagcagattatcctgtccatagaggacattgtccgttaaatctacggtaaatgcagtgtaaccgcagtgatgctctcccacctttttcccgttacaaaatacagtactgtcatgggcagctccctcaaaagtaagcaggatccgttttccctgccagtccgcaggaacctgcagatggcgcctatagccgctgaccatctggtagagggattcgtcaaaataatgaaacggggtctccttacaggtatgcggcagacgtaccggctgcagcgtgttttccggatattccggtgccgctaaactgtcttcaaactgttcagtgaacagccagtcgtcgtttaagtaaaatctatgtgtcataagttattctccttttttgcctgtgtatttactgcctctgtgtgattccgtacatgagaatagttacgacctcgtttaaggcgtccacataagtcagacggttctgcgcgaggatatctctttggaaaaactgctcaatggaggcttccagcatcattttcaccaggcagatgggaaccgggcggatactgccctctgccatgcctgtctcgatcagctggatcgtaggctcccagccggtctctaagcgaagctctactttatggtagatcttaggatatttgtcccgtagggaatagagctttctgaggtcaatattctgatagccttccggaaggacacctaagatgcgctgcagcttttcgatggttcccagcgcaggatccgtcaggatcatctgttcgctttccttgatcgaatcaaaaatataatctaccatggcaaggaacagtgcttctttatcgtcatagacggtgtagatggtctttttgctgatggaaagttcctttgccaggtcatccatcgtgaacttcagccctttttgatcgaatacacgaagggtggcatccaaaatatttttttgcagagcatctgtggtatccataggttttcctccgtctttagatgagaattatcatatatttccttggaaacgcaaatgcaaaaaatagtttcctttgatacaagtgtagcattttgcaggggaatattcaagaaacgtttttactaaaaagagtttcctgaaattgtgaaatataacaaaaaaccagccaaacgagtgttgactggtttataagcaggttcttatatttttttccattgttccgccagggtggggtgggactttttacgggtgatctccaccagaccaagtggtgtcatatccacgatccgaggatgcattggatccccggcggtcagcgttttcaggtagtccagcagtttctgacgattttccttttctgccatattgatgaagtctacaataatgataccggacagattccgaagacgtaactgtcttgcaacctcttctgccgcttcggcattgacctgataataggtctcttctcccatcttcttagattcatttttgccggaattgacatcgatgactgtcatggcttccgtgggctcaatgaccagatatccgccgcatttcagccagactcttgtatccagtgcctcatccattccccgttcgagagaatataaaagacgcagggaaatggcaggatcatcatacaaccggaggttcttctgctgtaaaagcggatgactgctttcagaaagcttgtggaagatctcagggtcatccgtaaggacttcactgtattccgatggatctgccaactgttccaatgcctcgtagatggcttcagaaggcgcaagaagacaggtaaggcatactttatggattgcctgatttaaaaggctctgaagggcttcagatgcgctctcaggggtggctccgtttttaacaagctgttgcttcatccgggaaagatctgtggtaacggaagcccgctttgtcttctgggcatctctggtgaccatgactaccagttcatctccggcttttaagcttccgtccggctgtctgttggtaggatgtgccgtacctgcttcccgtagtggcagaaagcacagttccccgggcgcaatctccacgaagcaggcatcgatgtttttcgccacattctgtatttttccaaggtagattccgccaagcttactggcattcgaacgaagcacccgcacagcggcaattccgccggagttcacaagtaatgccacatttttatcccgaagcttcgtaaagatcattttcccggtagtacagtccgtgctcttacggatctcatttatttctttttctcttgccggtctgccgccggtgagactgcggctcattcgctatctccggaagccgctttgtaagcttcttcgctgtcataaccgatggcgtctaagggaagcagttctccggcatcgcttcttaaataggtctcttctctgttgaccataagggcattctcagggagggggtctccattttccgcaaataatgcctccactacctgaatgggcttgatattgccggcgctggatgcatctaccaacagatacaggctgttaccatccacagctttcagctcatagatgccttcttttaaattgatttcccggctgccttttttggtctccttggtgatcaggatctcgtcctttttaaggaagcgttccactgcaggtgccagatcaaaatgaggacctctgccctcccggaaggttacggtatatccggcggcagccacacttgccatggcattgcccgccttatccggcaggatcttcacggaagtgatctcaatgccgggtacggatgcggcattgagccgtgtcttaacattctcgcaggaagtcagggaatgtacttccagatccatatattctccgttgctggtcagtcccacgcctaagggtgcggcgaaggacatgatttgatgcgggctgaagcctccggtgtatgctacatccagctccgctctgcggttggctttctggaaaaagcgcatcacatccagatgaccgataaatcgtaccggtccgtatttcttaaacttgattcttaatttcataatatctgtcagatttctatgcggtctttcttgaaagacctgcacttccctttcttcttattcttcaatattcaataacgtgccataagggtgtgtctcgtacgatcagtcgctgggctctacgcagataccgcatccgaatctggcggcaccgcagccctgacatgcctgtttgcagttcggggaaatcgtctcatttttcgccttctgccattctctctccaggaaagaacgggagacaccgcagtccagaaaatcccagggcaggatctcgtccaagggtcgttctctgtgggaatagaaatccggatccagaccgcaggcagcgaaagcttccatccagacatcattgtggaagtattcgctccaggcatcgtagaagcagcccttgtgataaacatataaaagcacctgggacaatctcctgtcgcctcttgccagcacaccttctaagacgctgacatccgcttcgtgccagttgtacttgatactcttctggttcaactgttcggagatggcttttctggtcagatatgccttttccacgaattcttccttggtacactggggtgcccattggaatggagtaaagggcttcggtacgaagaaggaagtactggtaacgatctgtactctgccgttgacacgtttctccttcgggaccgtatcaaagaaggtggctgcgatcttattggacagttcagcgatgccgcggatatcctcctcggtttcggtgggatgtcccagcatgaaatacagcttgactctggtccagccgcccttgaaagccagcgcggaaccatgcaggatcacttcttccgtcaatcctttattgatgacatcacgcagtctctggctgccggcctccggagcaaaggtcagactggattttttcacatcctgtaccttactcatgacatccagggaaaaggcatcgatacgtaaggacggcagggagatattgatatgtctcttgttgcattcttccatcaggaaatcaatcagttccggtagtttgctgtaatcactggagcttaaggagcttaaggagatctcctcgtgaccggtatttttcagcatctccatggcgtattttttcaatacttccacgtcacgctctctgaccggacgatacagctgcccagcctggcagaaacggcatccgcggatacagcctctctgaatctctaagaccactctgtcctgtgtgaccttaatgtaaggtaccacgggcttcatgggataaaagctgtcggtcatatccgtcaccagttccttgcggatcgtagcggaaatcccctcttcggtcggtcggaaggaagcaatggtgccgtcctcatgataagtagtttcatagaatcttggaacatacatgccgggcagcttcgcggcacggcgtaagaattcttctcttcccaccttctctcctctgcactttttatacagatcgatcagtggacgatactgggtctcgccttcaccgatatagaagatatcgaaaaagtctgcaatgggttccggattataggtgcagggaccgccaccgatgacaatgggacaatcatccccgcgttcttctgcaagcagcggaatctgtgcaagatccaggacctgcaatatattcgtataacacatctcgtactggatggtgattcccaggaaatcaaaattcttcaccggatcctggctctccagggcaaacagagggatattttccttacgcatgatggcatctaaatccacccagggagaatagactctctcacaccagacatcgtcccaggagttgagcatgccgtacaggatctgaatgcccagatgggacatgccaatctcgtagacatcggggaagcacatacagaaacgcacatcaatgttatttaggtccttcaccaccgcgtttacttcgttgccgatgtaacgggcaggtttttcaatcttcatcagaatatcatcgcttaatgctaatttttcgttcataactacctcaaatgattattataatgatctctctcaaattgctaataactattcaatacatcattataccttaaaaaaaacagttctgccagtaccaaaaggtacataaatataaactgcaaagcatggtcatgtagggagggatatttttggaaacattggatgataagaatacagcacaactgctgcagcaaatgcgcagacagacagaaataaggccggagcaggaagaatccagtggttccggttgttctcataccgggactttcagaatccgtcttgctctggccggagtattactgcttacagtgatattgctggaccgggaaaataaaagctttgccggtctgtccatggatcaggtgctgtcttacgttacggaggtagattacggaacatatatcgagacctggatggaaaatgcggttaacgatttgcaagctctgtagtgatttcttcccaggtgacatctttttctgccatcaggaccatcatatgatacaggaaatcactgatctcatatttgacctcattggggttaggatttttggcggcgatcacaatctcagtcgcctcctcgcccagtttcttgagaatcttgtcaatgcccttgtcgaacaggtaattggtataggaaccctccttggggtggaccttgcgatccttgatcacatcgaatacttcctcgaatacctgtaaggggttgctgctttcttcgtaatccttttttgtgatctcgttaaagaaacagctcttgctgccggtatgacaggcaacaccgatctgtgataccttagcaaggattgtgtccatgtcacagtcagccaccagttccttcacatactggtaatgtccgctggtgagacccttcagccacaattcctgacggcttctgctgtagtaagtcattttaccaagcttcagagtctgttcataagcttcctcattcatgtaagccatcatcagaacttcctgagtacggtaatcctgcacgataacaggtaccatgccgtcactgtttttcttgaaatcttcccacttgtaagcagcctggaaggattcaatgggaatatcattttcccggcacagatccttcaaggcaacgatttctttcacattgtcattgatggtattaccggtgacaccacatacattttcatatgcgaagatctctaacagcttgtttaatgctacctgattgatctgcacaaaaaagggaagggacagaatactctgcgtctcccggatctggtgaggattcatcaggatcatggcagagatatacttttcaattttatctttatgtaattccagaacggcgggatcattataggagatcagtatcttttccttgccaaatttcagggagacttcttccgtgatctcaatattactctctttctcatagtcgagaaccgcttttttacatccggcataaagtaatttcttaatgtcctccatgcgctttacattgccggcaccgatgacatccacttccgctttggtgcagatttccttgatgatatccaacgctgcctcatgctcggcgtctccttcggacatatcgaatacgatcaattcatctgcattgtgctcacaataaaaatctgccagacgtactgggtcggtattcacgatggtggtatccgtaaggtttcttaccgcatgctcatgatataaataaatacaggggacaaatttcttgatgatcatagtaatcctcgcgttttctatgcctgcagggtacggaccacaggcacgtatttttttacagacttcctttggtacttaatacatccgttaccttcggattataggaaacggcctgatccagtgctttggcaaatgccttgaatattgcctcgatcatgtgatgattgttaccggacgacaacattttgatatgtagattcattccggcactgtaagacactgcatagaaaaattctttcaccagctcggtatccagctcgcctaccttaggcaccgtgaattcacattcaaaattaagataagggcgaccgcttaagtcaacggcacacaaggcaagcacttcatccatgggcaggataaaataaccataacggttgattcccttcttatctcccactgcttttttgatggcttcgcctaagacgataccggtatcctccaccgtatggtggccatccacctgtaagtctccctttaccttgcagtccagatcaaaaaagccgtgtctcgcaaagccatccagcatatggtcaaaaaatccgatgccggtagacagatttgcttttccactgccgtccagttttaaggtgacggcaatgtcggtctcttttgttgcacgggtcacagttgcaattcgttccataatatccgatgactcctttcccaaaggaaacagttaatcttcaaaccttactttaatactgtttgcatgtgcggtcaagccttcgctttttgcaaaggtttcgatctggttatgtactttctccaaagcctgtctggaataagaaatgatactggttttcttgatgaaatcatctacatttaccggtgagaaaaatcttgcggtaccgttggtgggcaggatgtggttcggacctgcaaaataatctcctaaaggctcggaagcatactctcctaagaaaatggcaccggcgttgcggatacgtgtcatggtgtcaaagggatttcttgtaatgatctccaggtgctcggaagcaatggcatttgctgcatcaatggcatcttccatactgtcagccagtaatatatatccgtagttatccagtgatttctgaataatgggtgcacgttccagtactttcacaaaaccgtccacttcttcggagaccttctcggcaagctccttagaagtcgtgatcaggatggcgcttgccagctcgtcatgctctgcctgggacaacagatctgccg

SEQ ID NO: 11325 - DNA, 8825 bp, Unknown
  gut microbiota DNA sequence
aaagtggttgagccgcaggggcaacgcgaacacgatgttcgcgttagccgataagtgccatggatggcaacgtaaaggcggccctgtcatggtgagaagcacttggccactttcctttagaaaatccacagttgtagctagcatccgagtccggggcgggcagtcctttctgcgtggattttacggtccctacgttacgagccatgcccccaattcataaatgtgtcgcaaagggcgctccacatttatttcattgacggctgtcgccgtataaagtcaaacaaaaacagcgacttgtgagcaagctcccagatcgctgttactgtttggactttgcatggctcgtaactttcaatttacttgtcttgtgcaactgttcatatcgcaaagttctgacaacttgtaaaaatatgaaatatttaacaatatttacttgtaatagcagtatatatttagtaaaatacacgtaaggggttaaaaatccaatccaacggctggacaaaatacccaaaatgcagaataaatggaggatgggatatgaatatttacacaacagacaagatccgcaacgtagtattactgggccatggcggcagtggcaagaccagtcttgcagaagcctttggttatctgtccggtatcacctctcgtatgggcaaggtagatgacggcaataccctcagcgattacagtaaagaagaacagaaacgtcatttctctatcagtacctccgtgatccccattgagtgggaaggatacaagatcaatattattgatacaccgggttattttgatttcgtgggagaagtggaagaggcagtcagtgccgcaggagcagctatcatcgtagttaacggcaagtccggcattgaagtcggcacccagaaggcatgggagctttgcgaaaaatacaagctgccccgtttcatctatgtttccaacatggacgtggataacgcttcttttcgtcaggtagtggaagatatgaccaacctgtacggcaagaagatggcaccgtttcatctgccgatccgtgaaaacgagaaatttgtaggatacatcaatgttatcaccgagagcggtaaccgctgggaggggaaggaagttgttccctgcgatgtaccggattacagccgggcgaacctgcagatctgccgtgataccctaatggaagctgtagccgagaccagtgaagaattcatggagcggtattttggcggagagaccttctctgaagcagagatccgtgcagcactccgtaccaatgtctgtgacggcagcatcgttcctatgaccatgggttctaacattctgtgccagggtatgtacacactgttagatgatattattaaatacatgcccagccctgagaacagagaagtggcgggtatcaatctgaagaccaacgagatctaccatgcggattatgatttcgcaaaggctaaatccgcttacatctggaagaccatcgtggatccgttcattggaaaatactccctgatcaaggtaaactccggtgtactgaaaacggatgatctgctgtataacgtggatcgtgatattgaagagaagattggcaaaatctatgtattgcagggcaataagcctatcgaagtcagtgaactgcatgccggagacatcggagcactggcgaagctgacagcagcgagaaccggcaacagtctctcgacaaaggcaacgactattaaatacggcaagttcgatatttccaccccttatacctacatgcggtataagccgaagaacaaggcggatgtggataagatatcccaggcattgcagaagatgactcatgaagatctgaccatccgtgtagtgaacgatgcagagaaccgccagaccttgctttacggcatgggtgaccagcatctggatatcgtggtcagccgtctgttaaacgaatacaaagtagagatcgagctttccaggccgaagatcgcatacaaagagaccatcaagaaacagtctgatgtggaatataagtacaagaaacagtccggcggacatgggcagtacggtcatgtaaaaatgcgtttctcaccttccggcgatctgacgaagccctatgaatttgcaacagaagtcgtaggtggtgcagtaccgaaaaacttcttccctgcagtagaaaaaggtattcaggagtccgtgggcagaggacctctggcggcatatccggtagttggtgtcaaggcagtattgtacgatggctcttaccatccggtagactcttccgagatggcattcaagaccgcagcgattcaggcattcaagaagggtgttatggaagcgggtccggttctgttagagcctatcatgtccctgaaagttacagtacccgatgcttacaccggtgacatcatgggtgatctgaacaaaagaagaggtcgcgtactgggtatgaaccccatgagcggtggcagacagatcatcgaagcggatattcctatgagtggattattcggttattgtacggatctgcgttccatgaccggaggcagaggcgattattcctatgaatttgcccgctatgagcagacaccttccgatgtacaggagaaggaagtggcagccagagcagcgaaagtagcggagaataacgcagacgattaatacacagaatacataggatccacaaaaagagaccggtgaatatttccggtctcttttattcgatgcagacagatatctcatcgataccgctgcatcagattgatcagtaatgtgatccatgcaaacatgattcatcacctctcgtatatatgatatgcacagagaacagaaaatatgtacaaatatgtatggatagagccgcagtccttgacagtatcggcaaaacacgataaaataatcgatagttttttaacgacttgagaacatgaattttaaatagaaagcttctcatagtttaggaggaaatgattatggcagtaccttacaatcacagagaggtagagaaaaaatggcagactgtctgggatgacgaaaaagcattcaagacttccgacgatttctccaagcccaaatattacgcactggtagagttcccttatccttcgggacagggattacatgtaggtcatccgagaccttataccgcactggatatcgtagcacgtaagcgcagaatgcagggctacaacgtgctgtatcccatgggatgggatgcgttcggtcttcctaccgagaattacgcaattaaaaatcacattcatccgaagatcgtaaccaagaacaacgtggcaagattcaagaatcagttgcattccttaggttattcctttgactgggacagagagatcaataccacagatcctgagtattatcactggacccagtggatcttcttaaagctgttcaaggcaggactggcttacaagacagagatgcctatcaactggtgtacctcctgtaaggtaggtcttgcaaatgaggaggtagtcaatggtgtctgcgagcgttgcggttccgaagttatccgtaaggtcaagagccagtggatgctgaagatcactgaatatgcagacaagctgatccagggactggataccgtagattatatcgagcgcgtcaaggtttcccagaagaactggatcggtaagtcccagggtgcggaagtagactttacactcaccggaaaagacgagaagctgcgcatttacaccaccagaccggatacgctgttcggcgttacctatatggtagtatctccggaacaccctgtactggataaatacaaggacgagatcaagaactgggatgatgttgtggcttatcgtgagatggctgcgaagaagtctgatttcgaacgtaccgagctggcaaaggataagaccggtgtctgcatccagggtctgaccgctaccaatcccgtcaacggtaaagagatccctgtatgggtatctgactatgtattgatgacttacggtaccggcgctatcatggcagtacctgcccatgatgagagagactgggagttcgctaaaaagtttggcatgcctattatcgaagttgtagccggaagccctgtcagcgtagaagaagctgtatataccgatgttgctgatggtactttggtcaattccgatttcctgaacggcctgtctgtggcagaagccaaagagaagatcatgaactatctggaagagaagggcatcggtaaccgcaagaccaattataaattaagagactgggtattctccagacagcgttactggggtgagccgatccctatcgtacattgtgacaagtgcggatatgttcccattgatgagagcgaactgcctctgcagttacccgatgtagagagctacatgcctaccgataccggagaatctcctctggctgccatgactgactgggtaaataccacctgtccctgctgtggcggtccggcaaagagagagaccgataccatgcctcagtgggcaggttcttcctggtattacctgcgttataccgatcctcacaatgacaaggcactggcaagtcctgaagcattgaagtactggctgccggttgattggtacaacggcggtatggagcataccacgctgcatctcttatactcccgtttctggcataagttcctgtatgatcagggcgtggtacctactcccgaaccttaccagaagagaaccagtcacggcatgatcttgggatccaacggtgagaagatgtccaagtcccgtggcaatgtggtaaatccggacgatatcgtacaggattacggtgcagatactctgcgtacctacgagatgttcatcggtgcctttgatctgagcgcttcctggagtgaggaaggcgtaaagggatgccgcagattccttgagagagtctggaagttgcaggatattctgactgatgaagaaggctatagtgcagatttagagaccaagatgcaccagaccattaaaaaggtcagcagcgatttcgagaacctgaagtacaacaccgccatcgctgccatgatgtccctgatcaacgagttctacaagaagaactccattaccagaggcgaatacaagacactgcttactctgcttaaccccgtagcacctcatatcaccgaggaattgtggcagactgccggctttgaaggcagactgtatcaggcggcatggcctgatttcgaggaagagaagaccatagagagcgttgtcgagatcggtgttcaggtcaacggcaagatgcgtgtgaccatcaatgtttccaaggatgagaccaaggaaaatgtcatcgccatggcaaaagaagctttgggagacaagctgaccggcaacatcgtaaaagagatctacgttcccggcagaatcgtcaacattgtagttaagtagtgacggaaagcgtgataacgcgactctgcgaatggcgttggctgatttttcgagaaataaaataactcctgacagaccttacgtctgccgggagttatttctttgagcgttgcttttttctaaaatgttttgaatctgctgcagctctgcttcggtgctgtattttttgatggctgtgatggcagcctgcatttcctgtggggtaaaagtgagatgctcctgctttgccttacgcatggcaggcatgagaagtgccatcatttctttttgtgatttgccgtgccctttggcaaaaagagtggagagaaattctaatttttctctggggatgtccttcacaagatcatcctgcatccagaggggagtctgggaataatccattttgttgacctcctgattgattttgagtggctgcgaaaagttcggacaacatagccggatcacaaccgtccagatcggagaagccttccgggaacagctcctgcatggacttagccatatccatcatttcttgaaaattatggatattgtcaagcatctgggtgacctgctgcagggatgctttctgcgtttcatcgcataaaggcatgagatcactgcatagttcaccggcgagactgcttccatcggatgatagaggaaaactgtgcagagcagtctccggatgctttctaaacagtgccagcgtatattgcaattccaaaaattttatgtagacagcaagtcctttcaggagatgcggatctatataataggcaagtgttttcagaatctgaatgcggttgttggtaaataaagtgtcaaaggcggccggcttgtcgattctgttatcatccatgcagataataccttccagtaaatgaattactagtatcttatgaagcggataattggcttatgccaatcagtcattcggggtacggaagatccgcaccccgggatgatcgatcatacgtgtgtaaaaagtccggtaaatcagcaaccgcaatttccacagccgttgttgccaccgccacagaagcaggacaagagcagaatccagatcagccattcgcaacaatcatttccgccgcaaccattgtttttattgcccagaagtccgcagctgttgttgccgcaaccgttaccgcagccaccgccgcagaacagtaaaaggatgatccagatgcagctgttgccgaagataccgttactacagttgttattgttgctgcaggaattattgttgcagccacagtttgtagcagttaagtcactcatttttagtgcctccactttttatttatgctctattgtatgcgggggagcctgtcaatgtttccggaaaagacttgcaataattttctaatatagtaaaataaaaatagccatgtggaaatgtaatagatgataatatgtagttaaaatgatgcaggcttaattcatataagtttaccccacttatccctgacatcttattatttacttaaggatagattgaatgacacagaagatatatatcgtagaagggcggcagtttcgatcagaggcggattatcagaacgctctgaaggatcagcaggtgattgaaaatcttcggatgcagactaagaagatgaacctgtcggatcagaagaagctcttggaagtgatccgtagtggaaaatgcagatttcacagtatcctgggacaggattatatggaggaactggcagaagaaatccgcagacaggaacgaaaagatgccccggtttccaaagccaatgcaacgaaaaaaaaggaatttttaaagaagccagtaaagaaaaaagaaacaccgaaacgtaggcagaccacacagaaacagaacaaaccgcagtttgatgaacaggaactggataaaatagtaaaagaagaactgaagaagcgcgaaaagcgaaggaaactactggtagtcctctgcggtatggcagccattgtctgcctggggtatttcggcgtatataattggtacaattatcgtactgctgataattacaagcagctgagcgaattgaaagataaagagccaacagcaagtgatgcaccggctccggtgattcattataccgcggaggaaggacagagcacgccgcctccggtgctggatgaatataaaaatttattaaataagaacaaaaggctaatcggatgggtaaaaattgacgatactaatatagattaccctgtaatgcagactacagataatgaatattatctggatcataatctgaatcaggagtatgacaagaatggatctattttcatggacaaggactgtgatgtactaaaacccagtacaaacctcatactgtatggacatcatatgaggagtggacagatgttcggaagcttatccttatacagcgaccagagctattatgagaaacatccttatatacagtttgataccatctatgaaaaagggctgtatgagatcatgtatgtattccggtcccgggtatacagcgaagatgagatcgttttcaaatattatcagtttatagacgcccagagcgagcaggaatttgactcttatatgaatgacatggagggaatgtcattatatgacacaggagtcacggctcaatacggtgaccggcttttaactctgtcgacttgtgattatcaggagaaaaacggcagattcgtagtggttgccaaaaaggtgacggcaaaggagtaaaggatgactaagggtacaaggaagaccaacagaagattaaaaaagacagtaaggaagaccctgggaacactgttcctgatctcggcgatcgtagtagcagcgattcctacggaaggattgcaagcggaagaagatgctgtggcgcaggcggcaggacatacacatcagacaacacatagctcttctaaatataaggttacgattccgaaggacgcatcagagaaagcaagtctgctttccggtagcagcacaattcccaccatggatacgctgattcccgtggtagacagcaatgcgaccatttatacaacagagaccaacacagacggaaccagttatcagtttgcctatgtgaactataaaaattcctggtgtgcagtattgcttggttataataaaaatacgacattgactgggaatgtactggatattcccgatatggtaaatgcgtacatacagcctaccggtaaccagggtaccatcaatggttacgtggcggcaagtaagaatggacagcctttgtattatgaggctctgacagagaagaccagagaggtggaagtacaggcaacagatccgaatacaggtctaccgttatatgattcacagggtaaaccggtgatggagacgaagactgagacttataaggatggtgagatgcgtccttgttatgctacggacaatgcctggaaaaaactttctcttgtggatttcttccagaaaaagggcagcggttattcttacaccagtacgcaggcggaaaatgaggataaaacagcaaaagtata

SEQ ID NO: 11326 - DNA, 11185 bp, Unknown
  gut microbiota DNA sequence
tggatgtaaaatacattggtaaccagtatctggcatctacagccaatccaaatggtacctatacctggtctgtggcaggagatatcacatctaaaaatccgttagacggtattttcgccggagccagcaatattgtaacactgaacattggtgagaaactcattggtgtcggcaactatgcgttctatggctgtaatggtctgaacagcatttcctttggtaatggtatcactgtcatcggtaactgggcatttgcggaatgcggcagtatgaaagcagtgaacatccccagagagtgtaacctggcacagctgggagatcatgctttctacagttgtactcagttgacggatattgatattcctatttctgtaagttatatcggagactatgcattcgcggaatgccggtatttatatgaagtagagatatgtaatccggagcaggagaacggcatcagttccagcagcctgaaggaaatgggctggaatgtatttgaaaatgatgaaaccctgtattccgtgactttcccggatatgtacggcgagaccattggaatctccatgttcaagggatgtaagaacctgcattatgtagcttcccgaaatgcacagtttaccatcaactccggaaaagcagatgacgatgtgtattgctttgactgctttaagtccatgcttgcggatgatccggtaaacggtaccttctattttgaaggactaagagaaagcaaacttcacaagctatgtcaggaaaattgttttgcattcagttacattaattataatcctgacacacatttatatgagaaattgaacaaatacgaattgacggttcaggatcccaatgtttcaggtgaacctggtcggtctacgtttatagtagattcctccaaccagttgcttaatgccagcgtaggaaccggcgttaagacattgaatatcccggatcccatcggaccatatcatatttacaatatctcggcaaatacatttgccaacaattgtaacctgacaatggtatctctgcctgccagtgtacagtcggtaggagatggtgctttccgtggatgtcataatctggcaacggtaatatttaacaatagcagtatcgctattggaacggatgcgtttaagacccaggactttaccggtacacacagaacgggctgtacacacagcacagcgacagctatgaacgatgcagataacagtccggcagtgaaactgacctttgtaggagaaatctcaccggagtccacaccgtataagtatgcgatgagtccggacggcagatataataacagcagtcaggtggcaacctatgtcagatattgcagcggatggccgtccaatctggtcgcacagtacaacccggagaagaatgtcagcgaactgatcgatttcccggcatttacggaattgaccaaatacttaaataaagatgattatccgtatctgacagatgcccagagaagtgcagcggaaactgcactgaccaaatataatgctggagagtctctgacagaggatcagcagcagtttattgattccgcactgaacgtgaccataccggaaggcattcaggcaatcaaggacggtctgtttgtggaaaaagagaaggatcagaaggaaaagactctgaccatatacggtctcgacagtattgaagaaaatgacttcaagggcgcaaaatatctgaccggtgtgatcagctacagcaataccctgtccagcatagcaaaaaatgcctttgatggctgtgagaaactggctacagtagagatcaacggcaatacccagtccattggcgactatgcatttaaagactgtgttgctctgaaagatgtgtccctgtccggaaccatcagcagtcttggtaatattccatttaccggttgcaaaattctggataaggtaggattccagggaaccgattatttcacctgcgacaattcgattatctatggaatgaacggcagtgcaaaagcgaagattattgaatgcttagagggtagaaccagcaagcgtgtgaatgccaaagagacaacgggcgtgacggaaatggcaccggaggcgttccgcggctgcgacaatctgactacgatcgatctgtcggacagtgccattacggtagtgccttcctatgcgtttgcggagactaagaatctggataccgtgaaactgccgatcacctgtgaagaactgaaagataatgtattcaacggcagtagcattaaatggctggaggagtccagtgagagattaacactgattgaccaggatacttttaccggaatccttaaagataagggagatgttaccttatgtgctccgaagaccagttatctctacagatatggtgatgcgaacggatttgcagtggaagatactccgctggaggaaatctataccgttatcttccgtgactggaatgaagaactgcagaaaaatgtccaggtagacgaacaacaggtacggggcggggaagatgcggttccgcctacaccgttaggtaagaccggcgaagtatttaagggatgggatggcgattacacgaacatcacggaagatacaacatgtaccgctatttatgagaaggaagatcccgatgcaagtaaattgaccgtaaccttccaggattgggatggtacggtaattaagaagatcaaggtatcctccggcggcagcatcgcagatgcggatctgcccaacacatctaatcttgtgagagatggttatatcttcatcggatgggacagacctctgaccaatattacagagtcttttaccaccatggcacaatataaggcgctaagcgaagatgatattgtagtcagatatatcaatagtgtgaccaaggaagtgttctatcagactacgattaagaagggtacggttgcacccagtatccagactcctacggtcagtggctatactttcaaggaatggctgccggatattgcaacagctatcacagaaaatacagatttctatgcagtatatgaagccagtggctctaataatggtggaactgccagtccgggtgcaagcaccagccccggagcaagcaccagtccgggaggcaataataacaacggaactactgccaagatgtatactctgacagttaaaaacggttccggctccggcagttatgtagcaggttcccagccgatcatcgttgcgaatgatccggcaaagaatcaacagttcagcagctggtcaatagatccggccaatacgaagattgccagcaaggtattgtctgcaacggtcatcactatgccggaagctaatgtaacggtaactgcaaattatactgcaaaatccggttcaggtaacaaaacaaatacatctacaggaagcggtaattccacgaattccaattccaacagaagaccgagcagcactactacgggaaccgtatccggtggcagaaccaccgttgttattgataaaaacggtctgtccaataccggtgtggtatctgcaacggtgaatggatcttctgataactttgtgatcaagatcacagagagtgcagcagcttccgaagaggtagttaaggctctgatggcagagtacggcagtgatatcagtgctatcaagtatttccccatggacatcagtctctatgattccaccggcaatacaaagatcacagataccacaggattgtccatcagcattacattgcctctgccggattccctgatcacctacgcaggtaataataaagtggccggagtagtgaacagcaagctggataagctgtcaccgaagttctccacaatatccggagtatcttgcgtaacctttacggcagagcatttttcaccgtatgtgatctatgtggatacgaataatctgactgcgggaaccatcgcagacagcacacctaagaccggagacggcattcatcccaagtggtttctatccatgggacttgcatgtatttcggtagtactcttcatgaagaaggacaaaaagactctgcggaaagccagagcctagtgtgaaataaaggatgggaaggtttatgaatcataaaaagtggatggctgtcatagcactggcagttaccgcattgatcctgacacatcttcctgtgtcggaggcagatgcggcagcgtctgcctctgattttcagacgcaggggagtacactggtaaaatacagagggacggaagaacgcgtcacgattccggatacagtggaagtcgtaggcgagagtgcctttgagaacaatcagaaggtacagttcgttgtaattccgaaatctgtcaagcgtttggatgcctatgttttctggggatgtaacaatctggaagaggttgtcctgggaaagggtctgactgcagtggacgagtattcgtttgcaggatgtacgggtttaaagcagatcacaattccggaaaatgtacagagtattgatgcacaggcatttgcgggatgtattaatctcacagatatttatatcccggctacggtgaccggtattgcggaagatgctttcttaaactgtgataatgtgacaatccatgcggacgagggaagtgtggcagcacagttttcccaaaaacttgcggagcagaaaaaccgtgatccgctggtgacggcagctcctgtacagacaccgacagcagtaagcagaccggatacacaggcaacgacagaacctgtatcaacgactacgcctgcacctgttgcaacaccggttcccggtaatgtcctgggcagtaccattgttgtagggaatcatgccttggtaatggtgcatccgggtgaggaaaaagtacagcaggggtatacggaaccggaagcgggacaggagaccggtgaagaacaggatatcacagctgagacagagaacggcaagattccggaatggatgtattatcgtaaccagtctgtcagcgcagttacgatcccggaaggtactacagagatcggacgttttgctttttccagaagttctctccggaccgttacgattccggaaggtgtaacggtgattgactatgcagcgttttatcattgtgataatctggataacgtgatattgccggacacggtgaatactgttggtgccaaggcgtttacccataccgggtggctggatgattttgaagagaacagtatggatgattttctgatcagtggggacatcctggtagcttataaagggaatctgcctgaagttgtgataccggatggcgttcgcgtgatcgcagaggaagcattccgaaatcatacggaattgaaaaaagtacatctgccggcgagtgtcacggatattggaaatgacgctttcccggaggggatagagattataaatgaataatggggcgatttaaccgacacccggaatagaaaccggcataagatagattaagtcttatgtcggttttactatatttttaccgagaaggaaaacggatgcagagggtcagggagcaggtacaggtaccggaacaaatatatagcgttacttggcggtcagagcctgtaacggttgctgtattggataccgggatcgcatatcatccggatcttgccgggcatttgttatgttttcgtgatttcgtggagaagagctctctgccgtatgatgataacggacatggaacccatgtatgtggcatcctttgcggaaacggagaattgtcgggtggaaggcttcggggaatggcaccggcatcgaaacttgtcgtgggaaaagtgttggatggaaagggagaaggatcctgtgattccatgcaggaggcatttcagtggatcctacgggaaaaaaacaggtatcagatccggatcttaaatatatctgtcggaatcggtgaactgaaggaacgatacaaggaacaggtactgcgggagtatatggaattgttgtgggatcataatattctcgtagtctgtgcagcgggaaatgcaggacctgagaatggaagtatttcggagatggcaagcagccggaaagtgttaacagtgggttgtcacgatggaagatattgtaaaaatgacccgaagcgatgcgaaacatattccggaagaggtagaaaatacgacgtcatccgaaaaccggatattgtggctcccgggacgcggatcctgtcctgcaatgctttctggggaaatagaaatggcagaatttttaaaccttatattgcaaaaagcggtacctccatggcaacccccattgtgtccggagcggcagcactggtactacaaaaatatccgagaatgtccaatgaagaatttctccgtagggtagcgctgacagctacggatctcggagaaccctggaataagcagggcttcggaatgctcaatgtccgcagattattagaaaacaagtaaaatgataaaatcactgggaaaaataaaaaatgtgattaaaataagtcaataaaattaatactaaagatattgacacaaatggtatgattgtatacaatgatacgagaactgcaaaatgtatttttactgcgcagagtaaaaatagaaaacaatattgcagatgtcgaatgtcagggaagagaggtataccaatgagagatagtgatgcatttcagaatcgtccggtctccatgaatccgaagaacaaccttctggagattgaggagcatatgtacatactggatgatgtggagaagccgaacgtgttccgtaatatgttcccttattccgaaatccccaaaataccttttaatgatcgtatcgtgcctcataacatgccgaaggatatctggatcacagataccacttttagagacggacagcagtccagggcaccttataccacggagcagatcgtgaaaatctatgattatctgcacgaactgggcggtcccaacggaatgatccgtgccagcgagttcttcttgtacagcaaaaaggacagagatgctgtctataagtgcatggagaggggatataagttccctgaggtgaccagttggatccgcgccagcaaggaagattttaaattagtaaaagagattggaatgaaggagaccggtattctggtaagctgttccgattatcatattttcttaaagttaaaaatgaccagaagacaggcaatggatcactatttaagcgttatccgtgactgcttagaggagggcatcagcccaagatgtcacctggaggatatcaccagagcagatatctacggctatgtagtgccgttctgtctggaactgatgaaattgatgaaggagtatcagattcctatcaaggtacgtgcctgcgataccatgggatatggtgtcaactatcccggtgccgttattccccgtagtgtacagggtatcatctatgcgatccatacccatgcaggtgtgcctcacgagttgatcgagtggcatggacataatgacttttacaaggcagtgtccaactctaccacagcatggctgtatggctgttccggtgtcaacacttccctgtttggtatcggtgaacgtaccggtaatacgcctttggaggcaatggtattcgagtatgcacagttaaagggcgacttaaacggtatgaatacccgtgtgatcacggagctggcagagtactatgagaaagaaataggttatcagattcctcccagaaccccgtttgtgggcaagaactttaacgtaaccagagccggcatccatgcagacggactgcttaagaacgaggagatctacaatatcttcgataccgagaaattcctgaaccgtccggtattgtgcgctatttccaacacctctggtctggcaggtatcgcgcactggctgaacacttactacaagttaaagggagacaagcaggtacagaagaattccgaactggtagcagagatcaaaaagtgggtagacgaagaatatgccggcggtcgtgtcaccgtacttacggatgatgagatcgtggcatgtgttaaccgtatttgcctggagaagaatctgaagatcggagagtaaacatagaatgagcatgacaacggtaacagcgttgcctggaatcgaggattatagtgagtaagtatgatgtaaagcaggaagtaacggacaagttctccctgcggggacgggtatttcacaagctgagagaggacattttaagcggaaaataccaggaacatgaagaattgaaggaagtggcgatcggcgaggagatgggcgtcagcagaacccccgtcagagaggcattccgtcagctggaactggagggactgatccagatcattccgaacaagggtgcctatgtcaccggcattacgcagaaggacgtgaaggatatttatatgatccgttctttgttggaaggactgtgtgcacgctgggccacggagcatatcactaaggaacagatggaagagatggaggagaatgtctacctgtccaagttccatgcccagaaagggcatctggagcagctggcagagttagacaatcgtttccatgatattctgtatgaagcctgtgacagcaagatgctggagcatcagctgaaggatttccatcagtatgttctccgtgtccgtaagaagacgctgtccagtgccaatagaggtccaaagtccaacgaagagcatgaaaagatcatggaagccattaaggctggcaacgccgatctggcagagcaactggcacatcagcatatgatcaatgcttatgagaacatggtgaagaacggtctgaatgaggcttatgcacagcaggcggaaagtcaggaataagttgtctgttggaacgaattacgttaaaatagaatagaacgaaaattaataccggaaaggaaatcgttatggaaaagatcaaaatgacaacccctctcgtagagatggacggagatgaaatgaccagaatcctctggcagatgatcaaggatgagctgttgctgccctatatcgatctgaagacagagtactatgatctgggactggagcatcgtaatgagacagacgatcaggtaacggtggattctgccaacgctacgttaaaatacggtgttgccgtaaaatgtgctaccattactcccaacgctgccagaatgacagagtacaacctgaaggaaatgtggaagagtcccaacggaaccatccgtgccatcttagacggtaccgtattccgtgcaccaatcctggtaaagggcatcgttccctacgtaaagaactggaccaagcccatcaccatcgcccgtcatgcttatggtgatgtctataaaaatacagagatcaaggtgcccggacccggtaaggccgagctggtattcacagcagcagacggcaccgagacccgtgagctaattcacaatttcgacggagctggtatcattcagggtattcacaataccaataaatccatcgagagctttgcaagagcatgcttcagctatgcggtagatacgaagcaggatctgtggttctctactaaagatacaatttccaaaaagtacgatcatacttttaaggatattttccaggagatctatgataacgagtacaaggctaaattcgaggaacttggcattgaatatttctacactctgatcgatgatgccgtagcccgtgtcatccgttctgagggcggattcatctgggcatgtaagaactacgatggtgatgtaatgtccgatatggtagctaccgcttacggcgatctgtccatgatgacctctgtactggtatctcccagcggcgtttatgagtacgaggctgctcatggaaccgtacagcgtcattactacaagcacttaaagggtgaagagacctccactaactccattgctaccatctacgcatggaccggagctctcagaaagcgcggcgagctggatcagattcccaaactgtgcaacttcgcagacaagctggagcaggcatgcatcaagaccatcgaggacggcaagatgaccaagagcctgtccctgatctctacctgtgagcatcctgtgatcctcaacagcctggatttcatcaaggcgatcagagagaccctggacagcctgctgtaaaaataaaatggaagaaatggatgcttccctgtagcaatgggggcatccgtttttggtgtacacccaaagatcttaccggaggattacagaagtgaatgatgaaaaggaagttgtgtgttccggaaaaacgatggctccatttataatgggagtgatgttctggctcatcggaataggagttacttttttattactgattttaggcacttcacagggggtgaaaggcgcaggtattatctttttcatattatgtggaatggaagggagctatttccttctgttttggcgcaacaaaagaattactatgacgcgggatgatattacttatcgttccatttggggaaaagagaaaaaatactcatgggaagacgtgagatcggtgcgttataagtcggctggaagaggggcgtatagaattctgatccagacagaccgaaagatatatatcgaaaccggaatgatgaaaaacagtgaagaggctgaaaaactgataaaggaaaaagggtatttaggtctccattaaccttcggtaatcaatccgtaaagagatgaacattaacgagtgggaagcttagtcttcccatattttttactcgaaatacaaaggagtagtaccatgtttacgctggaggcagagatgtttttaatattgtctctgtttttttcgtggattttttattaattttcttggaagaatttggggcatttgggcgaagaatagttgcgggggatcggggatacaggtacaataaaaggaaaggaatcgtcaaacgataaaagcgtgtgaaaggggaagaaagatgtttcttttacaggacataagtgatgagaataggaaaaaactggtggcagctatagaagacttttgtagatcaaacggtttgaacgagatacagataccttttgctgatagcaccatggagacaatagtggagtgtttatgttccattgcggataggatggaacagaggattaagcaggaacatacaaaaaagtatgtaacagatgatctggaaattacatttatgagattttgctgtaattgcatggatttaattcctgtacaagttttatctgacgaaaaactgataatattatttaaacacagacattttggctatgctttttttgaaattggagataaaacacagcatttttgtgacctaatcaacggagagagaagg

SEQ ID NO: 11327 - DNA, 30857 bp, Unknown
  gut microbiota DNA sequence
aatgcggttgtacggatttaagaaaagtacaagcccggataagttgtatttgtgtagaaatgttaggagtgagattatgactaagacgatagagaattttttacgatatgtgaagatcgatacccagtccagtgaagaaagcactacgatccccagcaccatgaagcagcatgatctggcaggtgtgcttgtcagtgaactggagactatgggcgccacagagatcacttatgatcgggagcactgttatgtctatgccaccgttcctgcatccgcaggctgcgaaaatgcaccggtactgggatttattgcccatatggatacatcgcctgcggtgacggataccaatgtgaagccccggatcgtagagcattatgacggaaaagatattgtactgaatgcagcagagaacatcgttatgaagacagcggatttcccggagctgttaaattatgtgggaaaagatctgatcgtgacagacggaacgacgctgcttcgcgcagatgacaaagcaggtgttgctgagatcatgaccatggcggaagacttgttaaatcatcctgagaaaaagcacggcaagatccgcattggtttcaccccggatgaggaagtcggtgccggagcggatcattttgatgtgaaactgttcggcgcagattatgcgtataccgtagacggtggtgcactgggcgaactggaatatgagaattttaatgccgccggggcaaagcttcatgtatatggcagaagtgtgcatcccggttccgccaaaggcaaaatgaaaaatgccattctgatcgcgcaggagttccagaagctgctgccggtagagcagaatccaatgtataccgaaggctatgagggcttcttccatctggatgctataagcggcaatgtggaggaagttactgcggactatattatccgtgatcataacagacagctgtttgaacagaaaaaagagctgtttttgtcctgtgcggatttcctgaaccggaagtatggggaaggcaccgctatagtggatatgaaagattcttactataacatgcgggagatcatggagcagcatatgcacctgatcgacaacgcgaaaactgccatggaagagttggggatcgagcccaaagtatctcccatccgcggcggtaccgacggcgccagactgtccttcatgggactgccctgcccgaacctgtgcaccggcggagaaaattatcacggcagatatgagtatgcctgtgtacagtccatggaaaaaacgaccggactattgatcgccattgcagcaaaatacgcagacagataatagatacagatatttagaaaggcaatattttttatatgaaaaatgtaacacaaatgaacgaaaccgacagacagtattattttatggagaaagcctccggtcatgtggcaaagcttggagaagaactgggcagaaggcctacctgctgtgtgactactttcgggtgtcagatgaatgccagggattcggaaaaactggtgggaatcctgggaaaagtcggctatgagatcattgaagatgagaatgcggactttgtgatctataatacctgtacggtgagagataacgccaatcagcgtgtctatggaagactgggagtattaaacggctataaaaggaaaaatcctcatatgaagatcgcactgtgcggctgtatgatgcaggaacccaccgtgatcgagaagattaaaaacagttaccgcttcgtggatctgatcttcggaactcataatattttcaaattcgcagagctgttatgctccctgtttgaaaatgagggaatggtcattgatatctggaaggatacggacaagatcgtggaagatctgccggtggagagaaagtattctttcaaatcaggtatcaatattatgttcggctgcaataatttctgcagctattgtattgtcccctatgtccgcggcagagagcgaagccgtaatccgaaggatatcatccgggagatcgagggtctggtggcagacggcgttgtagagatcatgctgctgggacagaatgtaaattcttacggtaaaaatctggaagagcccattacctttgcacagcttttgcaggatgtagaaagaatcgagggattggagcggattcgtttcatgacctcccaccccaaagatctgtcggatgagctgatcgaggtgatgaagcattccaagaagatctgcagacatctccatcttcctttgcaatccggttccacgaagatattaacagcaatgaaccgccgttataccaaggaacagtatctggagctggcggagaagatccgtaaggagattccggatatggcgatcactacggatattattgtaggattcccaggagagacgaaggaagacgtagacgagaccatcgatgtgatccgtcgcgtaaaatatgacaatgcttttacctttatttattccaaacgaaccggaacaccggcggcagccatggaacaggtgccggaggaactggtaaaggagcagtttgaccgggtgcttaagaccgtgcaggagacagccagagaacaggtatccaggtatcagggacagatctgcgatgtgctggtagaagagatcaatgaaaatgacagttccttagtgaccggaagaatgtcaaataatacgctggtacattttccgggtgatatatcactggtgggaaagcttgtgaatgtttcactggatgaatgtcatggattttattatatgggacatatggttcagtcatgaatatgacaggcgaataaatagtaaaagggaatcgaaatggaagaacaagaggagaaaaagagaatagaactggaacaggacatgtcctggaaaatgtatcagattctgacgataacggcgtgcactgcaaatctgatcggaacaatctgcaatttctgcattcacggtatgaaactgccgaccatactctgcgggatatgcctgctgatgatcgtgaccatcggcattgtcggatggactacgaaaaatgtgcaaataccggctgtcctgatcatattaatacttgtatggtttgaatttccttatttgtattattgctacggggatgcctctatcgtatatctggtcctgggggtcgttggactggcgatatttttcccgagaaatgtggtgatcgtttcttttacggtcacgttgctggaatatctggtgatcatgatgagcagctttgaacggccttccgtatggagaaatatggatgaagcgggtaaaataggaactacgctcggatcctttgttattgtgggagtgtctgtatttgccatgatatttgaattgctcagaagttacgaggaacaacgaaagcaattgctgagtctgagtgaggatctgaactttgcagcgaaccatgatcctctgaccaggctgtataatcggcgctatcttgtaaatcaggtgaatgaatggatatgcaagccggagaagagcttctggatcgtattgatggatgtagatgatttcaaggcagtcaatgatacctatgggcatggatacggtgatgatgtactgcgggaagccggcagactgatgctggaagaaatgatgggaaaaggaatcgcagcccggttcggcggcgaggagtttatgctggtgtttgaacaggatgatcgggaacaagtgttacattcattccggaatatccaggaaggcttaaggagatattcccagaataccagacagatggatattaccatcagcggtggaatggaacgttatgaggctgataaacagctggatctattgtttacttctgtggaccggaaattatatactgccaaaaataacggtaaaaaccgtattgtagaataggtttaaaataataaaaagtcttgcaaagcttaaaaaatagagctatgataagacccgtgtgattttataaaaattttataatttcacacgggtctttttactgaggagattatattgaggagaatgttatggaaaaattgaaaccgaagcttttctcagtgatgaaaagctacacgaaagaacagtttgtaaaagatgtgatcgcaggtatcattgtggcgatcattgctctgcccttatccattgcactggcactggcttccggagtaacaccggaaaagggtatctatacagcaatcaccgcaggctttgtgatctctttcttagggggcagccgcgtacagatcgcaggtcctactgcggcatttgccaccattgttgcaggaattgtagccaagaacgggatggacggtctgatcatcgcgacattgttagcgggtgtgatcctgatcctgatgggatttttacgacttggcaatctgatcaagtttatcccctatacgatcaccaccggttttacttccggtattgctgtgacgatctttatcggacagatcaaggacttcctgggactgaccattgtcagcgaagagccgctgatcgagaccatggataaactgaaagcagtatttcagttcatctccaccacaaatgtgcaggcactgcttgtaggtgtgatcagtctcctgatcctgatcctgtggcagtatctgccgggcttttgcaagaagattcccccttctctgatcgcagtactggtgggaagtgccatggttgcactacttaacatgaatgtaaatacgatcggagatctgtatgagatttccaataagcttccgtcaatttctctgcccgccttcagcctgaagacggtacagaacgtcctgccggatgcttttaccatcgcgatcctggctgccattgagtcattgctttcctgcgtggtagcggacagtatggtgaacagcagacatcgttccaatatggaactgatcgcccagggcgccggcaacattacttccgcattgttcggtgggatccccgccaccggagccattgcgagaactgctgccaatgtgaaaaacggcggacgtactcccattgccggtatggtgcattccgtgacacttttgttgatcctggtagtactgatgccttatgcggcactgattcccatgcccaccattgcagccattctgttcatggtggcttacaatatgtgcgactggcgtaaattcataggtctgtgcaagaccgcacccaagagtgacattatcgttctggtgaccacatttgtactgactgtcgtatttgatctggtagtagcgatagaggtaggtattttactggcggccattctgttcatgaagcgtatgagcgatgtgacggaagtggaaggctggaaatatgtggatgatgaggatgatgcggacagcctgtccttaagagtcgtacctcacaataccatggtctatgaagtgagtggccccttattcttcggcgcagcggacaagatcctgaagatcacattagatgagaaaatgaactgcctggtactgcgtatgcgcagcgtaagcgccatcgacgccacagccatgcacaatctggagcagttatatgcggattgtaagaagaaaaacatccagatcattctgtctcatgtaggggaacagcccatgcatgtcatggagaagagcggtttcttagatagggtgggcagagaaaatgtctgtgcccatattgatgatgcactggaacgcgcagcaaagctgcagtaagtgtgaaaaactatcatttttcataggggttctttaatttacaacctcaatattttgtgctaagatagatgcggatacgcaagcttttgcgtgtccgctttgtcgtggatccttttacagaacaggagaagatcatggctgaattgacaccaatgatgcaaaaatatatggagaccaaggagcagtataaggactgtatccttttttatcgtctgggagatttctatgaaatgtttttcgacgatgctttggtggcttccaaggaactggagatcacactgacgggaaaaagctgtggcctggaggaacgtgcgcccatgtgcggcattccttatcatgccgtggaaggctatctgtccaagctggtaagccgcggctataaagtggctatctgcgaacaggtggaggatccgaagcttgccaagggattggtgaagagggaagtgatccgtgtggtgactcccggtaccaacttaaacgtacaatctctggaagccggcaaaaataattatctgctgagcattgcctatactccggatggcatcggtatctcggcggcagatgtaactaccggtgattattatgtgactgaagtcgaagatctgaaaaaattaaatgatgaactgatgaagtacgaaccttcagaaatcatctgcaacgaggcttttttagtcagtggctttgatgtgaatgatttaaagtcccgcttacatatctccgtcaatgcgttggaatcccatatgttcgatgatgacggctgcagacggatcctgatgaaacattttaaggtaaatacgctgatcggacttggtgtcgaagaattccctacgggacttttagcggcgggagcactgttacagtatctgtatgatacccagaagacagatctggagcattttacccatatttatccctatcttaccagcaaatatatgctgctggacagttccaccagaagaaatctcgaactgacggagactctcagagagaagcagaagagaggctctcttctgtgggtgttagataagacgaagaccgccatgggcgccagacttctgcgcaattacatcgaacagccgttgatcgaaaaggatgagatggagaagcgtctggatgccattcaggagctgaatcaggattccatctccagggatgagatccgggaatacttaaatcccatctacgatctggaacgactgctcagtaaggtgacttataagacggcaaatcccagagatctgatcgcatttcggaattccctgcagatgctgccgccgattaagacggtgctgtctgcctttgaaaaagaagaactgacggaaattcgggagcagattgacggcctggaggatatttatcagctgatcgatgaagcgatcattgacgaaccgcccctgtccatccgggaaggcgggatgatcaaggatcagtttgatgagaccatagacagactgcgtagcgccaagcatgacggaaaacaatggcttgcccagctggaggaagaggacagagagcgtaccggaatcaagaatctgaagatcaaatataacaaagtattcggctattattttgaagtgaccaattcctataagaatctggtgccggaggactatatccgcaagcagaccctggcaaatgcggaacgatataccacaccgcggttaaaggaactggaagacactattttaaatgcggaggacaagttacagacactggaatacgatgtcttctgcagaatccgggataccattgcacaggaactggtccgcatccagaacaccgcgaaagcgatcgcaaagctggatgtgtatgcgtctttgtcgttggtttcggaacgaaatcattatgtacgtccgaagttaaatgaaaagggtgttattgacatcaaggacggaagacaccctgtggtggaacagatgatcaccaatgatatgtttattgccaatgacacttatctggataatggaagccactgtatcagtgtcattaccggccctaatatggcgggtaagtccacttacatgcgtcagacggcactgatcgtactgatggcgcagatcgggtgcttcgtgccggccagaaccgctaatatcggtattgtagaccggatctttacccgcgtgggagcttcggatgatctggccagcggtcagtccacttttatggtggagatgaatgaagtggcgaatatcttacgaaatgccacatccaagagccttctgatcttagacgagatcggaagaggtacttccacttttgacggattgagcattgcctgggcagtgatcgaacatatcagcaaccgcaagcttttaggagccaaaacactgttcgctacccattaccatgagctgaccgagctggaaggcaaaatgaacaatgtgaacaactattgcattgctgtgaaagaatgtggcgacgatatcgtgttcttgcgtaagatcgtaaaaggaggtgcggacaagagctacggcatccaggtagcgaagctggcaggtgtgccggacatggtcatcgaccgtgccaaggagatcgtggaacaactgtcggacaatgatattacggaaaaggtgcagaacattgctatcgataataaaaacgatggtaaggcaaaaaaacagcccaaatacgatgaggtggatctggcacagatgtctctgttcgacactgtgacggatgaggatattctgaaggaactcatggagatcgaggtgacgacgctgaccccattagatgcactgaacactctgtaccggttacagaataaactgaagaaccgctggaacggttagatataagggaaaggcataggtagatatatgggaatacatgtactggactcccggacgatcgacaggatcgctgccggtgaggtggtagaacgacctgccagcgtggtgaaggagctggtggaaaatgccatagatgccggttccacggcgattacggtagaagcaaaagaaggcggtattgagttcatccgtgtgacggataacggctgcggcattgaacgggaacagcttcccacggcgtttctgcgtcatgccacgagcaaaatcgaagatgcggatgacttgaaccatattgcaagccttggcttccgcggtgaggctctatccagtatcgctgcggtatcccgtgtggagatcatcaccaagagaaaagagaacctcaccggaacccgcatggtgttagagggggcaaaggaacagtccatcgatgagatcggcgcgccggacggtaccacattcctcatgaggaatctgttcttcaacacgccggtacgccggaaatttttaaaacagcctgccacggagggcagttatatcacagatctgatggaacatctggcactgtccagaccggatatctctttcaaattcgtactggggaatcagaccagattccatacctccggaaacggtgacctgcgggaagtcatctaccggatctacggcagagagatcgccgcacagctggtaccgatccagatggaagaaaacggcattaaggtagaggggtatctgggcaaaccggtactggtgcgttccaaccgcaattttgagatctattttatcaacggtcgttttatccgcagcggtgtgattgccaaagccattgaagaaggttataaacagtatttgatgcagcataaatttccgttgtgcgtgctgcatattacaatggatacggagaccgtggatgtgaacgtacatccctccaaaatggatgtgcggttctctgacggcatggcatttgccagactgctgagcgagaagatagcaataaccctgcgaaaccgggaaatgatcccggatgcttccttagaggatgaaaaatccattcagaaaaaggagcaggaagacagaaaagcttcctggaaggaacacacgccggaggtgttcgagaaaaaaagagaagaaagctaccgcgtcatggaggctgccaaatatgaggcggtaccgaaagaccggagggaatttatacagaagccgatctggcaggaggcacatgcgggcatacagaccagtatccgtaaaccggagtctataagtgtgcagacagaggaacagcctgctgcacctgtggcagcactggaatcgaaagaggacgattttttcgtagaggctgcaccgctggagccaagggatgagacttcatcagagcctgttatctgcccggagaccgctgaggtaatggtgaaggatgtacagcagatgaatctgtttgaagagaaactgttatctgtgcagaatcgcagccgctaccgtatcatcggacaggtcttcgatacctactggctgatccagttcgaggataagctgttcatcattgaccagcatgccgcccatgagaaggtgaaatacgagcgcctgatgaaacagttccacgaaaagagcgtggtctcccagcgcctgatgcctcccatcattgtcagcctgacggggcaggaggaaagcgttcttcatacttatgaggatgcctttacacagctgggatttgagatcgaagccttcggcggcaacgaatatgccttgcgcagtgtcccggtggacctctacgggtgcagcgagagagaactgtttttagctgtgcttgatgaactgtcccaggagaccggcaatcgtggcagctttcaggtcatcgaggagaagatcgcatccatgtcctgcaaggcagctgttaagggtaacaaccgcttaagccttcaagaggcggaacagctgatcgatgaacttctgacactggataacccctataactgtccccacggcagacctaccatcattaccatgacggagactgacctggagaagaaatttaagaggatcgtataatgcgtttactgatcaaacaacgagtgttttcctggacagattcttatgatgtctatgatgagaacgaaaatgcaaaatactttgtaaaggcggaatttttctccctgggacaccagttacacatatatgacagaaatgatcgtgaactgggagttatcaggcagcggctgtttaccctgcttccggcatttgaaatcgaaatcggcgggcaggtgaaaggcgagatccgcaaacagttttcttttttcaaacccagatacgagattgattataacggctggcgcgtggaaggagattttctgggatgggattatgatgtatacaacggatgcagcagtatcattcatatctccaaggaactgttccattggggagatacctacacgattaactttgctgatcctaaggacgaactggaagggctgatgttagtcattgctatcgatgctgcaaactgcacccagaataatggataatgtgtaaggaagaaaaattatgtcggtaacacaatctgtaaaaagaccgctggtcgtgctgaccggtcccaccgcagttggtaagacgaaactgtccattgccctggcgaaagctataggtggggagatcctgtcagccgattccatgcaggtatataaacatatggatatcggatccgccaagatccgccctgaggaaatgcagggagtgccccatcatctgattgatattttggagccgtgggaagaatttaatgtggtggtatttcagaaacggtgtctggaatgcatggaacagatctatgacagagggcatatcccaatcctggtgggaggcaccgggttctatattcaggcggtgcttcggggtattgattttacggagaacgaagagaacaccgaataccgggaaaaaatggaacagcttgcgaaagaaaagggaccggaagtgctacatgacatgctcagaaaaattgatccggtttcagcagagaacattcatacaaacaatatcaagagaaccatccgtgcactggaatattatgaactgaccggagaacccatctctgcgcataatgaaagggaaaaagagcgcacgagcccatacaatttcagctattttgtcctgacggatgacagagaaaatctgtatgcgcggatcgaaacccgtatcgatgaaatgctgtcggaaggactggtggaggaagtcagaagcctgaaaaaaatgggctgtcacagaggaatggtatccatgcaggggctgggctataaagagatcctggagtacctggacggagaatgcagcctggaggaagcggtgtatactctgaagcgggacaccaggcattttgccaagagacagctgacctggtttcgcagggagaacgcagttacctggctggataaacagcaatttgactatgacgaagagaaaattttagaatatatgataaaggaattaggagaaaaagggatctatgaaaaacagcaataacagtaatgaagaaatgtatctttccatggggatcagcaagacggtatatgactatggatgtgtcatagagaaaagtctgcgggagcgttttgacgaggtggaccggaatgcggagtataatcagttaaaggtggtaaaagccatgcaacagcatcaggtaagtgaagcctgcctgctgggtactaccggctacggatataacgacctgggaagagataccttagaggcggtttatgcggcaacgttccacacagaggatgctctggtgcgtccccagatcacctgtggtacccatgcactggcactggctctgatgagcaacttaagacccggagacgagctgctgtcccccgtaggcaagccttatgatactttggaagaagtcatcggcatccgcccgtctaaagggtctctggcagaatacggtgtaacctatcgccaggtagacctgctgccggacggaagctttgactatgataagatccgtgaaaacattcatgagaagacccatctggtaaccattcagagatccaagggatatcagaccagaccgaccctgtccgtacagcggatcggcgagctgatcgcatttatcaaaggcatcaagccggatgtgatctgtatggtggataactgttacggagaattcgtggagacgatggaaccctccgatgtgggtgctgacatgatcgtgggatccctcatcaaaaatcccggcggcggactggcacctattggcggttatattgccggtaaaaaagagtgtgtggaaaatgctgcataccgtctgacatccccgggactcggtaaggaagtaggagcatctcttggcattctgaaggatttttatcagggatttttcctggcacctactgtgacggcgggtgcattaaagggagcgatctttgcagctaatgtctatgaaaaattaggttttgcggtagtaccgaacggtacggagagcagacatgatattatccaggcggtaacgtttggacagccggaaggcatcatcggcttctgccagggaattcaggcagcggctccggtagacagccatgtgacaccggaatcctgggatatgccgggatatgatgcacaggtcattatggcggcaggggcattcgtatccggatcctccattgaactgtccgcagatggtcccattaagccaccctatgccgtatattttcagggtggactgacctggcaacatgccaagttcggcattttgaaatccctgcaggcgttgctgcagaagggaatcgtgacagaagaacagctaaggcaggcaatgtagaacgtgccagaaaatacgaatcctgtagaaaaagcgcaaaataaaatccactaaatttgtgtacagaagaagctttttgtgatagtattaaaagacgtatggaagatggaggcttgcggggagcacccatcggatccggaaagtgtacacgaaagaaagaagaggaagtagtttgaagagaattaattgggttttggttgtactggtgctgatcggatttgtgatcggcagatttataggaacttactttgacggtacctttctgaattacggacaaaatttcggactcagcagtccggtagaactgaatcttggttttatcattcttacctttgggctggagttcaatattaccatagcgagtgtgatcggtgtgatcattgcttttgtggtataccgttttatccgttagagaacatacgtcggagaaggcagaaggagacttatgcctgaaaaattaacacaacatgtaacggatttacagctgccttatgagagattcttaaacttcggaccggagaaccttacggaggcggaacttctggcagtcatcctgcggacaggaaccaaagatacttccgcagtggagctggcagaaaaggtcctggcactggcaaaatatcccagggaaggacttttgggtctgcacgatgtaagcgtggaggaattgacacagatccgtgggatcggcatagtgaaagcagtgaaattaaaatgcatcgctgaattatccaatcgtatgagccgggcgagagcaagcaccgggatctgttttacccgtgcggatatggtggcggaatatttcatggagaagctgcgacataaggatacagaatgtgtgtatctgctctgcctggatgccaagggacagttgatccgggagaaaaagctgtcggacggctgtgtgaatatggctctgatctctcccagagagatatttttagaagcattgaaagacaaagcggtgaatatcatccttgtgcataaccatcccagcggtgatccgacgcccagcagagcggacagagaacttaccgacaacgtggctggagcgggagaacagatggatattccactgttagaccacattattatcggggataacaggtatactagctttaaagaacaaaaattattgagatgatataagaaaggaaaacgacagtggcaaacaacgcattcggtatcgacctcggtaccaacaatataaaaatctataatcgcaatgatgacaacattatgatcgagaagaatatgattgccatcgagaacaaaaatactttatttgcttacggaaactctgcatttgaaatgtatgaaaaagcgcccagtaatattcatatttcttatccgctttccaacggtgtgatcgcggatattaaaaatatggagactttggtgaagtattttatcggagatctgcaaaaaggcaataccaagccttccgatttcttcattgcggtgccgacggatgtcactgaggtggaaaaaagggcgttctacgatctggtcaagggagcaaacgtaaaagctaaaaagatcatggtagtggaaaaggcggtagccgacggcctgggactggatatcgatgtgaaaaattcccagggtgtgctggtggtaaatgttggttacgagaccacggagatctccattctgtctttgggtggtatcgtattaagccgtctgatcaaggtgggtggtatgaaattcgacgatgccatccgtgccgcggtcagaagagaattctcactgatcattggtggcaagacagcggaaaatgtaaagattgccctgaaagaactggaagaagagggcaagggtgccatcgtatacggcagagatattgtgaccggtcttccggtagaacgtgagatccccacaaaaatggtggatgagtccctggaagagcatttcaatacgattatcgataatgtaaaggtgattttggagagaactccgcccgaactggcagcggatatttatcgtcacggcatttatctgaccggcggcgcatcccaggtgaaccatttagctgagagactggcaacaggtaccggactgcatgttaatgtagcagagaatcctctgaccagcgtggcaatgggacttgccaagatcatcaaggatgataactataaatctgtagcttacgcaattgaagggatgagtaaatgagcccagtcgtaaaaagaaaaggggagaggtttactttaccgagtaaatatctcctttttattttaactatcctgtgtactgtaatgatgttggtgaccttcgggaccaatgtgtttaaccgcccgtttaaccgtgtggtgggatatgtgatcgttccctttgaacagggcatcgctaaggcgggagaatggctatcaaaccgttcggatgaactggtgcagatccgcacacttttagcggagaacagtgccctgaaggagcaggtggcatcgctcacggaggaaaacactctgctgcagcaggacaaatatgaattgaatgaattaagaggcttattggagctggatgaggaatacggtgattataataagatcggagcccggatcatcagcagggattccggcaactggtattcttcctttgttattgataagggatccaatgacggactggcggacgatatgaatgttatagcggggggaggcctggtaggccgcattacttctgtgggcccgaactggtccagagtgacttcgatcatctccgataattccaacgtcagcggcatgacactggctaccggggataacctgatcgtatcgggagacctgcagcttatggcgcagggagtcatttcctttagcaaactggtggacagtcaggatgcggttgtggagggagataaggtagtcacttccgatatcagtgacaaatatcttccgaatatcctgatcggttatatcagcacgatcaataaggataccaacaatctgaccaagtcgggatatttaactccggtggtggattttgaacatctgagtgaagtcctggtgatcacagataaaaagcaacagattccaagcggaggaaacacggatggaaaataatagcagtatcctgcgaaaagtgattgtgactctgtttgttgtcctgtgcttcattttacaatgcagtgtatttaacagccttgcgctgggagggatcattcctaatctgatgatcattctgacttcttctttcggatttatgagaggggaaaaggaaggacttctgatcggttttttcagcgggctgttatgcgatatcttttttggcagttttttaggtttctatgccatgatcatgatgtacataggatttataaacgggaaattctgcagaatcttttatccggaggatattaaattgccgttggcactcattgtggtgagcgatatttcctatggactgttgtgctatattctgatgtttcttctgagagggcgttttcatttcccgtattattttacaagagtgatcctgccggaagcactctataccattgttgtaacgatcgtgttatatcctctgattctgaaagtgaaccagaagctggaggaaaaggaaaaaaggagcgcacagaaatttgtttcatgaaataagagatcacatcataaatattgtgaccagcagactgactgtacttaccataatgtttttcttttttgccggagtactggtctatcgctgttttaatctgcagatcatcaatggagaagagtacctgaatgattttattctgcagattgagaagacgagagatattaccagcaccagaggccggatcctggatcgtaacggtaatgtactggcggaaaatgaactggcttattccgtgaagatcgaggatgtatttgagtcaagccggaataaaaatgccgaggtgaatgatgttgtgtaccgactgatcaagctgattgagaaaaacggtgacagcgtcatcacggattttaaaattgtcattgatgaggatggggattatgtctattctgtagatggaaccgcattgctgcgtttccaggcggatgtgcttggttataagacggtagacaagctctctgaagaagagaaggctatgacagcccaggaactaatggaatacttaagccgggcaaaaggttttgccatcggacagtatgaggatccggaagatcgtacttcaccttttattgtcggaaaaggttatacgaaggaagaatggctgcagatggtgaccatccggtatgccatgaatctgacctccttccgaaaatatgtgggaactaccgtggcaacgaatgtcagcgagaaaacagttgctgtcattatggagaattccgatcagttagacggtgtttccattgtggaagatacggtgagacattacatagacagcaagtatttcgcacatatactcggttataccggcaaaatctcttccgatgaactgacggatctgaatgaacaggtggtggcagaaggcggaagcgaggatgcctataccattaatgatgtcgtaggaaaaagcggcattgagtcctatatggagaccactctgcaggggaccaagggcagtgaaaaagtggtggtagataataccggtaaggtaattaccatcctggagcggaaagaggcccagccgggagcggacgtctacctgaccattgacaaggatcttacggaagcagtctacaatattgtggagcaaaaactggcaggcctggtatccagcaagattatcaatgccaaagagtttaatctgccggaaaatgcgaaaagctcctcaattaagattccgatctatgatgtatattttacaatgatcaataataatattctggatcgcaaacactttgaggcagaggatgccggtgaaacggaacgggcggtatatgcggcatatctggagtacaagcagggtgtctatgataaactgaattatgaactgacagaaggcggaactccttataacaagctttccaaagaatatcaggtataccagagcaatatcgtaagtctcttaagagacgacggcgtgatcatgaaggaacttgtagatgacaatgatgccacccagatcgcatgggccaaggatgaagtcatctcgctgaaggaatatctccagtattgcattgccatgaactggatcgatgtaagcaggctggatctgaatgaaaagtattcggattctgcggaggtgtataacaagcttcaggagtatatcatagagacaattgagcatactacagaattccaaaaacggttttacaaatatatgcttttaaatgataagatcaccggaagacagatctgcatgctgttgtgtgaacaacgtgtggtagatattcccgcagaggatgaagaggcattgtatgccggtaaaatgtcggcatatcagttcatgatgaaccggatcaccaatctggagattacgccggcacagctggcgctggatccctgcaatgcttcggtggtcataacggatgtcaataccggtgatgtactggccatggtgtcttatccgggatatgacaataacaaaatggcaaatactgtggatgcggaatattatgcccgtctgaacgcggacaaatccagtccgcagctgaattttgccacacagtataaggcggcacccggatcaaccttcaagatcgtatccgctacggcgggactgatggagaacgtgatcaatctgcagaccaaggtgaattgtgtcggaaccttcactgagatcactccgtctcccagatgttggaagatctccggacatgggtatgaaaatgtgacttcagcgatcaaggattcctgtaactatttcttctataatgtgggttaccagctggcaacgagcagcggtagttacaatgaggaagcaggtttggagacattgagcaaatatgcggatctatacggtctgaccgataagtccggggtagagatcggcgagtatgcgccggatgtatctaccaaggacccggtgcgttccgccatcggccagggcagtaacagttatactacggtaggtctggccagatatgttaccacgattgccaacagcggaacctgttataatctgactttgctggataaaacaacggattcccggggaaatcttctgaaagaatatcatgcggaagtgagaaatcagatcgatctgccgcaggagtattggaatgcgttccatctgggaatgcgacaggtagtggaaaataagaaatatttcagcgatctggcggtaaatgttgcaggtaagaccggtacggcagagcagacggcatccagacccaaccatgcacttttcatctgctatgcaccttatgagaatccggagatcgccatcgcaacgagaattccttttggatattcttctgattatgcagcacagtttaccagagatattattaagtattattatggactggcagaggaagatgatctgatcaccggcaccgcagattcactggataatgcagtatccaacgagatgtaactatccggagtcaggtaaacacgggcagatgaacgtcgaatgctggcattcgtaagagaatctgacagggtttatatgacgaagtaaccacattcgcaaaaggaaagctttaaagaagcgattatgcgaatgtgggactccggatagataaattaaaaagacaggtacaagaaaatgaaagatgcagtattgatcaaaagctttaccaacggaatcacgcttttaatgagagaagatgcttccctggaggaaatcctgcaggaacttgcagtgaaattcaccgaggcaaagaatttcttcggaacgtccaccatggcattgtccatggagggacgtgaagtcagtgaagtggaggagattcgtattctggataccattcgggaaaacagtaatgtcaggatcgcctgtatcgtcggtcatgatgaagccacgaacaaaaactttattaaggcactccagcatatggagaaaaagctttccggcggtgatgaggggcagttctataaaggaactctgaaaaaccgtgaagtgatagagacggagaacagcattgtggtcctgggggatgtataccccggaagtgctgtgatgtcaggcggaaatatcattattttaggaggactgtacggggaagcttatgcgggcggaaccggcagggaagactgctatatcgtagcgcttgaaatggagccggaaagattaaaaatcggcgatttcaaatataaaaccaatgcgaaacagtcgaaatggggtatacgccccaaagtacaaccgaaaattgcacacctgaagaatgggaagatagtatttgatccccttacaaaagaattactgggttctttttaaagaattcaggggacgacaaaatcaaacaggaggaatcccatatggaacaaaatgtttccacggagaagaaaagctccgaagtcattgtcgtcacttcaggaaaaggcggtgtaggtaagaccactacatccgcaaacgtcggtacaggtcttgcgaaggcaggctgtaaagtctgtctcattgatacggatatcggtttacgtaacctggatgtggttatgggtctggagaaccgtatcgtatacaatctggtagatgtagtggagggaaattgccggatcaagcaggcactgatccgggacaagagacatcccggactttatctgatgccctcggcgcagaccagagataaaacggcagtaacacccggacagatgatcaaagtgatcgatcatctcagagaacagtttgattatattattctcgattgcccggcggggatcgaacagggtttccaaaatgccattgccggagcggacagagcactggtagtcaccacaccggaagtctcggcaatccgtgatgcggatcggatcataggcttgctggaggcaaacggttttaaacagatggatctgatcattaacagactacgaatggatatggtacgcaggggagatatgatgtccgcggatgatgtggtggatattctggcaatacctctcatcggaatcattccggatgatgaaaatgtggtcattgccaccaatcagggcgaacctttagtgggaaccgatacccccgcaggaaaagcttattttaatgtggtcgaacgactgaggggaagagagattccctttctggatttcgaaaagggagtatctttttggacgaaagtaaccggtatttttcgaaaagcataggaaggggaaggatgaatatgaagcatttttttcgcaggaaaagttcctgccaggttgcaaaagaccgtttgaagatccttctgatatcggaccgggtaaattgttcccccgaaatgatggaactgatcaaggcggacattaccaaagtgatttccaaatacatgagaatcgataccgaccatatggagatagagatacaggcaaaaggcggcaacaaaagcgggagaaataaatcccccagcctgattgcaaatataccgattcttgatctgcagaagactgcgaaaataccgtaagtacataagagagaaaggccggataaatgtttaagaactatagattgcgggattatgattttaaattaataatactggtgctggccctgtctgccgtgggaattatgaccatcggcagcgcggagcctgcccagcagagcaggcagatggcaggagttgctgccggcgtggtgattatgatcgccctttctttttttaattattctgtgatactaaaattgtactggctgatgtatatcggcaatctggtactgttgggactggtcattataatgggtgaggaaggcaacggtgcgcagagatggctgaagatcggcggactacagtttcaaccttcagaacttgcaaaaattttattgattttattctttgcacagtttattatgaaatataaggaaaagctgaatacttttcgtgtgatcgcttcaattgctgtactgatgggagtgccgtggatcatggtactgaaacagccggcactgtctaccagtattgtactgatctttatcttctgtgtgatcctgtatgtcggaggcatcagttataagcttgtcttcggagcattggcggtagcgataccggcggtggtgatactggtatctctggcaatgcagccggatagtaccatattggaaacttaccagaaaaatcgtatccttgcctttgtaaatccggaagaatattccacggatctggcataccagcagctgaactccgtgatggcaatcggttccggcgaactggatggcaagggatataaaaacaatgagatcacatctgtgaagaacggcaatttcctgtcggaagcggaaaccgatttcatatttgcggtaatcggtgaagagttcggatttaaaggaagtatagcagtcattattcttctgttgcttacggcaatggagtgtatttccgtagcagtaagggctaaggatgtcgcggggactattattgcggcggccatggggggactgatcgcattccagagttttgtaaacataggagtggctacatttattctaccaaatacgggacttcctttaccgtttgtaagttacggactgacatctttactcagtctgtatataggaatgggtattgtactgaatattcgactgcaggcaaggaaaagctgagaataatagaagaaaagaaggggtatagaatatgaacattgcactgatcgcacatgatgccaaaaagaaattgatgcagaacttttgcattgcatatcgtggaatcctgagtaaaaatgaattatatgcaaccggtaccaccggacgactgatcgaagaggttacgaatctcaatgttcacaaatacctggccggacacttgggcggagaacagcagattggtgcgcagattgagcataatgaaattgatctggtaatttttttgcgggatccgctggcaccgaaggcacatgaaccggacgtgagcaatgtaatgcgtctctgtgatatgcataatattccactggcaacaaatctggcaagtgctgaactgttgatcaagtccttagacagaggagatttagagtggcgtgaaatgtataaatagattttgcagaatacgattttcctgcatagctgcgttactttgcgtgtttctgctgacaggctgcggcaatatttcctatacatttccgtacaatgtaaattccaatgtcagcagctttaatgtgctggcgggaaccggcaccgggaaagcagatgcgtttgcatcggatctctgtgtggttacggaagaccgaatgggggatggaagcgtggatatgacgcaggcatccgcggcagtgctgtttgatgtgaacaaccgtgaagtgttgtattccaaaaatgcacatgaaagattatatccggccagccttaccaaagtgatgactgcactggtggctctgaaaaacgcatccctggatacggtgcttacagctacggattccgtgaagatcaatgaatccggggcccagctgtgcgggctgaagtccggagatactatgacacttgatcaggcattacatattcttttaatgtattcggccaatgatgcagctatgctgattgcggaaaatgttggcggaagtgtggatcattttgtggaaatgatgaacgaagaggctatgcggcttggggcgactaacaccagctttgccaatccccatggactttcggatgacaatcattttaccaccgcatatgacctttacctgattttcaatgaagctatcaaatatgattcttttaatgaaatcattcatatgacttcttatcagacaaccttctacgacaaggacggcaaggcaaaagagcttacggtgaataataccaaccgttttttgaaaggtgacttcaatgcaccggaaaatattaccgtcatcggcggtaaaaccggtacgaccaatgcggccggacattgcctgattttgttgtccagagatgtgaacggcgcaccgtatatatccgttatattgaattcatcggccagcgatgtcctatatcctgagatggtacaattgctggagcaaatcaacaaatagatgttgttttttaagggtatataaactataataaagtaaataggttgcgtgaattcctataaattttacgacaggagggttacaccaatggttcagttgattgtaggcaaaaagggtaagggcaagacaaagcagctgttggacaaagtaaacagcgaggtaaaggatatttcgggcagtatcgtatatctggacaaaagtacgaaacatatgtatgaactgaacaacaaggtgcgtctgatcgacgtttcccgttatatgatcgagaatgcggacgaatttttagggttcgtgtgcggtatcatttctcaggatcatgatctggaacagatgtattttgacagctttctgaagattgcagtactggaaggcaaagatatttcagctgtgattgagaagctggacaaaatgagcgatttcttccaggtagattttatcctcagcgtatcgatggatgaatccgaattaccggaggctgttaaggataagatcatcgtatctttgtaagaaaacgtattataattttcacgtatgagaagcctcggatgccaaccggggcttctcaagtgtaaaggaggtttcctgatggcagaacgacagaataaagtaaaaaaatacagaaaacctctgaaccttaatatcggcatgcttatttttggtgccatttttatttatgtgatcatttgtgtgatcatgtattttcagacagatcacattgtccgttatgaagtaacagaaggctctcttgctacaaataatatttacaaaggaattgccatccgcaaagaagaggtagtcagcacggatactgcagggtatgtgaatttttatgcgcgagagggagagcgtgtcgctaagggagatacggtatatattgttgatgagaccggacggctgagtcaggaattagaagatgccagccttggggaaaacaccctgagtaatcaggaactttccgagttccgaaatgaaattgtgaattttatgcatgggtatgatgatgttacttatgaaagtacctatgattttaaatattctttaaaaaatacggtattaaaactggcaaatgtaaatatgctgcaaagcataaaaaatgaaaacggcggttcaacagccaatattgtcaatttttgctatgcacccaccacgggaatcgtagcttattggacggatggctatgaaggcctgacggtagaaggtgtgacggaggctgtttttgatcataaggactacgagaaaaaacagatgctgggtaatgagctgatggcagtgggagatccagtgtacaagctgtctaccgatgagaactggtctgtggtgatccccatagatgcggaacgtggtgcccagatccagcaggaagattatgtaaaggtccgttttctgaagaaccagtatgaatcctgggggcaggcaaagctgttcaccggaagtgacgggaacacttttttgtctcttacctttaccaattctatggtaacatttgtatccgatcgtttcctggatattgagctgatcttaaacgatgagacgggactgaagatcccgaattcctctattgtggagaaagaatttttcctgatcgacgaagacttcgtttcgatggatgaaaacacggggacccagggtgtcatcagacagtgctatctggaaaacggcaatatatccagtgaattcgtggagacggatgcctatagctatgatgagacggaaggcgtgtattacatggatacttccgtgcttaaggcgggagatgttctgtataagacggacagtcaggatacctatacggtgagcaaacgtgcaacgctgatcggcgtgtataatgtcaacaagggatatgcggatttcaaacagatcaatattctgtatcagaatgatgagtattccattgtgagggcaaacacaacctatggtctgaatgtatatgactatatcgtcctggacggttcggcggtatcggatgatcagatcattacgaatattaagaagaccggtaccaataaggatactacggtcagtggtgatgatatggccccggagaacagtccggtgccggaagggtaagataagctggaaaggacggcggatatttaaaatgcagacgactgagcagagcaaaacactggcaaaaaattataatgccgtaaaggaaaatataaaaaaagcctgcgaacaggcaggcagatcacaagaggaagttactctattggcggtaagcaagacaaagccggtggatatgcttatggatgtctaccatgcgggtgccagggacttcggagagaataaagtacaggaactggtggaaaagataccacagctgccttcggatatcagatggcacctgatcggacacttacagcgtaataaagtaaaatatattgtggacaaggtctacctgatccacagtgtggacagtctcagactggcagaggagatcagcagggaagctgtgaagaaacaggtggaagttaatattctgattgaagtcaatgtggcacaggaagagagcaagtttggtaccacaacagaagagaccgaaaaactggttcgcgatatttcgtttttaccaggtgtacatattaagggacttatgactatcgctccttttgttgaagacccggaggaaaacaggatatattttcggaaacttaggcaattagctgttgacatcggaaataaaaacattgataatgtttctatgagcatactttccatgggaatgactggagattatacggtggcagtacaggaaggttctgcaatcgtcagagtcggaaccggtattttcggagagcgagattacagtaagacgatataaagaatattttaagaagattttaataaaggagactcgtaaacatgggtgtaatggataagtttctgaattatatgaaactgaacgatgaagaagatgaaggtttctatgatgacgattatctggatgatgaggaagaagtagagcctgtgaaaaaattcggcgctgccaagaacagacagcaggcacaggatgaggaggctctggatgataagggaaagcgtacttcacagcccaaggttactccgatccatcgtaccgttaccaagaaaatgcccggaaccggcatggaagtctgtgtgatcaaacctacttctgtagaggatgcacgggagattacagagacacttctggcgaaccggacagtggtactgaacctggaaggtctggatgtggatatcgcacagagaatcattgattttacttccggatcctgttttgcgatctcaggtaatttacagaaaatatcgcattatatatttatcatcacaccggcaagcgtagatatctccggtgatttccaggatattttcggtggcgccggatcctttgaaatgcctattaacaacggaatgtcataaaatgtcataaacggataacttcctgcagctggctgtaggaagttttttaaaagaaaaagaatgaaaacacagaaagaacggtttggaatcaaaccggagggtgaaaatatggcacagagattaccggtgctttacaacaaaaagccttgctacgatattgtatttcagcagtcttttgacggcttatgggaagaacttcaggaactgggcgcttctgagaagaaattatgcattgtcacagattccagagtggatgaactgtacggagcgcaggttgcagaactcttagaagggaaatgccgcaaaattgtaaaatatgcatttcctgccggagaggaaaacaagaatctggagacggtaaaggatgtatatcgttatctgatcgaagagggctttgacagaaaggatatgctgttggcactcggcggcggcgtgaccggcgatctgaccggtttcgttgcggcaacgtatttaagaggcattgatttcgtacagattcccaccacattattagcgcaggttgatagttccattggcggtaagacaggcgtggattttgacagttataagaatatggtcggcgcttttaaaatgcccagattggtatatatcaatctttcggtacttaagacactggaagagagacagttctattccggttttgcagaagttatgaagtctgctctgatcaaggatgctttattttatgagtggctgatcgagaacatgtatgagatctgcgagagagagcctgccactttggaagagatggtgatccgtacctgttctattaaaaagatggtggtagagaaggatcctaccgaacagggagacagagcactcttaaatctgggtcatacgatcggacatgctattgaaaaggctaaaaactttgaattgtaccatggggagtgcgttgcactgggaaccgtggcggctgcttatatttcctggaaaaaggaaatgctcagcatggaggaattctatgagatccgcgatatgtttgtaccgttttatcttccgatctccgtggatgatattgatccgcaggagattctgaagcttaccaaatccgataaaaagatggaagctggtaagattaaatttattctacttaaaaagatcggtaaggcagtcattgacagaaccgttacagatgacgagattctggctgcgatcgaagaaatcaattttagtgaagaggatgcccatgaataaagaaaaaaagagtcgtattattatgttacttatagatgtgctgatcacggcggtacttttggtattcgatcaatttacgaaacatctggctgtcgtacatctgaaggggcaggcaccctatgtacttattgacggtgtactggagctgcagtatctggagaacagaggctctgctttcggaatgctgcagaaccagaaagtgtttattctgttcgtggggatcgtattcctggcagtgcttttgtttttcctgctcaagcttccggaacagaagaaattccggatcgttcatgtcctgctggcggtgatcattgccgggggaatcggtaatatgatcgacagattccgtctggactatgtggtggattttatctccttcgtactgatcaattacccgatttttaatgtggcggatatctatgtggtggtggctaccatcggcctgtttatcctgtttttgtttgtctataaggagaaagatctggaatttctgaattttaagcagaatcgttatcgggagatgaaataatggaagaactccgatttcagataacggaagagatggaagaggaacgaattgacaagtgcatgagtctgcttgtggagaatctgtcccgctcttttatccagaaactgatcaaagacggaaatgtgctggtaaacgggaaaccggtgaaaggaagctatcgggtcaaatgcgaggatgaagtggtgttttccgttcctgaatcggtggaaccggacattgaaccggaaaatattccgctggatatcctgtatgaggatgcggacctcattgtggtgaacaaaccgaaaggaatggtggtacatccggcagcgggacattataccggtacactggtgaatgcgctgatgtatcattgtgggaatgagctgtcgggaatcaacggtgtgctgcgcccgggaattgtgcatcgcattgacagagataccacaggatccgtgatcgcctgcaaaaatgataaagcacacagatgcattgcagagcagctaaaggaacattccattaaccggagatatcgggccatctgtttcggggaattggagcaggaggaaggaaccatagatcagcccatcggcagacatccgaatgaccggaagaagatggcggtcaattatcagaacggaaaacgtgcagtgacccattaccgggtattacagagattcaagggatatacttatatagagtgcgtattagagactgggaggacccatcagatccgtgtgcatatggcaagtatcggacacccgcttttgggagatgaggtgtattctaaccggaagagcccctttaaattacagggacagaccttacatgccaaaacattgggatttatacatcctacgaccggagaatatctggagatcgacgcacctctgccggaatattttgaacatcttctgacagtattggcgtgagaaatgaggcgtttatgaatctgtttgacattttaggacctgtgatggtcggcccaagcagttcccatactgcgggagctgtccggatcggatatatttcagaaaaattacttcaggaccatgtgaggaaggctgagatccttctgcatggttcctttgctaccacgggaatcggacacggtacagacaaggcattgattgccggacttttagggatgcatccggatgatatccggattccggcaagctttgatctggcccaaaaggccggaatggagtttactttttccacggttaccctaaaagatgcccatccgaatactgcggttctgcggctgtccggagaacacggtcggaaaatagaggttcaggcagcatccatcggcggcggtcgaatcctgatcgcaaaattagacggcatcgaagtgaatttcactgcggaaaagcccacactgatcgtacacaacgtggatcagcccggacatgtggcacaggtgacaaccatgttggcagaaaaacaggtgaacattgccacactgcaactctaccgggataaac

SEQ ID NO: 11328 - DNA, 5946 bp, Unknown
  gut microbiota DNA sequence
ataagaagcattgaatgaaaatgccttttctgcggatgccacaattccatatcggctgttgttaagctctacatattcacaatcgtaatggcttccattttcctgtggacggatatagtcctcatgtaaatcccctacatttgcccggtacagaccgtgactcgctgcctgatgcttgtcacgatagctctcctgtggtcccattccaaagtatctggcatctgaaagttttttatccaggaacattctcacaccaaatctcggaagatctgggaattctccatcttttgttgcttctatgtctgcatcaatctttcctgaagcatctattttccatgtaatcgtcacatcaagaatcttctgcactgtctctgccacaacagaagcatggcttacaatcttcacaccatgttttccctgcacaacctctgtcgtataagctcttgtataagccttgtcatagtgggcttttttccattcagctttgatatacatatcgttatctgttggtgctctccagatatttaattccatcggatggttcaaatattcccttcctgcaaatttcatctctgtaaagagtgcagtacgtcggtcgatggtatacgcaaattcacgacctttgatgtgaatctgtgtatcattttcatttacctgtaattcagagtccactgctgtcttttgcatccatttctctgcaagtttacatttagcatcatctttacttacctcaatttcatcaaatccaagaatatggtcttcatccaacagtggcaattcttttttcagatggtaaataagttttaaataacatttcccattctctggcacactgatcttcaggtttgtttttccttccccgtgtggtaccacagaaaattccgaaagtatgtctttgctgatcacaagaccatcctgtgtcagttcataactgatcttcacataatctttcaggtcatcaaaatccatgtagttgtgaagcaccagctctccactttctttatcataggaaacaactcttacagggcggtatacattcttgtattccaacagtcctgtgtgtacagttctgtccggatataccaatccatccatacagaaattgccgtcatggatctcttctccatgatctcctccataagcatagattgtctttccattctcggcagtaccatgagcaattgcatggtcacaccattcccagacaaaaccaccacacattttatcgttgtcctgaatcatttggaaataatcttcaaaatctccaggtccatttcccatactgtgacagtactcgactagaaggaatggcttgcttccgtccttgtccagatattcctgaatttcggaaagtgccgggtacatccggctgtacatatccagattgctgtaatcatatgtttcatcataattacggtatcttgcactctcatattgtgtgatgcggtctggatcataattctttgtccattctagtgctttttcaaagttgcagccataagcactctcatttcccattgaccacataacaatacagaaacggtttttgtcacgttccaccatgagttttacacgatcaacgattgcctcttcccataccggatcatctgcaatcttctcattccatcgcttgaaccgattgtaatcggtgtcttcttttctgtaaatcataaatggaccatgagcttcaatatctgcttcatctatcaccatgaatccatacttgtcacacatttcatagaaaaatggtgcgttcggatagtggctggaacggatcgcattaaaattatgctgcttcattaacgtaagatcggttgtgatctgttccagactgattgtaaatcccgtaaccggatcggaatcatgtcgattgactccacggaatttaatcttctgtccatttagataaatgacctggtctttaatctctacctttcttaatgcaatgtgatccacaattacttcattttctgtttcaagaatcagtttatacagatatggattttctgtattccaaagttccggacttgcaatttctaatacagctgttccttcttcatcaatacttcctagtgctacaactgctccatttttatcttcaatcgaaatttttacatttgttggagagtagaatttcacatcaagttctacctttgcaagtatatcctcaatctttgattttatatgataatcgctgattgcctgctctggacgtttcaaaatgtacacatcccggaaaataccactcatacggaatttgtcctgatcttccaaataagaaccatcacaccacttcattaccaacactgccaccgtatttgttccatcctgaagtacatctgtaacatcaaactcactggtcatatgggaaacctggctgtatcctacataagaaccattgatccatacataaaagcaactgtctactccttcaaagttcaaaaaagcttttgatgccttctcatctctactgtactcaaaattatgtacataggctccacacggaatatcctgcggcacatatggtggatcaaatggaaacggataccggatatttgtatactgatgtgtatcatatcctgccatctgccatacacttggaacccgaatctcatcaaaattttctgtatcataattcttctcaaagaaagaatccttaatattatagatgctggtaaaatactggaatttccaagttccgtttaataactgcatacggtctgattcttccctgtgttccaccaaattatccattcttttggatgctggaatataataggctctggccggcattgtgttttcgtgcagtacgtttaagttttcataataacgtggtacaatcataaatagctctccttcaatacatatacttttttgttttttgcttttctaaaataaaccttaatgctttacttatatgcttgcattcctttgttatgttatatatagcttatcttattctgcaaaatatgtctatgaattggattggataaaatatgcactaaatgatacaataataaaaagtgtgaaaagaggtgctgctctatgtatatgaataccggttatctgaatcactcccacatggatttcaaaaacaaaagtcgtccactgattgtaggaagctgtggcacttatcgcctttccagctatccaaaattgccaacctaccgtccaaagggacgcctggattatcagatcatctatatcactgctggttgtgggcattttcattttgacaatgtagataacgaaacgattgttcccgccggtaatattgtgctgtacagaccgaaggaacttcagaaatatgaatattatggagaagataagacagaagtatactggattcattttacaggtagcaatgtaaaaaatatcttgcgtcagtatggatttccggataaagaacgagttttccaaatcggcacatctatggaatatgaacggattttcaagcgtattatcatagagcttcaacactgtcagaacgactatgaggaaatgcttgttcttctgcttcgtcatctgctaatcaatttccaccgagaactgacacgggaacatattctgaaaagcgaatacctggatcaggaaatgaacactgcagttacctatttcagcgaaaattataatcagaacatcaacatagaggattacgcagcctcacgaggaatgagtgtcagctggtttatccggaatttcaaaaaatacaccggttccacaccaatgcaattcatcgtaggaacccggatcaacaatgctcagatgctacttgatgcaacaacctattccatcaatgaaatctctaaaatcgtcggatatgataaccagctatatttcagtcggctttttcacaagctgaaaggatattcaccgagagaataccgaaagctgagaaataaattctgaaatccacaaagaggataccatcgaatcatcaaaacaatgatttgtggtatcctcttctcacttttgcaattcttattttacaaactcactccttgttcaccatatatcagtgcaaccagttataaggagatctgtttcctttctcctgcttttcggattctctttgtgggatattaccttccgccgcttcctgcgtcgcatacaacctgttttcccgcaacctgatgccaccaccgtcctcaaaccgtagcgtatagaactctccacttttcttggttacgattgcctttctcacaaatcggttactctctaggaagaatactgtatcccaacctcatacttcatagcttatcacctcaagttgctacttctgaatgattcctttataaaatgttaccgcatctgccagatctttatcatcggggtgtccttttgcaatccctccaatcagcttgaatggtccgaaggtatcgtaccccttacaggaaaatttcccgacaaccttcccctgcttgctttttacaacttcttctattgactggaatgccgcactgccaccgcaggtgcagagcagaaatacatttttatttgccagtaaattggctaaagcgaaatttagtactgtctgatgaaattttccataatataccccggaagcaaaaccaatcaagtcgtatcctgacaaatctctttctttttccttcgtggcatcgatcagatctaccacattttccccggcgattgcttccaccacctttttggtattttcatggtgcaccgatgcatagataattgctgctttcatgtactcattctcccttgtgtaaatccatctcattctggatccaggtcataatcacatctaccagatactcctgttgcacctggctcagttccgccctggctgcatcttatgccatttccgtatgcactctctgcaacacgttgccgttgcgtactgttcagttctttgtcatgcccagcctctatttccggttcttatattctgccttcattttttcgatgggattgattctcttaatttgctctgcttccacgacatccttatccaactccatcagcttgtttaccctcatgtgccggttattgtgactgtcttttttgctggcattttcccacggcagctttcccggtccattatacacctcgtatatgttaccgttcttcttcatatacaatacaattagatagtccggttcgtggttgattacaatatcatcctgctgcgaaatcttaatctgtacctttcgtccttcgatttccccatcatgaatttctgcagatgccctgtacagttcaattccataataatatgcagccatcacttcgccgatacttcctaccagatgtccgtccagggtaaagtgtcttccagggaactctgcttccagctctgctacgatttctacaagtttctgcacctgcgttttaacggcatccattttttcttgtgtgtaaacaatcttatccattatatgttaccacctgtattatttgcctccacaattgctacagtgacatttttcacttacatatttttcgatgcttgtaccccttcagtctgatcccttttagtctgcctcccgatataggtaaaccataccataatacacttccatccacaactattataggaaattatagcacaatctgtctgatcttactttgagcagagcacccatccccagaagatgataaatccaagcggggggaatatcagcgatactaaaatggcaaggatcacgcagattgctgcaacaactccggaacaatcaaaactgtgtccataatttctgttatcacagttacaataaggtccttcacaatggctgtcatggtgagcgttgaaatcatatccgttattcataaatcccatccttccttaaatttaaagctttgtttgttttgttaagtcttctgatgctataaaactagcgttttttgtgtcccatattctgtacacataaagtgctatcctcagtgtaattcaagaaaaaataagaaatttcacagagt

SEQ ID NO: 11329 - DNA, 20040 bp, Unknown
  gut microbiota DNA sequence
cctctttctggatcacatatcgggattcggattcttctcccacagattcagacacctatgggaagtgggtatgtacctttactgacagatcaaggattgcccagatctgtcaggatgctgtggcggaacacatcatacccgaaagcaagtacacggatgcagacgcgggacagtgctgtttttacttaaacggaacagatcttgccgcgcaggagaaagttttacgatacctgatcctaaacggtctgatccctgagacagtttatgggcgactcgacaatatcccatttgaactggaaaagtggactggcagggcttcgactgtcctgttctgtctggatcactttatgaacctctataccggagaatttattatttaataaaggatgaattaacatgagcgtagaattaaaattaccaccgatctatcacagaaatggaaaagactgttatctggatccgatcaggcagaagttaatctatatcacgccggaggagaccgtccggcaaaaagtaatctcatatctgacagataccctgaaggtgccttccgatatgatcgttgtagaacaacacctttcccattatggactgaacacaaagaaacgtgccgatattgtaatacacaagccggataaggacagttatttacacggcggttcaatcaacttaacaagtaacacacctttcagtatagtaatctaacatagaaactaatccaaaacgggttagtctttctttatttattgcaaaattcataactcttcgctgacaaacatatgctattcgattacccgtataggctgtaatccttgctgtatccttatctactccgagttttatcaagttatttatgcggttctgcggggttttccattgtttccaaatgcacatgcgcagtctgcaacgaattcttgcgtccatctctttacaaagtgttttcatactaatctccattccgccgccttcagccggcggcacaaatagtaatgaaagtgttttaactctttacgttgtgctttaaaatagtttgtaagaagctacactacaaagcacgggaggataagttgtaacaactttcttcgttttagacagcatactaatcagtataagttctgccttttcaagcacaaataagtggtattatgaatccgtacactaagaattgtttaagcaccttggtttaattgtgtggcagttcagtcaatggcttcttattatttgtgaaaggagtccgtctatgaaagttacttatccgccacatttactctgctactacaaaagtgatagttattagatttcgttgttctttgccaacttatctctcgtagcctagccttatatgtgatttctgtccgtcggaccggagatttgcttacagcttccttcagattccacctcacggtggacacccttgctgttcggctatacacttcccactatctgggcgtgttcgggacttacacccgttagagcgcgcccatggcgcgcaaacaaagaaaagagaggggcctcggcaccctctcccgatacagaagaaaaatgttgcccctctcataagttctaccttctacctttttattgtctcaacaatatgaatcattttctctaagcattgttcaaaaaagaaacgatagctttcgcaataataatttgcatattctcctttagcaacatcaaattccctatttcttcgacagccccctctgcatagtgtatggaacttacattctatgcagtcttttgcagacttttgcgactgctccacaaatgcaattgattttcgcttttcatcaatctctaccaaacggtcactattaaaattgcctagtctgtattcatctaacatataaaaatcgcacggatacacactaccatcggcttccaccacattctgtataccacagattcctcgttgttcgcaggattccggctgatatccaagcagaattcctatatagttttcaaattgtcttatataaggatgttctccatttttccaatcctcgtaccataagttaaacaactctactaaaaaccgtccatattgttcaggttttaaggcaaatgaacttttccccctaatttcccccaacggatccaaacatgcaatatactgttgatatttccatccctgcctcttataataattatatatttccgtcgcatgataagcagcattctgtgttactaccgtcagaatattgtaatccactccatattgatccataagatctgccgcagacttaatccgatcaaatgtaggatttccatttttgtcatgacggtacatatcatgaagctgttttgtaccatctattgataacccaattaaaaattgattttctttgaaaaatttacaccatgcatcatctagcagatatccattcgtctgcaaagcattattcacccgtattccatgcttgttataatgcctctggtattccacagctttttcaaaaaaagcaagtccacgcaaagtaggctcaccaccttgatatacatagcttattaacccttcagcatgaatcatagtctttctaataacattttttagtgtttgttctgacataaacccatacgaatcctgtgacctttttttcatttcatcacaatagaaacagtaatcacattgcatgttgcacatccctgatgcaggttttatcagtacgctgattgtcggcatatcatcctccctatatttttcttatataagtgctactaatacttttaataccccagccaatatcatcacaaaaacaggattccattttgttttcctaagcagtaccacactgattgcaaaaatcagcaccatgtcccatttaattccatcaatgttgataatgccacttccccaaaaagccgtgacaagtatcagcacacctgcagaagcgatcatagaaaccactgccggtcgcagggaatacaatattccctgcagcgtgtccaaattccgatattttaaatacagttttgccagaattgtaactataatgcatgacggcaggatgcagccgagtgtagccacaaccgctccgggaatccctgcgattttcatccctacaaaagttgcagaattaacagctatcggtcccggtgtcatctgtgagatggtgattagatccgtaaactctgtcatagtcagccactcatgagtattgaccacctgtccctggatcagtggcatggctgcatacccgcctccaaagctgaacattcctatctgaataaagctccaaaacaattgtaaataaatcaatttttagtcctccatccggaagtaagcgttctgatcactccgatcaatccacaggtgatgataatataaatgacattcacctcaaaaaagcatgcagcaataaatgctcctgccataatggcaatagacagtgtatccttttcctttataacaggtgtccccatgtctaacgttacagacgcaattaccgcaccaactcctgcctgcattccttccagcaactggctgatcagccagttactctgaaaggcttgataaaacacggagatcaccgtaataatagcaaaaggcggtagcaccgttccaaaaatagccgtgacagtccccgctatacctgccagcttgtagcctacaacaatggctccattgacagcaatggctcccggagaggattgtgcaatagccaccaaatccaacatttcgttttcttctatccagtgacattcatccacaaactttttcttcatcaaggttacaataacatagcctccaccaaaggtgaacgcacttaaatatagcgtcgatagaaacagtctcaatagtatttttttcttgttttgttctttcatggctagtctctcaatatattttaaaatactacattacctatatgcagaaaacgatgcgatttcctttataactaagtcatcgcatcattttctgtactctcttaattatttatgcacttacttcaatgtctcgtaatccgcatccgtgtagtctttcgtcgcatcccagttaggaaattccaatgaactataatccattccaactgcctccgaagcacgcttccactctgtagttgtatcatttgccagtgtctttaatgcactgtcataatcagtaatactctgggaaataatgccctgcacaattgctcctaagctaggctgtacatcctttacttctgcataaaaatcatttgctttctcatctctctttactaaagtaggaactactctggatgtttcctctgcaattgtgtagtattgtttcatatgctcattggtcatgtatttttcattgatttccggaatacaagacacaaaacttccactttccacattgctctgctgatatccatattgttcatcatacagtgccattaaatattcagctgcttccttgggatgtttggactgcttatagatacccatccacggagataattcacctgcctgaacataagtgtttgttactccgtcaggaacaggaactgccataactccataattcaaatccggataatttgcatcccactgggatacacaccacattccctggcagaggaatgccgcctgtccctgtgcaaataattctcttgcctccggagcacttatattgatagtatccggatgaatacttccatcatctaccagacctttaataaatccaagcgcatcattcatttccttgctgtcgtaaggcgccactccattatccgtcagcactttctgcgttgcagctaccttaccaccagctgctgcagccagggatcttgccataacgtccatacggttcatctgttttccgccatcaatcagaccataaacattgccattccccatctctgtaacttttttacaggcttctctaaactctgaatatgttgtgggaacctccgtaacacctgcctggttcaaaatatccttattatagaagaataagcactgaatgattggcatctgttctgtaactgtataccattcatccccaatatcagtaactccctctgcaaaggcttccggatcaaatttatttcggaattcatcggttacataatcgttaatcggctggaaccacccttcttctaccgctgtatttaaagtaagtcccaccggaatcggaaacaaatcaggtccctcaccagatttaatcatagtaacaatagtatttttgaattgatctactgtaagcatagtatattcaattttaatatcagggtgtgcttcttcgaacttcttatgaaactcctctctttgtgtagcagatccatcgctccagtcaacaacccgaagtgttatttgcccatcggtgttctcttctgttgctgctatgacacttgcattttcgcctgtttcatttccattacctgttgagggcattgcaccacatcctgccagggttgttgctgcaattatagcagtcaataacagtgtaccaagtcgttttaatttcatttctttttctcctctctttgatataaattattgttttcaattaacttttaacagctccggcaattccttccacaaaatgcttctgcattaaaacaaataatataataaccgggattacagctatagaacctccggcagcaatgcctgtccaatcaacagtattttctcctttgaatgcatatagcccaaccgcaagtgtcctagatgacggattattcaaagttaataccaaaggaagcatgaatgcattccaagcccaaatggtttccataatgactactgtcgttgcgacaggcttacacagtttcatcataatatagaaaaatgtctgaaaataattgcatccatctatcttagatgcctcttccaactcatttggtacagattgaaagaaactggtaaacagaagcaaaaagataacatgcgctcctcctgcctgtgataagatcaatccaagcttggtacctaccagattcattcctttgactacttcataggtcggtataattgtactcaccagcggaatagcaatactggccaaaaaaactgccatgcataggtttctgccaagaaatttataacgtcccatagcatatcccgccatcatcgtcataatcagcacaatgataaccgaaaatgctgttacaataattgtattgataaaataagtgccaaaatccgctttctgccagatacgaataaaattgtcgattgtcggctgtaccggaatcaatcccatacggttttggaagaactcattctggcccttaaacgaggcggaaatcatccataaaaaaggatatatccagaaaaatccaacgcaaagcagcaaaccatgtttaatcacagatttaacgatatgaatctttttttctttgctcatctgttccaccccctattgtacattcttctgtagacggtctttcattgcattcagaagtattcctattattataacggctcctccaaagaacagagctgctgcactcgcatagccaagccttggcattccaatctcacttgaaaatgcggttctatatacatacgttgcgattacatctgttgcataataaggaccaccttccgtcattgttttcacaatatcaaataccttcaaagaatttatggcacataatattgcaataattcctcctgtgggtgcaatcagaggcaacacaatatggaagaaagtttgtcttctgtttgcaccatcaatggttgccgcttcatatacatctttcgaaactccctgcagtcctgccagccagtaaatcatatatgttccgcaatccttccaaagcgaaatgattaccaatgtaggcagcgcatactttgcgtttcccagaaaattaatcgggtttttcagaatatgtagtgtgaccaaaagatgattgaccggtccctgaactcccaaaatgaatatcatgataattcccactacagaagcagtcgtaactacaggaacaaaatacattgtacggtataatccacgtcctttcattttttcatcatttagcagatatgcaaggaacaaagacaccgcaagttctaacggaactatcattaccatgtacttaaaactatttataaaagcattccaaaacaattcatcatgcatcagctctttatagttttgtaagccgataaacgttgcattagatgtcattcccgaccaatccaacagtgaatactgaatactgcatataatcggatacccttggaataagatataaaatccaactgccagcgacataaacatccaacaccatagatttaactttaattttcttttaaatcgaattcttcttgttgctgcatcgaccgcatattttgtctttgtcattgttctccccccatttcatataaatacttgcttctgacagcttcttttataggtaaccctgtatcgtagtccaactgacgaggctcatattcctcattttctcgttgtcttgtaaacccttcgttatcccaacttggagtaaaatttttattccagggtctaagagaccattgataaccacgataaagatctcgagttgcattcatatgggtgacaagttttctatgatattccagaattatctccaagtattccggattatctatttcatttaccatttcatctggatccttttttaagtcgtaaaactcatctttgtcaagcagattaattgccaatttatagttctccgaaatgacacctctcataatttgaagcccaccaaatccatcatgatctatctcatatctggtaaactctgtataaacttcactgtttatcttaattgtcgtatcgtatatctgtggaagcatgctctttccttccagtaacttcggaatatgtaatccaaaatagtccatcactgtcggagtaatatcaatatgagatgccggtgttgtaattacttttcccttttcaccacctttaatgatcagcggaatattagtcacctcatcatagatagctgcgtttttagaaaacagcctatgtgcccccaacatgtctccatgatcagaggtatagataaccatagcattgggcatcttttctttaatcacatccagaactcttcccatttcataatcaacaaagctgttacatcccaggaataatgctaatccttcggaactttggttgatctgtttttcatctgctgtcagcttatccccggcccacagttgttgcattaaaggtttatttttcaagtcatctgtaaatttagcagaaggctcaaatttaaaacctctgtacatggtattataaggtgcaggacataacgacggtccatgaggttcgtcatatgataccgtaaggaaaaaatcttcttctttgtattgatccaaaaatctgattgcgcgatccgaacatctatgagcatatgtaaattcttctgaaaaatccggttgaaatgactcatttggttgcctcgaacatacacgttcattttcactcagctcattcagatagcatttcatatcataccagtaatctgcatcccagccttcgggacaacaacctaatccaaaataatccccaccatccaaatgccattttcctatatatccacatttaatgccattgtccgtcagtctttgtccaatagtctttacatttgcccccaatggaactccgttcgttaccattccatttgaatgaggaaacgtgcctgtaaaaattgcacttcttgccggaccacaaaccggttgacaagtgtatgcattctcataccgaattccctcttgcgccagtgcatctaaatttggcgtaaacatttttttattaccataacatcccaccatgtcttttcttgtggtatctgtcattaatagaattatctgttttttcaaaaggtcactctccttttctggatttgcgctgttttatatagatatattagcatatatttatttacatactattaacataaatgcttttaatatggatttttctgcatttgtatgttatgattacgttgtttataaaggatggagttgatgtagtcatatgataaatattagcggtcatttaagagaagaaagaaaaattacaggttattacaatcaagatgttcctctgatagtgaattgttgtgggaagcaggtctttcagacacaggattacttctgcaatcgtaaaaatggcagactggattaccaaataatatacattcaccgcggaagtgggcatttttatttgaataatgaatggattaccttatcggcaggaaatattgttttatatcgtccaggcataccacagtattattcctattatgcaaaggaaaaacctgagatctactggatacattttactggtaatgaatgtgaaaatatattaaaacaatacgatataaagaattgttatattggtgaaaggctatatttgaaattactctttcaggatattatcaccgaactacaactaaaaaaaatatcttatgaagacattgtattgcataatttttatattctcctatgctttattcatcgttccttttatagtatctccagacctttggataatgatttttcctttgacaggctactacttgaattaaactctaaatatgcaaacaaatggtctgtggcttccatggctgattactgcaaactaagtcaaagtagtttttcacatatgtttaaggatcgtatgggtatgtccccaatgcattatctaaattaccagcgcattgagaaagccaaagattttcttttgtctaattccatgaccatttccaatatttcgcgtttggtaggttttgatgatccgctttacttcagccgtgtattcaaaaaatatactggtgcatcgccacaagcttattaccaaaatttggtaaatactaatacacctgactggtttctaaacaacacaacaccacaatgatttttattatttataaaaatattacatccgacgaagtactatgtttgagaaactcactatttctatctgtatagttcacctaaagcaaaggaggttacaatgatactacattattcaacggagggctctttatcctttaaaagcatttcctcagaaagcttggtagtggcctgaggattactcaagaattccgcaagaatgaatcgagcctgcgctttcattacattgcctcttgcgataatctcatcctcagctgcattcatcgcctgttcatcaaacgtaagttctctttcaatgccctcttccatatagtgttccatttgtgcaatggctgcatcgatttcgctaattttttcatcgatctcgattttctccaactcgaggcactctacttttcttcgaatttcatcatcgctgacataagcaatggcaaaacccaacagcgatgtaattaaagggctgattgataacagagttaccaccgccatactttttcgccgtttttcagaaatctcttgtacattttccgtaccgttttcaaccttttcctctgatacagtattttcaagagtcatactctgattttcttgttcatacatatcgctatatgcgaagcgcagatacactgtcccaccatagacaagaagaaatcctgccacgaatacagcaaacattgttaatccgtgtttcgtagtcttgtatatggctccatgtagaaattttgcgataacaagtggaaggatatttaacaccaccgcaacaccaaatgccatcactattgacatcagtgcactttgtaaaaaacactcttccataatggagtataggacagttccatccatagcagagaaaatcggtaccaaaagaagattggctttttcattactccaccatggcattcctgttttctgaaatttttttctggtttcctttctgtctggatatgtaatcatctcgtttaaaatcgcacaaccaccatgattagtcattgttctcctcctcttcagataagcgggttcctgaccataggataagtctgtatttcataagtgctttttcattttcttctctgtctgcaatgcatagttcacgcttagacatcactacacagtagtcccctttatgcattgccatcaaattctctgttatcaatcgttcatgatcacatctctgaaccctgataaacttcaacgcttcgactatagtcctctctataatggcatccatataactgctattaaacatatcggggtttgccgcttttaagaatgctttgcatatcccttcaaatgtctcctctagctcagttaactttggtgacaattgatagtctttaggagcaagccccatattaggtgcatacataggaatttctacagctgacgtattcagttcattcggctcattaatactttttttagaaaaaatcggtcgattagtttccttggtttttctttttctcactttcatatttactttttacatctcctttcataaattgagtacacggtcgatcatcgtgtgtagcttttccttattggtaacataggctttccttccaggagaatcttgatatttgattttgggaaaattctctaatttatctttatcagggttttggcataaaacgccgctccaatacctacagattctactattaagcaatctttcagctctttcctgatagtgaaccagcatttcatcaacgatatctgattctgtccgaatttttgccagtctctttaaaatttcctctttgcgtcgctcttccaatgcataatttgcagctacagcagctttctgtctctgcgcttcctctccgcatccttcaggcagttctcctcctttatgtgactccataagtgaatattctaccaacaatgaattagcctcttggatcataggtgctaattcgtttgtcgttttcaagagcagtttttctatgtgtgcgttatagctgttcacctttgcatcaatgaaaggagtggtatgtacttctccattactacatacttggttttgtctcgcatctcgctttccaacgctcttctcaaatagagtctttattcccggaatcctaataattaccggatcgaggtaatagtatttttttcttttcataagccgcctcctgtatattttctttctttattatcatttttttatttcttcccccatattcgaataacgggaatgttttataattatagcaatcctattattttattttttcatcactacatttgcactcttttgcacaatactggcacggctttgcgattttcactgtcactttactatgctacaatatgaaatgtgaataactggtattattcacacgacgcaggaaagactcccccttttaactttcctgcgttatttttatgcgggaggtgacaaacttgaacatcaaaaaaataatcagatccgaaaggggtgacgtatcctacatcagtacttttgtctatatcctggtggcaatgattatggtggcatttatcttaaatgtgttccacatcatatccgtaaagcaggaaatggatcatatttctgaccagctggtaaagcagatccagttaaacggaggcacgaatgctgataccggtgccctgttttcctatctggctgcacccctatcagaagtcgagggtctaacctatcaggtaaccagttgcggaagtaccaacagaatccagataggaactcccttttatgtgacagtaaccggaagatgttatctgggtggcttttggaaactgaatctggtcccgattgacataaaagcaaatggtgccggagtcagcgaacattactggaagtaggtgaatcatgaaaagcagaatcaaaaatgaacgcggggatatgtcttttttctccatctttcttatcctcgccatcaatatgctcctgtccttcgtcctgctctatgcatccgtgcagatcaactgcatcaacattcgtaatgcagccaagatggagcttaataacgtgagtgccagaatctatgcagatacctttcactcccagcgggaagccaaccttacttcctatatggctgacatcaatttaagcaccgcctataaaaatgccttacgggccggttttatagaaggcatgaagtcaagggtgaaacttacgaatgatgattatgacgtagaaaacattgatctgacgtttcaccagtactccgaaaaaatcgaatacgtagcctcttttgacattacatatcagattcggatgtttggaacatcctttcctccgatccgaaggcacgcagagcttacggggtcccacaatacaaaattttgattacctgtaagatttgtaccctgacttacgtatatataattaaagaccaagaaaggagcagcctatgaaaaagaagaatattgataaaaaagtcgcactttccattgggggattaagtgtgttatgtctgggacttcttttcggagcctggtatttaagccatgaaccggaggagtccttcactcctgccgctcaggaggtggaaaccctggcagaaacctgggatgataaattagattctggtattccggaagcatccatcaaagaggaatctctttataccggtgaagtctccgataacacgcagactgtaatctctgaagatgaaaacggatctaacgtagatctatccggaagtgtgacaaaagaggaagcccaggagacaaaacctaccgagaaaccggagcccattggggataccacaaataagggcgaagttccttcctatccggaagaggttcctgtaacggcaccagaagtgcaggctcctgctgacaattcagagagttcccatcccggacaagtctatgatccggtatttggttggattgataccggtaatactacttatgatgtggttgacagtgatggagacatcaacaagcagatcggcactatgggagaataacaaaacaactaagacatggtaatcacgccatgtcttttttattgcaaaggagatcttatgagagcaatcaggaaatacttttttccactgcttctatccctaaccatatttttatccacaggcatttctacttatgctatgggtgatggaaatattgatggaggcggtggatcttttggtacaggatccgaactaaacgtctggcgaaataaccaggatggtgttcgggttacagtcgttaccacgggaggcagcgttgttgctactcccattgatttatcaaactgcaacatttcctccacggtgttaaactttgggaaagtgtccaaactgcaatatactgcaggctcatcgctttccatgaatgcctcctacacctactcaaaaccagccgtcgctctacctagaatcatcagcggatccgtgaacaaagccagcattgcagccataaaacgctacttctgttcagagtatgctgctaaatttatcgcatccaaaaccggcattccttttgagaatctgattaatggggattacaaattggtgatcgaacccattgcctacttcacgcacaatggaaaaaactatgccatgacagcaacggaggctgccctttacaacaagttatccggaggtgcattaagaagggtgcttccctccctgacgcaccagaacctgccactcgcgttgtttttagaaaaatctgatctcggataccctgcatggactggaagcacctctggaaaagtgtcggatgatgccattatctcttccctgggcatcggcattgtaagttacaaagatgtgccttccgaagagctggaagcccctgattatacgtaccgtgtggatacagatgttatttccagcattatgttaaccagtgccaccgaagtaaacccgaaaaatccggcgaaagcaaccttttacattaatggcggcacttataccgtatccaatatcgttatgccttcaggggagacggaaagatcttctataagaggaaactcccggacgacagtatggacattgcgattctgctgctgatcccgcttccgatatgtgcggcataaatatgggtgcggatcagctggtcagatagcaccttatagatctccagggcatcattgctgcttaaaccttcaaaccgctcatccgctgcaatcctgtcctctgtctcgatcagattgaaaaaaatattggtcattaaatcattgatgatctgtgttctcaattgctacctcctgtggtcctcgcccactgactttatggatgctgtcgctccctcttcatacagcatgaaatgcatcctcttacagttcttctgcgtgccaagtaccttttgatcttccgatggaactgacaacttaatcatagcagttgaacattaatgcaaacaaaacataaaagtcttaaaaacatctatcgctctacactatatcttatctgaattttttgcaaaaagcttttccataatttatataaaatttacgttaatattctttttgtacttacaaatcactttgaaatctgccattttttggtgaatcttggtaattattaacaattataataataattctcattatcatattctacatcccggtctatatcatttccggtcgaaacaagttatactataagtgtcaaaataaatattttttattaggcaaaggagaaaagctatggaaattaaattttatttttgtgatcattgtaaaaatgttgctataaaggttgtagatcataaggttcccctgttctgctgcggggaaaagatgaccgaactggtacccggcaccgtggatgccgcagtggagaagcatcttcccgaatatacggtaaaaaacgggattgtctccgtacatgtcggctccgtggagcatccgatgaccccggagcactatatctccctgatcgccgtgcagacagaccgcggtgtgcagtataagaatctgaccccggatatggctccgagagcagaatttgccctctgcgaaggggaaactgtggaagccgtgtatgcttattgtaacctccacggtctatgggaagcgtgagcctatgaatactaacaacgtagaaaactacaacgaacgttattctccggaaagagagacctatgtgatcaaaaaggatgggagtcttgaggcatttcatgtccagaaggtgatcgatgctatcggaaaaagtgcttatcgcgcacttacgaagttcactccggaagaaaaggaacagatctgtgaatgcgtcatttctcatatagatgctctggaatccacacaggtacccatctctgtcatgcacaatatcgtggaaaatgccctcgagcaggtacgtcccatcgtagccaaaagctaccgcgattataggaactataagcaggactttgtccggatgctggacgatgtctacaaaaaaagccaggcgatcatgtatgtgggcgataaggaaaattccaatgcagattccgcactggtctccacaaagcgcagcctgatctttaatcagttaaacaaagagctttaccagaagttcttcctgacgacagaagagatccaggcatgcagggacgggtatatctacatccatgatatgtctgccagaagggataccatgaactgctgtctgttcgatgtggcgcatgtgctctccggcggcttcgagatggggaatatctggtacaatgagccgaagactctggatgttgcattcgatgtcatcggggatatcgttttaagtgctgccagccagcagtacggcggctttactgtccccagtgtggatctgatcttagagccttatgccgagaaatcctaccgcagagccctggctaagtatgagcggctgggtgtcgctgcagatcttgccgaaaaagaagctcttgcggatgtgaagaaggagttcgagcagggcttccagggctgggaatataaattcaacaccgtggcaagcagccgtggggactatcctttcattaccgtgacagccggaaccggcaccggacagtttgccagaatggcttccgttgccatgctggaagtccgaaggggcggccagggaaaaaccggacataagaagccggtgctgtttccgaagatcgtatttttatacgatgagaacctccatggccccggtaaacctttagaagacgtgtttgaagcaggtgttgcatgttctgccaagaccatgtatcccgactggctgagcctgaccggaaagggctatgtcgcaagtatgtacaagaaatacggtaagatcatctcccccatgggctgcagagcatttctgtctccctggtacgaacaaggcggtatgcacccggcgtttgatggagacgaaccggtatttgtgggacgcttcaacattggcgtggtatccctgcatctgccgatgatactggcaaaagcaagaaaagagagcagagacttctacgaagtactggattactatctggagctgatccgtaggctccatatccggacgtatgcttatttaggggagatgcgtgcatccacgaatcctttagcatattgtgagggtggattttacggtggacatctgaagcttacggacaaaataaagcccgtcctgaagacagcaactgccagcttcgggatcactgctctgaatgagctgcagatgctctacaatgggaaatcacttgtggaagacggtgcttttgcactggaggtcatggaacatatcaacaagcgcgtggatgagttcaaggaagaagatggcaatctctatgccatctatggaacacctgctgagaacctctgcggactgcagattagacagtttagagagcagtacggtatcatcgaaggcgtatctgacagaccttatgtcagcaacagcttccactgccatgtctccgaggacatcactccgatccagaagcaggatctggagaaccgtttctggaacttaagtaacggcggcaagatccagtatgtgaaatatccgattggctataacacgctggcgatcaaatccttaatccgccgcgccatggatatgggcttctatgagggggtaaatctctcactgtcctactgtgatgactgcggacacgaggagctgcagatggatgtgtgtccgaaatgcggcagcaagaatctgaccaagatcgaccggatgaatggatatctgtcctattccagagtgcatggtgataccagactgaatgctgcgaagatggcagagattgccgacagaaaaagtatgtaaataaaagatatcttgaaggaaaaattgcaatcagataggaaaaaggatagcgcttcccgccatgcggttacgctatcctttttctattcctaaatatttccatctgtttgtggttctaaaataaccttctatcaataaaaacataaaaatcgggaaagctattcttcctaatacgtcaaaaatatcacttatcacaagcaatattcctccatttaaattaggataaatcaaagccttattgacatgatctatgagcatagacgtaaaggcgatatactttaattgtgctccggataatatttttcgtctgttcattttcgttcaaatacatattccgattcagatgacaaatctcttctgaaagtatatccaaggctgtcaaattttcgtatctcttcaggattctcaatttctctttctgccatgaaccggaccatctcccctcgggccattttggcatatgtccctttcgttaccagtttatttcccgataactcacaaaaggagaccgtaatataggtatccttaggtgtcagatacttttctatgcattttgagtattcttttgatgccagattaatgataaccctgctgtcatcaatcactgaacgatataatctctccccccagtaatcatacagattttttgaatctcctatcccgacctttgcctgcatttctaaccggtacggtgtcaccccatccattggttccaaaaccccataaaacgcagacaggattctcaagtgcttttgtacatatgcaagctgtctatcctcaaacacagctggtgccatatactgaaatgcgattccttcataggataatactgccggagtaagtccacggtacagatccatagtttccagtgtgtgaaagttctgttcggcaatcttatcgttacatttccagactgctttcagctcttctttggatttgcttttcatccagtttaatacttctgctgtcttatcaatatagacaggcagttcaaccggtgctaagttatcggtatctactatcatcttttttgcaggtgataaaataatcttcattatgccaattccttaagcatattttcaggatcatctgccgccttgactttatcatttgcctttataatgattccctgctcatcaataagataagtagttcttaccacgcccatagatatttttccatagtttttcttttctttccagacatcataggcttcaataaccttacgttccggatcagctaaaagtgtaaatgccagaccatatttttcttcaaatctcttatgagaagccacggaatctttactgactccaagaatgaccgcacccttttccgcaaactgcggatatctctctgaaaaaccgcatgcctgtttcgtacatccgggtgtgttatcctttggataaaaatataaaatcacttttttgcctgcataatcacttaatttatgcattacgccgtcctgatccggcaattcaaaatcgggtgcttttattcctaactctaacatttactattcctccgcttttgtattttccacctgttttcttgttcttttattacctgaaatcattttatgaccagaatagactgccatagtcatgcatatcagagagccaaatgcaaagtatttgtgtgctgcttttaaccctttatatcctgtataaaaagttccaaccattgtaactattgctccgattgaccaatatttatgtgctttcattttatacctccaaattgattaagctgtttccaaaataaatatctctggatcattaacaatattatacattccatccattactttcgacaagcagagaaaaaataatcaatccaaatacaaaaggatgtatcccgataattctggcattaccttgacgcatcctttcgtgttgtatttttttattcttcttaatgacagctatggcttccgcatccatgctcaccacacgtatgtccttccccatggttgtgctcatggttagaacacttcacatccggattataatcaagcgtatcattgataaaagcttct

SEQ ID NO: 11330 - DNA, 38010 bp, Unknown
  gut microbiota DNA sequence
aaacagctccatattatttttatcgatgtcttattttccctcgtagcagatggctgactccagacgatatttgctaatgcgctcacggcccttcagtcctgccagttcgatcagcactaccacgccggctacttcaccacccagagactcgatcagtttgatcatagcctcggtggtacctccggtagcgatcaggtcatccacgatcagaactttctgaccgggcttgatactgtccttgtgcatctcgatggtagcggaaccatattccagatcatatgtggcagatacggtctctctgggaagctttccctttttacggatcaatacaaagggcttatgattattgtatgcgatcggtgttccgaagataaatccacgggactcaggacctactaccacatcataatccagatccttgatcttctcctgcatggtatcgattgccagatgcagtccgtccgcatcctgcagcacacttgtgacatcacggaaaatgatacccttctccgggaaatcgggaatgctctttacatattcttccaactttttcatgattctacacacctttctcttatttaacgaattatagctgcttttctgctacttcaatctgttttttaataaaatatttgatgatctcgcttctggtaataattccgatgaatacatttctatcatcgatcaccggtacaaagttctgcatctgcgcctgtcccaacagttcttccatattcgtatcgatacataccggacggatcttgccgctctggataatatcccgcacggacagcttctccagacttttcatggtaatgctgtccagttcactgttgtggcttaagatattccacagaaaatctccctcactgactacacccacatacctgtcctcggcatcgatcaccggtaccgccgtgtagccgtagcgtttcatcttctccaacccctgcctgatggtcatatcgtcccgaagaaaagtaacctcctccttcggggacaaaaaagatgcaatattcacaatgttcctcctgcctgttcttttgtgtccgttaattttgatccttagggtcgacctcttcgaaggtactgtccaaggcatcctgctcctgtttgaatctccggagcttgcgtgcaaaataaatcgtagaaaaacaatcgccggcaccactgaggatcagtaccactcccagaacacggaacaacagaaccgctgctttgaacggattgtagatcagtaccactccgagaatgatgttgattgccgccacaataagaagtcccagccagctgccgtaacccagtcttttcaggtcaatggcatcctgcagtttgctgcatccgctacacagaaccagtactcccagaataaagggaatcaaggagatgacgatctctaccttgtacaggactactgctcccaacacgattccgagaataccgaatacaaactcattgtgataatagttctctctggcatctctgagcagatagcagatgatagaaatgagacctgccacgatcagtacgataccgatcagataccccagtgtcttctgcatggtctccgggatcaccagtgctacgatccctaagagaatatacagcacaccggtaagaattgcttcccatttcaattcttttaacattttcatatgtaacccttcctttcctaaaactcctataacgaaaaaggggctctctgcaaacctgcggaaaaccccctttgtgttcaatttactttctgccgcagcactttttatactttttgccgcttccgcaaggacaggggtcgttgggataaaccttctgctccttcacaatagtagtggaagacttctgctctttgtagagttccttgcgggtctcttcatcgaaaatagcgttccactcttccagattgtacagccagtcagcctctgccgctaccatgttcttgtacagaagagccttgtcaaatcctaagtttacctctgtatcctcttccagatcatcgagagggttcttctctaccagactgtcgttaataccgtccagaaatccggtcatcgtcatcagagatacctgatacttgtccgccagttcctttaccgtaccctttactacttcatcggggttcttcagaagctgtgcgtagatctccttctcctcctggaaataagctgcccaaagctgctgcagcttgtctttgccggttgcctcattatatgctactgatctccactgttccatcaaattcataattgtaataccatccttacatgtgattaatatgattataataatatataataatacatctcgtccttaaaaacaacaaaaaaatatcaatgacctatgtataatcagacagatcccgggcagactactactatcatcggaccccctcctttgatcctacggaagatacgataatacttaatcctccccttttgaaaagaggcaccctccggtgcctcttttttacaatggaacttttccttctttgatcagttcaataaatgcatccgctgccttcggatcgaactgggttcccttatttttctccagttctcccatagcatattccacactgagtgcttccttgtaagctctcttggagatcatggcatcaaagctgtcacacactgccagaattcttcccaggagaggaatcccttctcccttcaggcccctgggatatcccttgccgtcatacctctcgtgatgtgacacgaccgcagggatcacatagttcatattcggaagatagtggatcatctcgatggacttttgcacatggctcttcatgatctcatattcttcattcgtaagctttcccgcctttttcaggatactctcaggaatcccgatcttaccgatatcatgtaataatccagccacctttaccgtctggatatcatctcccggcagtcccagcttctgtgccagcagcaccgcatactgtgatacattggtagaatgctggaaggtaaaggaatccttcgcatcgatggctgccaccagtgcatacaccgtaggtgccacctgttcatatccggtccctttattcctgcgctcctcgtcaatatttccttcatatacctggatccggttcttgccgttttgctttgcataaaaagctgcacgcttagctttttgaaaaagatccggtgcatccgacgccagtccgggataccatgccacgccgacactgaaggtgatcggctgcatgacctgtggtttgtccaagccattctcctgcactgcatgggtcagcttttccgccagtgccaccaacgtcttactgccagtctccggcacagagatcaggaattcattggagccgacgcggaatactttgccgttctctgcattttcctgcaatttcttcgcacaccattttaagatccggtctccggtctgctctccgtacagatcgttatacaatttaaaattgtccatatccatatacaggaagcctctcacatctccgagagcgccctccttatgcaggcatctgttgcaataagtgcggttgtacagacctgtcagttcatcgtgaatagatacctgatatactctttcataggcatcaatatttttcaggcttccggatgcaatattcgccaattgtcttatacagtccacttcctgataattgagcttatttgcccgcatccgctccatatagataaacccgcagatctgattatcatatcttaaggttgcgatcactgtccgctccggcatattatcctgtttcaccagatcacagattgtgtctacttcttcctcacttaacggaatgtgtccactctgtaccgcttcgtgatacccttctccattcgaattcttctcgaagatcctggcttcacatccggggattgcatcgcccagaatatcatgcagtgtagcaaacagctctctgcggctcagaatggatgccgccctgtcctgaaattgccggattccttccaacatatgcttctgcttctgatatagaatattctccagccgcttcctggcaaaaaggatcacaagtactgtccatcccgactgcagggcaatgcataggatcagcctctgcactgcagcctgtccaaggctccctgtcacgatttccagattataggataagatcaccaccggaatcgctgctacgatcactgccaggaaatacaccgcacctaccgttgcccgatacgaaaaatcaaacagatactgcttgtacatgatatataccatgcatattgccatccccacactgcccaacatatcaaaaggaaatacacttccaggcagcatgcagagcagatttccacccagaatacataccgttccaagcagcagcggaaacagctttttacgcagctccacatttgttcctatcttacaatgtgccagataagtggcatagatcattactgcgatctccatggcaatgagaacaccggttccgaccgttgcatgatacacataaacgaaggtgccatccgcgcggttcacaagctccggtgccggcaggatagtaccactccttgcatttcccaacaccagtgccagcgtcagcacaccataaatgtagatcagggcatcatgctccgtaatctccaaaaatccaaacagaaacacatacatgaacaccgggatcatcaaaagaccaagcagggcgaaattatgccagaaagtaattccgggaaatatcccaagtctcataaggctcacactgcccgtccagatcaggcaggcggtcagcaccagccgaagaccgcggattgtccggttcctcatggtatggaaaaaacagaacaacagaaaaagggagcagcaaaaagctcccaacggaataccaatatagaggtttctattccatatcgtatccagaaaactctccatacttaattttactccctcatgctttattcccttacacaggaacgttatccccattcgtcccatatcctctatacagctaagagtttaccacatttttcttttaaagacaactgtacatccagtattctctgattctccgatccccggaaggccagccgcagattcttcctctcctcgataaattctccatccacgatcacatccaaaagcggcagaagctctgtgatcaccggatctccttcttccatccaacgaagcagatccctgtcaaaatgatatcccgtatagcaccagatggtcttctgcggatattgctctcttactttcttcaccagagaaagtacggctcctctgttctcaggctccatgggttcccctcccagtaagctcaagccccggatatagtccggggccagtgcctgcagaatctcttgctctgtttcctctgtgtaagcctgtccgtaatggaagtcccaggcttcgctgttaaagcatcccttacaatgatgggtacagccgctgacgaacagcgacactctcacaccgggaccgtttgccacatctgttttcttgatcgttgcataattcataggacatttccttcccttgtactatctgcacattacagatgaagaactcttgccttgatctccttggtcttgccggcattccagaagttctctcccagatagccgcaggtccttctggtgacattcatcttcgcatgatccttgttatgacactggggacattcccactccatgttatcattgatcatgatctcaccatcatagccacatacctgacagtaatcggatttggtattgaactctccgtactggatattgtcatagatgaagcggatcacttcctcgatggcttccacattattagtcaggttcggaacttctacataagagatagcgcctcccaaagacttattctggaactcactctcgatcttaaattttgtaaatgcgtcgatcttctcccgtacatccacatgataagaatttgtatagtatcctttatcggtgacattggaaatatcaccgtatttttcacggtcgatccttgcaaaacggtagcaaagtgtctctgcgggagttccgtagagactgaaagcaatgccggtctcctctttccattttgcgcagcgatccttcatgtaatccatgacgcgcagggcgaattccttaccgggctccacagtctggctgcagcccttcatcagataggtcatctcatacaatccgatataacccagagacatggtggaataaccgttgtgcaggtatttgtcgatggtctcacccttcttcagacgggcgatggcgccgtactgccagtggatggggctcacatcggataccacgccctccagtgccttatgacggcacatcagtgcttcatagcacagctccagacgctcatccaacagtttccagaacttctcctcatttccttttgccaggataccgatctggggcaggttgatgctgacaacgccctgattaaaacggccttcccacttgtactctccgttttcatccttccatggagacaggaaggaacggcagcccatgcaggaaaatacattgccctcgtagttctcacgcatcttcttggcagagatatagtcggggtacattctcttagcagagcactgtgcggccagcttggtcacatagtcgtattttccgccctttaagcagttattttcgtccagcacatagactaacttcgggaatgcgggagtcacatagacacccttctcattcttggttccctcaatgcgctggcgcaggatctccataatgatctgtacggtctcttccacatattcgtcgttctcgtcaatatgcaggaacaatgtcacgaacggagactgtccgttggtggtcatcagggtattgatctggtactggatggtctgtacgccggattttaattcatcgtgcagacgcatctgtacgatcttatccttggctgcctgatccaaggtatctccgaactcgtcctccagctgttttgcaaatttttccctgctcttacgcaggtattttcccagatgcttgatattcacactctggccgccatactgattgctggctacggctgcgatgatctgggtggtcacagtacatgccacctggaagctcttgggagattcgatcattttgccgtttatggaagtaccgttgtccagcatatccttgatattgatcagacagcagttgaagatcggctggataaaataatccgcatcatggaaatgcagcacaccattgtcatgtgccatggcaatatgctccggcagaagcagacgtctggtaacatcacgagacacttcacctgcaatatagtctctctgtgtggatgccagacgggtatttttattggaattctcctctgccagctccttattctcattccggatcagttttaaaatagattcatccgtggtgttggatttgcggagcagacttctctggtaacggtatacgatatacttcttcgccagggtatatttgttgtgttctaccagatgttcctcgatcatatcctgaatatgctccacggtctgagtctgtctgccctcctgctgcacatcctccaggatctcttcaatcaacccctcactggcacgataccgctcctccacttcgttgttcgccttatggatcgcttcccggatcttgtcctcttcataaggcactactctgccgtctctcttctgaatcttcattgctgttccctcactttatatcattcccatcaagatgcgaattcctgcataagccgaaagaaaagccgcatcggaagcaagttcccgatacgactgtctacgcaaatcatagcatgttactagattttgtgtttcgcaattcatttcgcatctacatcttgtatatttattatagtgaggaaacccgaaaaaagcaagtaccttttttaaaacaatcctcttccaccataccctccgaagcacagaccgccaccaccgcagcacagattgcagaacacgttcgccagacagattttcaggcacaggtcattcccactcgcattgggatagccataagctgcctgtctgctctcataccattgtccgccgctttgaagtctctgcagcagcatctggtattccatattctgaggctccagtgccactgccttacctgcatgctccagtgctgccacattgttaccaagtcccatatgggccatggcgctgtaataataccatctggccgtcttctcatgctctcccatgccatccagggtatttctggcctctctgtaataaccgtttctgagataattaccggctgcccgcagtctcgtctcttcctcatatccggaagtctgctgctgccagcctgcctgctgccagaagtctccaaagccctggctgaatccgccataaccctgtccttctgtccgttccttcatgatctgctgatacgccgcctgaatctccttgaacttttcttccgcctgagccttgttgggattattgatattggcatcgggatgatattttctgctcaggatcttatatgcttttttgatttcttcctcggaagcatctctgctcactcccagaacactatacggatcataagtcatttcctgttacctcgtttacactgtctttttcccgtttttcccgtacgatctcatagcggcaccatactccggaatacagaatattccgcagaatatccacattctgtaaaataggaagctgctcaaattccttacagcattcagacatcatcatggtcaggatctgtctgcattcttcttcaaatccgggttcttcatatcgtttctttagcggattataagtccccttcttaatgtcctgctctacatcttcataggcgtccatgaggtaaatgaactttcccagaaaaaatccaagtctctccaaattatccttccactcgtcttcgcggcaggatacgatctgtgccatgacttttccaaacagtcccgccatggtatcgatgtccgcatcaccctgcttttccgcatccacaaaatcctgcatggccagagagatgctcctcactttatccgcatagagcaaaggctttttccggcactttttccccaatagataactgtatgccagtcctttcagactatgctcatcctcccagtcatcctctgccttatagcaggcaaacaacaccgtcatgtccgccacataatcggtaaaaagatttcttctgatctgatgcttttcgaaaggatgtgccacacatctgcactgtcctacgacatcttccggttcatacagtccggtgagcagcatcagaataaaagtcatatcataattcagggaaagctgccccagcacaccatagcgctccttcaggctctggcataatccacagtaataggatcgatacacatcatactccttgaatttcatctccgactgattgaccacaatatatccgaacatctgactcaccatcctttcttatttcccggttttgcttattttccatttgtaatcctgcctgtcctgtcaggtcttgcggataaattcctctccgcattttctgcagtggatcgcaatctttcctttgtgtctgggcacccggagcttctgtccgcatttcggacatttaaagatcttataatccctgtgtccggcaaaaagtttcttccggcgctgccaccagctgcgcaccttcatttcttttttgagataccattggttctccgcacttctcttgctcatattcctggaaaacatccggtaatagacatagaccaacagggcaagagccagcacataaaatattctcagaccaaaaaaagagagcgccaggcagaccaaagctacaatcatcagaaactgattgaagcggtcattgccataacgcccccacatgaaacgctgtaacttctctttcatgaagtaccacctttcgtctgccaccatgcaggggatacattatccaaatctttcagagcctcgttcgcgaagccggctctgaacattacctacattatggtctgccgaaaagtaaaaagcaattaactaaatataaacttttgtaaaagaactattatttattattccgatccttctgccacagctcctgtgcacgcacgtcccatttttttgcatactccgcacatttcccacacagatgttccacggattccggtgactgtaagtcggtggaatgagcttttgtttcatgtaccatgcgctgtaagatctccggattctccagcatcgggcagggttttaagtgattacagttaaacggttggttctcacggtacgccatgaacagaggctgctttagtgcggtcagcaggtccacctccttgatattggcaccggaataatgaatgaatacacagggttccacatccccattgggattgatatgacagtagtttctgccgcctgcgatacagccgcccacatattcaccatcgttctggaagtcaaaggcgaagatgggcttaccgcccttcatggcacggatctcacggatgcggtgatacatatactctctctgatccggatccggaagcagctcacaggatgcctcatttcctaccggcatataatggaagtaccagctgaatctggcgcccttttcaatgatcatatccaggaattcatcactggtgactaccttatagtttttgctggtgtagcagatagaagtaccgaagatcagaccgtactgcttcatcagatccatggcatgcatgaccttatcaaacacgcccttgccacggcgcagatcgtttacttcattgaagccttccaggctgatagctacggagaaatttcctacacgcttcatatcctggcagaatttttcatcgatcagggtgccgttggtaaatgcatggaagccacagtcatcatgcttctcacataaacggatgatatcgtccttacgcaccagaggttcgccaccggtgaagaaatacagataaatgccaagctccttaccctgggtaacgatacggtccatatcttcaaagcttaagttcaggcggttgccgtattctgctgcccagcatccggtacaatgcagattgcaggcactggtgggatccatcaggatcagccagggaatattacactgatgcttgacgcgcatctcattgatctcttttttgccacagaaggcagcctcaaagccatagtccagcgcagacattttgatgacgtggggatctacttcatttaagatgcggttcacatactgcatccatttgctgtccggttcccggatcatacgtctcgccgcatcgtagctttccttcgaaaacgtatttcccataaatttttcggacagatccaccagctttaagaaagctttttccctgtcctcttcatccttgttcacatactttaaaattccgtcgatcgctgcaccgaaagcagctctctctaccttgtgttttacgtctgccatattatctacctctctttcgtatttttacataaatatccctgtttctagctgtaatagcggaacagcacatcgatccctgccaacaggaagatgatcgcaccactgatcagcacacggcttctcccgtgacatccgatccggtatccagcatagataccggtaaccacggctaacgcagccatgatcgccagctgtatgatctgtacggttactccggtgtctaaaaatcccatgccgattcccgacagaaaagagtccacactggtaagcatggcccagacacataactgcttccaggcaaatacatcctccctgcgttctaccggatcccgcatccgggatgcccgtacgatcagccagatcgcgatcagaaaaaaaataacagcggaggctgcccggaacagtctctctgtacgctgataattcatggcaatgtacggaagctccgagagcaggcttcctaagagcattgccccactctgccagcctgtgaacagcagagtcattttcagaatctgttttttatccagtttagaaagcattgcacctttatataatgcataggtaaaaacatccagggaaagtcctaccgatacgatcagtatttcataccacgccatccatacatctcctttctgcgattatgatatgctatttccggacatatagtaagatacaaccccggcacagcgtttttcctgcttttacattattccgataaatgtaaataatccgcgacattttgcggaaagtgtcgttttgggttgagaaacggtaattttttgtttataatatttctatcttggttctttttatggaaaaaggagtcatgtgatgaagacaaaggaattattggcagacagctttcggacacttgtgcttaccgtgccttttcagaagatatccatcaaaatgatcacggatggtgctcatgtgatccgcccgactttctataattattttcaggataaatacgaagtgatcgagttcttgttcgaccgggatatcggcagcaaggtcgaagtcatgattgaaaatgacatggaacaggaagctattaaactgatgtttatctgctttgagaaaaataaggaatattaccgcagactttttgagatcacaggtcagaacagcttcggagaattttttgcccattactgtgaaaagacttttttctgtattctctccagacatcccatgaagaaaatgccctgcgatctgatcactccgcagtcgctggcgcattataatgccctattactgatcgagatcctgaagctttggctctcttctcccaagaatgtgcctgcggagaagattttcgaagcttatcagtacataatgcggactccgatcctggacatgatccagtatccggagatataaaaaagacaggtcttaatgacctgccttttttatatcttatcgattatagtcttgtaattacaaagatatcataaattgccttgatcgcggtttcgaaatcatcatttgccacaccgatgatgatgttcagctcagaggatccctggtcgatcatcttgacattgatatttttgtgtgccagtgcggagaagattctgcctgctgtaccgcgggtggacttcatgccacggcctaccacggcgatcagcgccagatccgattcaatgtctatcatatcgggatttgccagtctgtggatgcctgccactactttctgctccttgtgcatgaattcgtcctgatgtacgaatacggtcatggtatcaataccggagggaacatgctcaaaggagattccgttctcctcaaacgcctgcagtacctttctgccgaaaccgatctcggagttcatcatatctttttcaatattcacagagcagaagccttttttaccggcgataccggtgatgacatatttggacttctggcaggtgcttcccacgatccaggtaccgttgtcttccggcgcattggtattgcggatattgatgggaataccctcctggcgtaccgggaaaatggcatcctcatgcagtacggtagctcccatatatgccagctcgcgaagttcgcggtaggtgatggtctcaatagcctcgggatgatcgatgattctgggatctgcgatcaggaaaccggacacatccgtccaattctcatagacatccgctttggcagccttagccacaatggaaccggtaatatcggatccgcctctggagaaggtctttaccgttccgtcaggcatcgaaccgtagaatccgggaactaccgcttccttgctctctgccagtctggcacgaagtacttcgttggtcttcgctgcatcaaactcaccgttttcatcgaagaaaattacggttgccgcatcaatgaaatcatagcctaagtaatttgccatgatgataccgttcagatattcgccacgggaagctgcataattgtttccggattttgccttgaaattcttctcaatggtcccaaactcttcactaagatccagatccagctgtaaaccatctataatctcctggtaacgcgccttaatggcatccagctctgctttgaagctctttccttgatctgccagatcatagcaggcatacagcatatccgtcaccttggtatcattggaaaatctttttcccggtgcggaaggtaccacatatttcctctccttatccgcacggatgatatttcctacctttttgaactgctctgcacttgccagagagcttccaccgaatttcactacttttgacataacattttctcctcaaatatatatttaatgctctttataatattcttttttattatattatgcggatcctgccaagcatctgctcacccagtgcttcgtattttgccaggaactcgctctccttcatgggctgtgtgaagtatccgaagtcctccttacggtctgctaaatgcaactctctgcctccggggaaagctgcctctaccgcgccttccgctccggcctttgctctgataaaaaagcttcttacggactcacgtgtatctaccagctttacttcctctttgtcccagaagcacatgatcaccttgccctgatgtcttgcacagtcgatgacatccgataccactgcactggcggtgggaagcttgcctgcgccccgtccgtagtacatggaatctcccagcatattgccggtgacaaataccgcattgaacactccgtataccatggccaggggatggtccttgggaagcatgaacggtgccaccataacttccgctgtgtcatcgtcaatcgcacggcttctgcccaacagcttgatggtatactctgcagcattggcatattcaaaatccgctgcggtgatcttcgtaataccctcggtagggactttctcggaatccacgtttttaccaaacatcagagaagacaaaatcgcgatcttgcggcaggcatcatgaccttccacatctgcttccggattgcgctccgcatagcctttgtcctgtgcttccttcagaacggtatcgaaatccgcgccttctttttccattttgctcaggatatagttcgtggtaccgtttaagataccattgacagcctcgatcttctctgcggtcagggagtagttcagcggacggataatgggaataccgccgcccacacttgcctcgaataagtagttgcagttatgctctctggcgatctgcaacagttcgggaccatgctttgctaccagctccttgttggaggtgcagacactcttgcccagttccagtgcctgcttcgtgaactggtaagcagctccgacaccacccatggtctcacagatgatggttacgctgtcatcctgtaagatcgtattgaaatcatgaatgaccttattctcataagggtctccggggaaatctctcagatccagaatgtatttcacttccagttcctgtgcggactttttatttaccatgtccttatttttctcgataacttctaccacaccgctaccgacggtgccgtagcccaataccgcaacattgatcataatattctcctcgcttttatctttttcgttccgacattattcttttgccagtattttcacatgatgcacactggtctgcccctccagctgttcgatcatccgggagatatctcccgtagtctgcagtacctgtatactcagtgtcagagatgcgattccgttgatgggaatactctgatggatcgtcaggatattcgcacggtactctgcgatgatcttcagcacatccgacagaattcccggttcgtcatccatctggaaagtcagcgtgatggtcgttccctgagaattgtcatggaacggaaaaatatcatccttgtacttataaaaagaactgcggctgatgccaactgcatcaaccgcctcctgtatggtcagaaccttctctgactcaagaagccgctttgcttccactacctttaacagcacctcggggatcgccttctgcttcaccacgaaatacttggtcgcttctcccatatgttatcctttctgcagttcgtatctgtagtacggacacttgtttttcactgagggatattctagcacagtaaagtatgaaaggcaacccccatttttatctttttcaggcctttttaatacatttctgaacatttctgagtataagaaaagagcctttcggctcttttcttatactcctccaagctttagatcaaaggatatttgtctgttaatttctgaatgatggctctggctgcaggaacctgctcttcgccgcccttgatgaccagggcaatagattctgccacctgatccatgtcctcggtgttcagacctctggaagtaaccgcgggggttcccaggcggataccgctggtcacaaacggagactgaggatcgttggggatggtgttcttgttagcagtgatgtgcgctgcatccaacagtttctccactgccttaccggtcagaccgtaaggagtcagatccactaacattaaatggttatcggtaccgccggatacgatcttgatatcccggctcatcagtcccttacacaatgcctgggcattgtcaatgatattcttctgatatactttaaagtcgtcgcttaatgcttcttcgaagcagactgccttggcagcgatcacatgcatcagagggccgccctggatgccggggaagatggccttgttaaagttgaacttttcatttgcttccttgttacacaggatcataccgcctctgggtccgcgcagggtcttgtgtgtggtggtggttactacatctgcataaggaatagggctcggatgaaggcccgctgccaccagtcctgcgatatgtgccatatccaccatcagtacggcacccacttcgtctgccacttcacggaatttcttgaaatcaatggttctggcatacgcagaagcaccggcaatgatcatcttaggcttgcattccagtgccagttctctcattctgtcgtaatctaagaatccgttgtcatccacaccgtaaggtactacatggaaatatttaccggacatatttaccggtgaaccatgggtcagatgtccgccgtgatccaggttcatgcccatgatcgtatcacccggtttcagtacggcaaactgcactgccatattcgcctgtgctccggaatggggctgtacattagcataatcacagccgaacagcttcttggcacgctcgattgccagattttcgatgacatccacgcactcacatccgccgtaatatctcttgccgggataaccttccgcatatttattggtcaagggactgcccatagccgccatgactgccttgcttacccagttctcggaagcgatcagttcaatatgactgttctgacgattctcctcgtcgataatggcctgtgccacctcgggatcaactttttttacttcatccaatgaatacatgcctcattcctccttatgttacgttaattcgctaaacttatggtttagtatagcatagaactttttaattgcaaagatagaaaatgaacaatgttggcagaagcccctgagtgtgttagaataaactttaattacattcttacgaaagatgaggtatcctcatgtatcatattattatcaatccagcctcccgctccggcagaggtgcgaagatctggtctgaacagatcgaacctgctctaaaaaaaagcgatgccgtatttcagacctatttttccaaaaaagccggagaagtaaagcatctggctgctcagatcaccgcagaatataaagacgatcctgatttaaagctcattgtcctaggtggagatggcacggtgaacgaagccctgcagggaatcgctgatccctccaaagtaatcctgggttacattcccaccggctccagcaacgatctggccaaggatctcggcatccccaaagagccgaaagcagcccttgatctgatccttcggaatgctgctcccagagtcatggacttaggaagacttacttatctcgatgaggatcagccggaagaatcccggctgttcgctgtcagctgtggaatcggctttgacgcagctgtctgtgcagaagccatgcattcccccatcaaggataccatgaaccggatcggtcttggcaagctgacgtatttaggaatcgccttaaagcagctgatcaccgcacgcaaggtctcctgtaccctgaccatcgaaaacgcagtaaacggaaagcagaccgcattccagctcccccgctttttgtttgtaacctgtatgagtcatcgctatgaaggcggcggattcatgttctgtcctcccgccacggataatgacggcatattggatctgtgctgcgttggcaatatttccaaagtactggtcctgctggctcttcccaccgcttttttcggtaaacactatttcgtaaaggggatcgatgcttacacagccacacagatgtctatcactgcctccgctcccctatgggtacatacggacggcgaagtaaccaggaaaagctgtggattccgggtggaatgtcttcccggcgccattcgcatgatcactcccgaagtgaaataaacacactctaaagattttcttaagaatgcttaagtattccaaaaaaaccttgatttttttcttccggtgattatactaaaattgattttgaagcataggtttggtagagaaatgaggtttttatggaaaagcttaagatcttctatttaaaatataaacatgccgttcctcttattatatatgccattatttatatgacatggttcgcctggctggagaagaacatcaccggacactaccggatcatacatatggcggcggatgattacattcctttctgtgaggtgttcgtcattccttactttttatggtttgcctatgtatcggcagtgatcatctactttttcttcaaaaataaagaggattactaccgcacctgtattttcctctttacaggcatgacgatcttcctgatcgtatccactctgtggcccaacggacagcaccttcgtcccgcggtgatgcccagagacaatatcttcacccgcatggtagccgctctgtaccggacagacacacctaccaacctgtggcccagcattcatgtatataattccctgggtgcacattttgcgatcatccgcagtaaatgcttcgagaagaaaaagggcatccgcatcggatccctgattttggcttcttcgatcatcatggcgaccatgttcatcaaacagcactccgtcttcgatgtgctcaccgctttcgttatggcggctgcgatgtacaccctggtatatcgttacgacctgctgatcgcagtcagagagttccgcaacaagagaaaagcaaaaccgcagattggttagataacaaaaatgcaacggcgttttcaccgttgcatttttttatgagtcacaccaggtatgctcaccaccgtggtctgaatgatcacagtacttcttcacttttctgcagtgccgatgcaatgactgcatccatatcataataacggtattccgccagtcttcctccgaagatcacattctgctcggcatctgccagcttcttatactctgcatacagagcaccgtttttctcatcatttaccggataataaggttcatctcccggtttccactcggaactgtactctctgctgatgactgtcttcgggagatcctgtccctgttcgtccttgccgaactcgaaccatttatgttcaatgatccgggtccagggagtctcacggtccgtgtagttcactgccgcattgccctggaagttcggaatatccagcacctctgtctcgaatcttacagatcgatattccaatgctcccagtgaatatccgaaatacgcatcgatggggccggtatagacgactgtttccgccagtctgtccagtttctccttctgctccagataatctgtattcagacgtacttctataccttctaacaaatgctccaccagctgcgtgtaaccgccgatgggaatgccctgatacagagcgttgaagtaattattatcaaaggtcagtcgaaccggaagtcgcttgatgataaatgccggaagatccttacaatcacgtccccactgcttctctgtataacccttgatcagcttttcaaagatgtctcttcccaccagggaaattgcctgctcttctaagttcttcggctccgtgatacatgcttcttttttctgttcttcgatcttcgccgctgcttcctcaggcgttaccacaccccacattttattaaacgtatacatgttaaagggcagggaatacagttctccacgatagtttgccaccggggaattggtgaaccggttgaactctgcgaatctcgtaatatacttccacaccttcgtatcattggtatgaaaaatatgcgcaccgtatttgtggacatggatcccttccactttttccgtgtaaatattacccgccacattgggacgcttgtcgatcaccagaacctttttccctctgtcagccgcttctctcgcgaacactgctccgtacagaccggaaccgacgaccagataatcgtatttcatagtttctatatgtttcctttctcacagacacatttagacacatttctgtactaatatgattcccgttttgcgttactgctgcgtagcagccttctgtccgaagacacgcttcagtacaagcagtgtcgccagtgtcagcagaataccgatcaccagacagatcaccacattctgtacaaatccggcaatgatatagttcacgaacgagattgctgccacagtcagtacgtaaggaacctgggtggatacatggttgatatgattgcactgtgcccctgcggaagccatgatcgtggtatcggagatgggagaacaatggtcacccataacagcacctgccagacatgcagacacaccgatgatgatcagatgctcggctccgggtacgatggctccggtagcaggatcggtaaatacaccggttacaatagggatcagaataccgaaggttccccagctggtaccggaagcaaaagctaagaagcacgctaccaggaagatgatcgcgggaagcatattggtcagtcccgtagatgcgccctgcatcagacctgccacataaacatccgcacctaacagtccggtcatggtcttcagggtaacggcaaaggtcaagatcagcatggcaggtaccatagcgataaagccctgggtcagacaattcatggcctccttaaaggataccagtcttctacacatataatatacgatagcaaacagcaacgcgatcagagatccccagggaagtcctacagaagcatcggtagcactgaaggcatcgatgaatcccacaccttcgaaaaatccgccgacatagatcataccaacgacacagcagatgatcagtacgatcacagggatcaacagatcatatacttttcctctgtcagaacccttcggtgcattgtccgcattggtcacgcgttctccctcagtgaacaggtcacccttttctctggcattacgctcatgcttagccataggaccgtaatcgaatcccatcagtgccattccgacgacaaatacaatggttaacagcgaataatagttataggggatcgctcttacgaacagttcgataccggaatacacaccctcgtccaccatgcctgatactgctgctgcccaggaagagatcggtgcgatcatacagatgggtgctgccgtggcatcaatgatatatgcaagctttgcacgggagatcttgtgtccatctgtgaccggcatcataacggatcctacggtcagacagttgaaatagtcatccacgaagatcagaacacctaataaaaaggtggcaagcagtgctcccgctctggtctttacatgctttttcgcccattcaccgaaggccgcagagcctcctgccttattcatcaatgccaccatggttcccagcaggatcaagaacatgaagataccgatgttccatgcatccgcaacggaattgatgaatccttcgttgatcactgtgtccagcgtcgcgatgggtgaaaatccggtatagatcagcgctcccgtgacgataccgataaacagtgatgaatatacttcctttgtgatcagtgccagtacaattgctaccaccggcggtagtaatgcccaaattgttccgtacataattttgccctctctcgtagttttttcgcagtttctgcaattatttcactatctctaactttatggcaaaccttttgtcctgtcaataaaattttgcaaattaacgcattaacacgatagcttatttatcatttttactctttttcgctttaaatcgctaaattttcttgcatctgcggggattctgttctataataggcaaagaaatttagcagaaaggacgtgccccgcgcacgatggaatactatgagtttcgaattcatcaaaaaacttcccactcctgcggaaatacgtaaggagctgcctcttccggcagaattagtcaagatcaaagaagaaagagacgccgagatccgagatgtcctcaccggtaagagtaataaatttctggtgatcatcggaccctgctctgctgacaatgaggattccgtttgcgattatgtaaaccgccttgcaagagttaacgaacaggtgaaggataagctgatcctgatccccagaatctacaccaacaaaccccgcactaccggtgaaggctacaaaggtatcactagccagcccgatcccgagaagaagcctgattttctggcaggactgatggccatgcgtaaaatgcacatccgtgcgatccaggagacagggctgactgcggcagatgaaatgttataccctgagaactggggttatgtatccgacatcctctcctatgtggcaatcggcgcccgttccgtagaggatcagcagcaccgtctgaccgtcagcggttttgatgtagcggcaggtatgaagaatccaaccagcggagatttctccgtaatgctgaattccgtatatgcagcacagcatccccattcctttatttataccggctgggaagtaaatacccatggaaatgatctggctcacaccgtgttgcgtggtgctaccaacaagcatggtgccaacattcccaactaccactatgaagatctgatccgtctgtgggatatgtatgaaaaaatggatctgaagaatcctgcctgcgtgatcgatgcgaaccattccaactccaacaagcagttcaaagaacagatccgaatcaccaaagaagtcatgcacagccgcaagctgagttccgatctccatcagctggtcaagggcgttatgatcgagagttatatcgaagaaggtaaccagaaggtgggtgccggctgttacggtaagtccatcacagatccctgcctgggttgggacgatacagagcgtctgatctacgatatcgcagagtacgaataagacgaacgcttttttaaaaaaattgcaggaagcctttgaataacataggattcacaaacgcttccaatacacatccgagaaccagtactcccaaaatgagcaccggttttcccagtttaccgggcagggacttttttccctgcccggttatgttatgataaaaataaatacttctgtaaatatcctcgcaccactgaagcagcatcaccattgcaggtacataacacagatagtgaggaaaaattccaacaatacataataaaatccccttgattccataacggcaggtcgcagtacctaagaataatccaagggaaaagccatattttactgtcatcccaccacagaataacaatcccaggtacgtcgtggccatgagaaccagtgcaataaaatctttgcctcttttacacaggatgtaccagaagagaaccttgttgtccacggccatgtatttcatatgatacaaagtatcctcatccagcattcccatattcttcaggaaagtgccttttccccaatatacgatcagaaaccccactgcgaatccgatcacaaacagaaaacgaagcggcagctttcccaccggtacgatagacttatcccatttcatgaaaattcccatctctacgccacgcaatgttatgttaatatatgcggacaacacagggaatcattcctgaaccgtaacaactaaaaaacaatccgccacacagattctatccatggagcggattgcctacctcaacgtaatgactatttacttaagtatttcgatgcatatgtcagaatgccgcaaatcgtcttggcatcctgaatcttacagtcatagatcatttgttttaattcctctacggaatatgcctctacattgataaattcatcttcatccagatgctggttccctctgtctttcaggtctaacgccagatagatgtcgattttctcattacagaaagctactgtggtatagatggaagtcaacagttccacatgatcggtatgatagccggtctcttcctgcaattcccgcatggctgcctgatccgtaggttcttctctgccattcagtccgccggccggaatctccagagtctcccgctccagcgcattacgatactgccgcaccatgagaagtttaccgtcttctcttactgcaaccacggctgctgcgcctttatgatcgatcagatcccattttgcaatgttaccgttgggaatctgcatggtgtcctgataataatcaatgatcgcaccttttgcaaccagttcccgtttgatacgcctgaattcttccatgacccgttattccttcttttatttatccccgaatctgttatttgttctccagtaatttgtccacacttaccatcttgacacacagtacgaacagatccgttgccattgccatctcttccggtgtcgggaaggaaggtgcgatacggatattggaatctttgggatccttcttataagggaaagtagcgcctgcccccgtcagagtcacacctgcttccttacattttgccgcaatagccttggcacaaccatccatcgcatcaaaggagataaaatacccaccgttgggttttgtccaactgccgataccaagtccacccagttcctcatccaaaaccttcaatactgcctcaaattttggacgcatgattgccgcatgcttcttcatatgttcacgaataccgttaatatccttaaaatagcgtacatgacgtaactgattgatcttatcgtatccaatcgtctgaattgtcatggactttctcatatcatccagattggccttagaagatgcgatagccgcaataccggaacctgcaaagcttaccttagaggtagagcagaactcgaataccatatccggatgtcctgccttctcacattcggagagaatctctaacagctgatcctgtctgtcatcatataaatgatgaattgcataagcattatcccaaaaaatacggaaatccggtgccgccggcgtaagcgctgcgaagcgtcttacggtctcatcggaataagtatatccctgaggattggagtacttcggtacgcaccaaatgcctttgatggcgggatcttcgctgaccagcttctctaccaggtccatatccggtccttcgggagtcatgggtacattgatcatttcaattccgaaatgctctgtaattccaaaatgtctgtcatatccgggaacagggcacaaaaactttacatgatccagtttacaccagggggtatttcccaaaatgccatgggtcatggcacgggatactgtatcatacatgatggtcagactggcattaccgcatacgatcacgttctctggttttacctccagaatatccgccatcagcttctttgcctcagggatgccatccaaacctccgtagtttctcacatccattccatcctcagccttcatagcgctctgagaattcacaacatccagaaaatccattgtcatatccagctgattgactgcaggttttcctctggacatatccagtttcaggcctttgccttttgcatcttcatatgcagcgttaagctctgccttcagtgttaaaagttcttccttggttaattcctgatatgctttcatttcttaccatacctttctcgtctttcctcgttgggaatacgccttcttctgtggatgttggataatcgtatacaatcatacactccgaatatcatactataagatgacatataacacaataggtaactttcacttttttacacccgtttatccataaattttcattaaaacagccgttgtatgtctccatacaacggctacctcttacatcttatgaaattgtcatttctgactggtcagttatttggcgtaatcaattacgcggctctcacggatcacattcaccttgatctgtccgggatattccaattcagcttcaatctgcttggaaatatctcttgccaacagtaccatatcggcatctgaaatctgttcgggcactaccataacacgaacttcacgacctgcctgaatagcaaaagatttatctacacctttgaaattgtttgtgatatcttctaactgtcttaatctgctagtataggtttccagtgtttcccttctagctcccggtcttgcagcggatattgtatcagcagcttgtacaatacatgcaatcagggaagtaggctctacatcgccatggtgagattccactgcgttgataacagtagcattctctttgtatttccgacacaattcagcacccagctgaatatgagaaccttccatttcgtggtcgactgctttaccgatatcatgcagcagtccagctctcttggcaagtctcacatccaatcccagttctgcagccagcagtccggacagctgtgctacttcaatagaatgctttaatgcattctgaccatagctggtacggaatttcatcttaccgagtaatcttaccagttcgggatgaatgccatgtacgccaacctcgagagttgcggcttctccctcttccttgatcattacttcgacttctttctgcgccttctctaccatctcttcgattctggccggatgaatacgtccgtccacgatcagcttctccagcgcgattctcgctacctcacgacgaatcggatcaaatccggacaaaattactgcttccggtgtatcatcaatgatcaggtctacacctgtcatggtctcaagtgtgcggatattacgtccctcacgtccgatgatacgtcccttcatctcatcattcggtaactgtacaacggaaattgtagtctcagagacatgatctgctgcgcatctctgtattgcgttaaccacatattcctttgctttcttgtctgcttcttctttggcccgactctccatttccttgatcatcacggccgattcatgcttcacttcatcttcaacaattttcaataagtagtcttttgcttgttcagaggttaatccggaaattcgttccagttcctgcacacgctgctcattcagcttggagacttcttccttcattctgcctagggtttcttctctggctgccaaacttgcctcgcgcttctcgatggcatctgctttcttatcgatgttctcttccttctgctgaactctgcgctcataccgctgagcttccgctctgcgctccttgatctctttgtccagttcattcttggtacgaatggactcttctttgacttccaggagtgattcacgctttttgttctctgcagtcttcagggcttcatcaataatctctcttgccttctcctctgcgttgccgatggttccctccgcattcttcttcagacgggtggtggtaacctttgctgtgatcagcactgcagctataatggcaataacagaaaccactaatactattacaatattagtgtccactacaggagcacctccttatgaaattttcattgtacattttgctctgataatacaaattatcgttcaaaatagaatgcaatttatgtacattctaacaagcaattcacaacagtattagtgtaaactgaaaatactcctctgtcaagtacaagtcgcaattactccaaaaatagttcctatattaatacaatctttgtgcattatttcttgcttttcctgcactatacagtatcctaaaactcgtcactgtgcatgcctccgattgccttgcgaatggcttcctgtgagaatccctttcttgccagaaatgcgtatattttctgtcgttctttccagtctgtttcttccgctgcatcataatgtttcttacgaagcaattcccggatcatactctgttcatcctgttccccgccattctccctccagttctgccaggcttcctctatcgtggcagaggaaatccccttgccctggagatcctgttcaatgcgtcttctgctgcggctgttctcatgataggtaatataatccactgcataccgaagatcatctatataatgaaagcctgccacatattctattgcctgctctatgatctccggcggataatatccctgctgtaattttgtccgtaattgtgaggtcgtatactcccgcccctgaagcagattcatagccctcagttttgcacgtttaggcagtacctcctgcataatggtccggtaatcctccggtcggagttcttcactctcttttatatggtaaagacgcaattcgcctttgtataaaacaaaggcgaattcctgatcaatatataccttacttctcgatttggaaagttccgtaacctgtgttaccagcatggatctactcttccttctccgctgtagcagatacatctgccttcagtccgtaatgctctctgaccttctctgcaatctcatcacagacagccggattatctttcaaatactgttttgcattctctctgccctgtccgatcttattgccctcgtaggcataccatgcaccggacttggcaactacatcacagctggccgccagatccaggatatctcctaccatagaaataccttctccgaacataatatcaaactctgcttccttaaaaggaggcgcaatcttatttttcactactttgacacgggtacggttaccaatgacctctccgccctgcttcaatgcctcaattcttctgacatccagtcgtacagaagaatagaacttcagcgcccgtccaccggtggtggtctcagggttaccgaacatgacacctaccttctcacgaagctggttgataaaaataacagtacagttggatttgctgatcacagcagtcagcttacgcagtgcctgggacatcagtcgcgcctgcagacccacatggctgtctcccatatccccgtcgatctccgccttcggtaccagtgcagctacggagtccactacaatgatatcaatagctccggaacgcaccatggtctcagtgatctccagtgcctgctctccgttatccggctgggaaatgtacagattatcaatatccactccgatattcttcgcatagacgggatccagggcatgctctgcatcgataaatccggcaatacctcccctcttctgtacttcagcgatcatatgtaaagtaacggtcgtcttaccactggattccggtccatagatttcaatgattcttcccttaggaataccacccagtcccaatgctatatccaaacttaaagaaccggtaggaatggtctccacgttcatctgtgccgtgggatctcccagcttcattaccgcgccctttccatactgcttctcgatctggctcagtgccgcatccaatgctttaagcttatcatctttttccatgtttatctcctttttgttcaaggaacaaatgttctgctttttatttagaataaaacatttgttcgtgtttgtcaatgtctatttttattatatctattttatgtccaataaaactcccttcaagagcacccccctatttgctaatttgtcccgataatcgtctgaaattttggcgaatgcctgaattgccgataatcagagatagaaagacatgtccgcgaattgttccgcaacaagatataaaatgaatgtaccacacatccccacttcccgcaaggatgcatgatacattttttatgttttcagcactatttacaattttgtacccttacgttttgagggtatctcacaaattatttttttgttactttttaccaaatgtcactttactgaagtatttcaaaatgcagctgcgcatgaggatcaatgctgcagaggtagtcgcttctctgatctggctgcgggttccggagaaatgatattcttttaccgtaagttctcccttaacacagcatccgatatacaccagtcctaccggcttctcttcggttcctccgtccggtccggcgattcccgtcactgccactgccacatccgcttttagcaaaagagccgcccctttcgccatctctcctgctgttttgctgctgacagcaccgtatttatccagcgtgctcttacgcactcccaggaattttcgcttagccttattggaataagttaccaatcccgctttataacattccgacacaccgggcacattgataattctcgccgcgatcatgcctccggtacaggactctgcagtaatcacggtcagatcattggcaagcaacagatccgccactgccatctccagagtggtctcctctctggtactgtagatatcccctccgaaacgggattttaattcttttactattggtttgatcgtctttccggctgccttggcattttctccggaagcagtcacccggatatgtacttctccggtcttagcgtaggtggctatggtaggatttgtctgtccgtcgatcaaatccttcagcgtatcctccacctggctctccggcacaccgcacagctttaccatccgggagcagatcaccccgggagtcaatgcgtccagataaggaagtacctgctgatcaaacatgggaatcaactccgcaggaggtcccggcaacaatacgatcctgttcttctctgtttccaaaatgatccccggtgccgttccgttatcattgtccagtacttttgcaccttcgggcaccatggcctgtttccagttattctccgtaggctgaatatctctcactgcgaaaaattctgcgatccgttccatgctgtggtcatccactgacagttttttcccacagacctttgccacagtttccttggtcagatcatcctccgtgggtcccagtccgccggataacagaattacatccgaacgctccatggcacattttaacacgcccgcaagtctctccgcattatctcccaccaccgtctggtaatagcagtccagtccggaagcagcaagcttttccgccagatatgctgcgttcgtattcacaatattgcccagtaaaatttcggttcctacacagatgatctctgctgtcattgatttaccgcctttcgctaacattatccttgtcatagagttatccacagacagtatactacacttccaaagcagagaaaaggaaatcttttactccagtgtaaattcagccagatctaaactgccttccccacggaaccggaaatacaaaggatacactccggccctgacctgtaccggaatcgtaatcgtctcccagtcctcagcagcaatgtcgcagatgcagcttcctactgcaattttttcgggatcctgcatccttcctccttcctcatggcaggtgacatacaaggttcctttcatcctcccccgcaatgtcagccggatatttgataactcctttccttgaaaataacggtatcccacaatacaaccgtcgcttattccccgaatgtactgtcccggcaggctctctctgtcctccccatcctgtgtgatgcatgcggttctatcatctattggtactgtcttttcataatataatacacaggcaatgtacgccggataagtcccctctcctataagccatccgttgttcagcccacagctggtagactccacctgggcgatcagcccctgtgcatcaatgtttatctgttccgctacgccctgtctgcagaaagaactattgtttgtatgcctatggtcaaaaatatagtacctgccgttaagctccaccagtcctccatgggtatttcccatgggatagcaaggttcctcctcggaatagccattcattcccacatccgaagtggaatggatccggccgccgaaccgaaaatctttgtctggtctgtcactgataaaataatacaatcccgtatttcttgcggagtagacaagataatagcgtccatttatctttcgcatggacggtgcttcgaaatagactgcccccgctgcagcggaggattctctggaaatggtcaaaattgggcctctccgtaccgtcagcatgtcctgttccagttcacacatgtggcatcccacaaattttcttccaaagctatccacttcacggtttgtggaacagaacccagaataaagatagattcgtccatcgtcatcaataaaaatactgggatcaaactgaaaatattctcctgctgcttccccgagaatctgaccgtccggatagactacatctcccaaataagtataatgccccgccggggtatcacagactgccacagagatgatcgaggaatccgcgatagaataatacatgtagaatctgccgtttcttccctggatcacatccggtgcaaacaagtaatagcgtccattcttttccgccttcttatggcattcatcctttatatgatctgtgtgccggaaaattacaccctcatatttccaatccgatagatcagacaatggagccgaccagcagacataatcattttcacaataataattacctccgaaacgatcatgacttccatagatatagagtctttcaccgaacaccctcggttccccatctggaatatattcatagcttggcaaataaggattatagccctgttttttcataatagttatcctttcttttcgtctctctcagttttctatctttcattttctatttaatttttctcgaaattccggcttccgtctgcccactttcagattttcattcaccaccttttattcagagctgatgccttagtttctcatccattcccttgtgactccactcccgccactgggtgggagtgcattcataccttttctgaaaacagcgatggaaagtccgcatattagggaatccgcattcataactgatttcggtcaccgttttcctgctgtccttcagcagattacaggccatgatcatccgttgctgcgccacataagatggaaatgaaatattcaactgagaagaaaaaatgtgggacagataatacggactgattcccagctcttttgccaccttctgtgccgtcagttctccggtaatattgtcgttaatatattgcagaagtttctgcgtaatattcaggtctgaaggcttgtccttcttaatgaccggaacattttcatacatatcagccagcagcgccatcagaagtcccttgtcctgcctgaacggtcgtaactccttattcagaccaatatccgacagaatgtctaacaccatctgaccatacctgctgagcgcgttcttacgaaaatggggagattccatatcataataggttaattccttctgaaattctccaatcgaatccatatccgcaatgatcagaagcatcccgacctctcccacggagttgtaggaatgaatctggttcgggtagatcatcaggcaatctccggcagtcagatgatagctcacccccgctaccgtagcatccatctctccttccgtcaaatgaacaaattccatatgcttatgcaaatgaaatgggaagttcggatgccaccagacatggcagtcatagaccttttttctgctctcataaaacggttttactgtattcatactaatctctccaattccgcagacgattccttccgtcggaggaatctcgaatcaaatttgtgctctttgtattctacataccatattccatttcagatttccactgtttttcttaaaaatagcaatttttgtcctgtatgttatttctttttgtcgtgcagtcaacatatttttcacgtacaatcagattaaatgaaagaggttccacattgaaaaccaattacctctaagcaaagaaacgagatagtttatgaatcgtacagaagcaaaagaaaaagctgccgcattggtagcaaaaatgacaatagaagaagctgcctcccagctgctgcactcctctcccgcgattccccgtctgggtgttcccgcctatgactggtggagcgaagcactccatggtgttgccagagccggcactgccacctgctatccgcaggcgatcggtctaggtgcaacttttgaccatgatcttctgcaagcaattgccgcttccattgcactggaagccagggcaaaatataacgcttattcccagctgcaggaccgtacccgctataagggtgtgactatgtggtctcccaatatcaatatcttccgtgatccccgctggggaagaggtcaggagacttacggagaagatcccgtgcttactgctacccttggctgtgcctttgtagaaggattacaaacgaaacaggatgggtacttaaccaccgccgcctgcgccaaacattttgcggtacactccggtcctgaagccctgcgtcatagttttgacgccaaggctacgaaaaaagatctgtgggagacatatcttcccgcttttgaagccctggtaaagcaggcggatgtggaagctgtcatgggtgcctacaaccgcaccaacgaggaaccctgttgtgcacactcctaccttatggaagaagtgcttcgcggtaaatggcattttcaaggacattacgtctccgactgctgggcaatccgggatttccacgaagggcaccatgttactgctttccctgaagattccgctgctctcgccctagagaagggctgtgacttaaactgcggctgtacctatgaatatatcttacaggcatataaacaggggaaagtgagcgaagaagagatccgccgcagtgccgtgcgcctcttcaccaccagatatctgttaggacttttcgatcacagtgtgttagatgagattccttacaacgtgataggatgtaaagaacacagagaactggcttatcaggctgctgtggagagctgtgtactgttaaaaaataacggcacactccccctttccctgaaggataaaaagcgtgtggcagtcattggtcccaacgctgatagtcatgccgcattagtcggcaattacaacggtacccctcccctctccatcactgtggtggaaggcatcataaggatctgcgaagataccgactgggatgtaaattatgcggaaggatgtctgctctatgacgatcctgcgatacgaaaggtattccagaattaccgcattccggaggctgtggcattagccgagtcctgtgacctcgcaatactttgcgtcggtctcgacgctacgttagagggagaacagggagatgtcggcaatgcttttgccagcggtgacaaaccggatctattgcttcccaagattcagagagacctagtggaacaggtacttgctaccggcactccggtgatcctgattgatctcgccggaagccccatagatttgtccgcttatgaggatcaggtgtctgcaatcctgcatgcctggtatcccggtggcgaaggtggccgcgccattgcggatattctgttcggcagagtatctcccagcggcaaactgccccttactttctattataatgacagtcctcttccggacattaccgattatcgcatgaccggacgtacctaccgttatttggaaggcaaaccctggaaacctttcggtttcggactgacctacggagaattacagattacagaagctaaggtatcagaggcagaacacacgagagagaactcctccgcacagatcactctgcactgtcagaatcccacggggcgtgacttaagtgatgtcatacagatctatgtccatgtgaatggctccgccaatgaagtgccgaatcacaaactggcagcctttgagcggatccgcctggaagccggaacagaccgggaattacggattgaaattcccgccgtggcatttactacagtagatgattccggtaaccgtaactgtgatggtacatccgctacattatatgtaggatttgcccagccggatctaaccgcagaaggtcagaagacctatgaatacggcagaggacagatcctcgagatcccattacactgagcactatggtggtaagccatttgctatagagagatgtatttttaaaacaagaaggataaatcctctcctcgccatgggggctcggattttccttcggaaaacaaggaggataaatcctctcctcgccataggggctcggattttccttcggaaaacaaggaggattacaatgaaaagaaacaagatcttaagcttactgctgtcagtttccatgctgaccgcactcactgcctgcggaagtcagggttccgatgctcccgcagcatccaccgctgccggaagcactgcagcggctaccgaaagcgccgcttcttccgataacggctatgtgctggacaaggttacccttgtcgttgacggtactttcaatgcatctgtagatgcttatcaggacaagttcatcgaacagtgggacgttgctgtcagcgaagcacttggtcatcccatcagcctgaatatccagcagttagaccattccagttatgtagacggtgttggtcgtctgttcgccagcggtgactaccctgacgtaattctgctgaatgcaagccagtatgccgaatatgcaaaaaccggtcttctgtgggatatgacagatgcctatgataatgcaaagttccagagccatatggtacttcccgcagtgaaccagagcgttcgtatcgacggcagacagtatggtctgtccaccggtcttggcggcggttgtatcacttatgtaaaacaggcatggttggatgctgttggcatgaaggctgaagacgttaccgactgggattcctactatgcaatgttaaaggcattcactgagcaggatcctgacggcaacggcaagaatgacacttatggtgttgcagcagcaggttttattggttccgaagccccttataccaactacctgcctcagttctggcagaatgcataccccaacttcacttatgatggtaatggtgtatggtatgatggtttcaacactcaagagaccaaggatgctctgcttcgtttacagcaggcttacgctgacggcgttatcgatcccgagtccctgaccatgggtaccaaggatgttcgtgaaaagtggtggtcttccgatcagtccggttccttcggtgctttcacttactggtccggttactggaatgataacctgatcaacaacatggacaaaaacggtgtagattccggtctggcaaggctggctcccatcgccgaaatggatggctacctgaaccgagaatctcctgtatactgcatcattgatgacggtgacggcgatgattccagagaacaggcaatttttgatgcagtcttcgaaaccatgtttgatggtggcactgtacaaacactgtgggtatatggtgctgagggttatcactggtctaccgaagcagaaactattgttaccggtgaaggtaccgacaatgcaaagacctatgaatataaagatggtgaatttcatcttcgcctgaacccttccgatcccagtgctttgtggaaaaagaatgctatcgatccttcttccatgatctgctccttagagaatggttttgaatccgcttccgacctgaccaaagaatgcaacgagtttttctccgagcacagcgtagatgctccccattctgcatcctgtgatgccatcaccaactacggcggtaccatcacagatgccaagaatgcagtcattgctgacgttgtagtgaaaggtggcagtgtagacgcagcaatggaaaattatgtgaaaactacccagaatatggtaaccgagattcttgaacagctgaacgcaaaataaaagcagttaatacttttctcaaattaaccctatacagcaaaagccacttcatattatgatatgaggtggcttttgatttaacttgagagttagttgaatac

SEQ ID NO: 11331 - DNA, 159991 bp, Unknown
  gut microbiota DNA sequence
gcgcggacatcgtgtccgctttccccctgcctttcagcacttttctagaaaatatcaacatcctccgacaaacatcttcgatatggcaccgcatatgccgggagttctgcgttttggaaagctttcaaaaaccagtagccctgccaagggctattagtttcataaaaagatacttattttactatatttatgaaaaaaattcttaaaatacattcctttttttcataaattctataatatctcgaattttatgaaatttattagttttgaaacataaaagatggggatatttttcataaaaacaacatttataacagtttttatgaaaatgcagaacttgttattaacttctgcgcatgtattctaaaatgctctgcctaaataattgggatgcttttcataacccagcagaaaaggactgctcccccggacatagatgcggcggagactgtgagattttcttggaaagtgattagtctacaggggcaacgcgaacacgatgttcgcgttagccaagccatgcctgcatggcttttggtgcacatggatggcaacgtaaaggcggccccgtcatggtgagaagcacttggccactttcctttagaaaatccacagttgtagctagcatccgagtccggggcgggcagccctttctgcgtggattttagaacaactatttcactaactttcagtttaaaaaactatttttatcgtcgttccttttcccggttcactctccagctccagatttgcatggcttttagcgatgatatgcttcacaattgcaagccccagtccggtgccaccggtggatttggaacggctcttgtccacgcggtaaaaacgctcgaagatcctctcctggtgttccttggagatcccgattccggtgtcttttactatcaggtaagtatggtcctctctggcataggtctgtacatccacgcttcctcccaggttgttataccggatggcattatcgcacagattgtatagcaattcctccatcatctgccggttcgccgttacgtagcactccgtaccggagagggcaatagtcacattatgtttctcggcactcatggagagcatttccacacaattctgtgccatctcatgaagatccaaaagctccgtatccgcttccccttccgtgccatccagctctgacaagcgaataatatcattgatcagtgtaagcagacgattcgcgctgttatgaatcccgtgagcaaaacgcaccgtatcctgttcggaagccattccggtctcaatcagctccgcatatcctgaaatagatgtcagcggagtcttcagttcgtgagatacatttgcactgaattcctgacgcattctggcatttttcataatgtcctcatgctgtttgcggatcatgaccatgaacggtgtcagctcctcataggtctgcatttccgtacactcacctatgttctctgccagtttttcaatgggggcgatcagcttcgcggtcagcactttggccgccaccatgcacaagatcagcagcactatgaaaataccagccatcataggcagtgcctggctgaaaatgctataaatactcctggcatctttggacagacgtaagatacttccatctgcaagccggatggcataataaaaagtggaccgggataacgtctcggaattacggaccgcctcgccctctccgtcctgcatggcttcccggatctcgggtctggaagagtggtttcccatggccacggaatccgcttcattatcatacaatacccggccgtcactgccaatgatggtcagtcgaagatccgattccaccggcacaccgctttgctcaatttcctctacggaagagcagttgctcagcaacaatccgtagcttttcagatcctccagtacctgtctgcgaaacagatcataatagaccactgtgatcaataccatcgtcagcagaatcgtcaccgtggcaatgagaatcatcattttgttaatctttttcttcatcttctgttacgctttctcaccgttcataatgtatcccacattacgtaccgtcttgatcagactgccttcttccttcagcttctgacgcagagtcttgatatgcatatccagcgttctggactctccctcgaaatcaatcccccacacccggtctaagatcagttccctggtagtcacgataccggcattcgtcatcaaaagctttaacagttcatattccttgtaagtcagttccaccggctccttacctaccatcacggaatgtttctctctatccagcacaatattgccaagcttcaaaatcttatctttgtcctgagtcttctgacttctccgaagcattgctttgaccctggagatcagttccatgacaccgaagggtttcgtaatataatcatccgctcccagatccaggcctttcactttatcgatctccgtggtcttggccgtcaccatgatcaccggcaccagtactgtatcctgtctggtacgaagctttttcacgatactcagtccatcctcatctggcagcataatgtctaacaggatcagatccggtgctgtctcgttcagtgctgcatagaaatctgtggcggagtcaaatccttttacctcataccctacattggccaacgcaaaggtctcaatctcctgaatgtttttatcatcttctactacatagatcaatgccatctcacagcactcctctctgactgtgctttctcttcttaactatacctctgtaaatccttactccgcaagtaattttgcattcttttccataacacgatcctgctttgtaggaggtaactggtatttttcacggcatgccatcactttaccctgaaaatccagattatcctcctggcgcagttcatccagataagcatgcgtatcgaattcatcttcattcacctgtaccaggcagaccgcaatgttggagcagtgatcactgacacgttcaaagttcgtgatcacatcggataaaatgaatcccagttcaatagtgcattttcccttgcggagtctgcgcacatgacgctgtttcacatccaggctcaatccgtcaataacctcttccatgggttctacctgtcttgccaggttcaggtctccctttataaagctgttcatggtaatatccagaatgtcatgtaccgctctttcgaataccttcagttcttcctgtgctttatcggaaaaatccagctttttgtcatacatttcctgcgcagcttctttcacattgcgggcatggtcggaaatcctctcaaaatcaccgatgcaatgtaaaatagtgttcagcgtctcgctgtctttaccggacagctgtctggagctgagcttcaccagataagtaccaagttcatcctcaaagcggtccacatctgtctccatctgtgctacctgctctgcttttgcctcgtcatacccctgcagtaattccatggcgaggtccattgccttgcgggatttgtctgccataacagacgctacctgtctgctctgttctaccgcataggcaggtgtatccaggaatcggggatccaaaaggctcagtgtcttgtctgtctcagacatttccttcacatcttcatgcgtaggcagtgtcaggcaggcaagctttaccagtccattggaaaatggcagcaataccagcgtggcagcaacattaaagcagctgtggaccactgcaatgccgaagggggttgccacttctcccaaaaaagcaaagggatgaatggcatttgcagtataaaagattccaaggaacaatatcgttccgataatattgaaatacaagtggatcagtgccgcacgctttgcgttgcgggaagcaccgataccggagatcatagcggtaacacaggtaccgatattctgtcccatgataatgggaactgctgcgccgaagcttaccgctccggtcatgcacagtgcctgcaaaatacctacagatgcagaagaagactggatcaccgctgtgagaacgagtcctgccagcacaccgaatacgggattttggaacttgatcagcagattggtaaactccggtacctctgccaaaggtgaaactgccgcactcatggaatccatgccaaacatcagaattgcaaagcccaccaggatggttgccgcattttttaatttatctttatgggaaaacagtaaaatacccacacccacgattgccagaatcggcgaaaaagaactgggtttgagcatacggatccagaaggcatcactctcaatgcctgcaaggcttaagatccaggaggtcaccgtggtaccgatattggcgcccatgatgatgcccactgcctgtttcaggctcataatgccggaattgacaaatccgactaccattacagtggtagcggaggaggactggatcacgccggtgaccaccgcacccatcaagactgccttgatcgggttgctggtcagtttctccaggatacgctccagacgtccgccggaggcctgggacaatccatcacccaacagattcattccgtataaaaatagtgcaagtcctcctaccatcttcaacaaatcaaaaaagtccatactctaatcctctcattttacataacatactttacattttcggtttctatcttcactttatcttgcttatgtaaaatgcaatatcttcgaatgtaaaatttatgtaaaattgcaacgatgcagagccatgaactattgctctatgctcgtcagatgctggcatctgtaagagcatatgacaatagttctttggcgagcacgcctcaatgagcaaaagcaaagcctcgcagaggcgattttgcgaattgaggcgctgcatcgttgccgggattgtcgaatcctagtataattttaccccttccatgtctccggtcatacggaagatcgcccactgggcaatatttactgcatggtcgcctaccttttccaggtactttgccatcatcagataatccactacgcggtcggcatccagattctgttcccggatggcctgcatcatctctttcttcatatcgttaaagaggtcgtccaccacatcgtcatgctccacaactttttgggcattcgcttcgtctccctccacgaaagcctccacggaattatggatcatatcctttgcctcttccatcattttcagaagcagcttttcctgttttccttcagcattcatattccccagccgcagatacagctccaccatatctgccacatgatcaccgatccgctcaatgtctgttacaaccttcagtgctgcactcaccagccgcatatctctcgccaccggctgttgtctggtcaacagacttaagcacatagcttcaatgcttctctgcatatccaccatcttgtgatccgtatccagcagagtttttaaaatatcctctttgttctcccggattccatatagcatatggtcataactgatctccgcatgttctcccatctccgatactttatttttcaaagtctcaagatcctgctcaaataatactctgggtgacatctcccattcctcctatcttttcattcaaaatcaaccaaaccgtccggtgatgtagtcttctgtccgtttatcccgggatcttgcaaagatctcggaggttgcattcttctcgaccacttctcctaccaggaaaaaagcggtatcatctgacactcgggctgcctgctgcatattgtgggttacgatgaccacagtgtactttttcttcagggtctccatcaattcctcgatctttaatgtagagatcgggtccagggcggaagtaggttcatccatcagaagcacctccggggatactgccagtgccctggcaatacacagtctctgctgctgcccgccggacagacccagtgcagatttatgcagacggtcctttacttcttcgaagatagcggcaccctgcagggaacgctccacgatctcatccagttcctttttattcttgatgccatgcagtcttggaccataggcaatattgtcatagatagacatgggaaaaggatttggctgttggaataccatacccacctttttacgaagcaatgtggtatccacccgcttatcgtaaatgtcctctccgtccaggatcacttttccttcgactctgcagccatccaccagatcattcatccggttcaggcagcgcaggaaagtggatttgccgcagccactgggaccgataaatgcggtgatggcatgatctgcgatctccatatttacatttttcagtgcgtggttctctccgtaatggagatttaagctttccacggttattttactgttagccataaaggtctctcctttttgtgatttctcttactctcgtctcaatttatttgctgccagcttggtcagcagattcaggattaatacaataacaatgagaacacatccgattccaaatgcgttgtcatattgtcccttctgcatctgcagatacagttcgatcgtcagggttccgccggactccattgccttatgggccagcttcgccagattgtccccgaaagctccggtgaacttcggcagcttataatcgcttcccgcggtaaataagagtgcagcggattctcccacgatacgtcccagtgccaggatgataccggtgacgatacccggcatggaggacggcagaaggatggtacggatcatatgccattttgtggatcccattcccagagcaccggtacgatagctgtccggtacggttcgcagagcttcctgcgtatttctggtgatcagcggcagcaccatcagggtcagggtaaaagaaccggtgagtagcgaataaccgaatcccaaagtctctccgaagaagatcataccgaataggccgaaaataatagaaggaataccggacagggtctcggtggtaaattcaatgagggagaccagcttgccgggtttggcatattcgttcaggtaaatagcgcttcccacaccaatgggggttgcgatcagcagagtgatcacgatgatgtacagagtatttaacaagttaccggcaatacccgtggtctgttttctggcactggtcacagtcgttaaaaatgcccagttcacggtgtgaatgcctttcacaaagacatataggataattcccagcaaaagtgccaccgccagtgtggcggagatgtaaatagctgccaatagcagcatgtcagtggggcgttttctttttacatataaggtgtctttattcattgtcatccgccccctttttcagtattttattcagcgctacattaatgaccataatgaatacaaacaacaccagtccgatggtaaacaacacctgtctgtgcagtccggaagaatatcccatctcgctgacaatggctgtggtcaggaatcgcacggagttaaagggcaggggcacattcacgctgctgccggataccagtgtgatagccatagcctctccgatagctcgtcccactcccagaacgatagcggtcacaattccggatttggctgccggaaggatggaccggaaaatggtctgcacatgggaagcacccagtgccagggaggacgattttattccggcgggaacggcgcgtatggaagtctcgctgatattgatcaccgtgggcaggatcatgatcgccagtacgatcacggcagacaacaggttcgcacctccggtgaactggtgtgtcgtggatccccggaagatcagtctttctaattgatacatgagaggattcaataagtagattcccaacaatccatagataacggaagggatgccggctaacagctctaccgcaggctttacaatggctgctaaggatctgggtgccacctctgccagaaataccgctgtcagtacgccgatgggcacacccagtaaaatcgccagagtcgtaccgatgatggaggtcagaataacccacagaataccgaatttcggatctgctgccgtcggcatccattcggtgccgaacaggatctctcccagacccacttttaaaatggagggggtaccgctgatgatcatatataaggtaatggaaactaccgccagtacggcgaagagggcacaaatggtaaatactatttgtgccacagtttccacaaccgctttgttttttctatttcccattacggaagcgtgtgttccactattcatcgctttttttcctttttctgtgtcaggctattactttacagtgatcagaccaacttcggaagcaacctgctgtccttcgtcacccagtacaaagtcgaaccatgcctgtaccagatcgttctgctcggagatttcacccttggtagccattacgaaaggtctgcttaagaagtagttaccggccttgatgttctctgcggtagcttctacaccttccagggaaagtgccttaacactatcatccagagcatccagggaagcatatccgatagctccgggaatggatgctactttagcgatcacagcaccggtgctgtccagttcgtttgcatatttgcaggcatccttcaggtcaaccagctcttcaaaagcacctctggtaccggaacccgcctcacggccgattacaatgataggctcatctgcgccgccgacttctttccagttggtaactgtgccattgtagatgttcgtcagctgctctttggtcagatctgctacttcgttagcaggatctacacatacagcaataccgtcaattgctactatgttctctgcaacgcctgctgccttttcctcatcctttaagcttctggaagagttgccgatatcggcagttccgttggtaacagcttcgatacccgcaccggatcctacgaattcagcagttacggttacatcaggatattcttccatgaaagcttcactcagtgcattggctaacttctccatagaagtacttcccaccatggaaaggttgccggacagatctgcggtggtctcagcaggtgctgcttcactgcttgctgccacagtgctttctgctgcgctgctctctgctacggaaggctgcgctgtggttgcatcactgttaccgcatgcaaccaatgtagttactgctaatattcctgctccgatcagagctaataatttgctgtgtcttactctcataataatgtcctccatgtgtttgtttttctttctcttgattacgcaatcatactaacatgaaggaaattcacataatatcacagtccggtaatttatttgtaagatttaggtaaaaaggtgagccgtcaaaatggcgacggatgcgtagcagacgcttttatgaatgcagcgtggactgaacgtaaatcagatgctctccagaatgccgtcagcaattgcccgggcaatctcatcaaaccggctgtcaaagagttcattgtccgcgtccgtattgataaatcccacttctaccagtaccgccggcatattcgtgctgttcagcaccaccagattcggtctttcattcactcccagattcacgaaccccacctgctccagtccggcattgatgttgtacgccatcctggctgccgccccatagcggttgtagaccagactctccactccgctgtactggttcggataaggactggaattgcgatggatcgagacaaaataatctcctcccacctcatttccctcctgcgccttctgataaggagactcgtagatatctgtggtcctggtgtaatacacatccactccgttttcttctaagatgcttcccaccgccagtgtcagcgccagcgcatcctcactttcttttcttcccttatacgtggccccggggtttgcaccaccgtgccccgcatccaatacgatcaatggcataaaaaagctcccgcatatccttttgtttcatgatatgcgggagtttctccatttagatatttattttaaaagtgctgccgtcacttcctgagggattacaaattccggtgctcccatagagccgggagccacttcgtattcatcaaatgctatgaccagttctccactttcattgaaataaaaattcgtctgttccgtgatcccctgaaaattgaattccggcatatcgtcattatccaggaaatagatcacgccttcgtccgccgccatctgttccttcatctgggtcttaatgttctcgctgatcgcggaaatatagtcactcccttctgcaaacagatctgccagtgtcaccacatttcccgtctgtttagcaatcgtataaaattgattatgttcatagccgctggcctccgtctccaggacactcagcttcactgtataatacagtgcattatctgtaacaacctcctgtgttacatgcagtccatgatacccttcctcggataaggtatcctcgaactgacggatcagttcctctaccgtagcctccataccctgattgaccgcttccacaccgtcttccgacagcttcgcctccgcagcctcctgtccgacaccgacttcttccacactttctgcagctgtgccctccaaagtggcagcaccgactgccacctctcctgtgggaacaccttctcccgcatcttctccataagcgatctgtgcaagttctacttcggcatcatggttctcatcgctataattgtactgccgcaccgtcaccagtctaaaaaagcctcccagcaccggaatattttccatggcatgggcgatctgcatattggtatttggcagtgcgatcaacacgatcacagccgctgctgccgcagtccatgcggaacgtcttcggacacgctccgctctttttttctctatacgggctctgtcgatacctgcctgcaaccgttcccgtcccgcttcgggtattgtcatattctcatactcctcttttaattgttttaattgttcctgttcattcatatctattctccatctgtccggtctgttcggaccggtcatgttatctcttcctatatctttctatatctcttttcctgtatctgtcttatgtcctgaatatatcgatgtaggcggtcatttgctcagcctgtgctgccttcgaggttcagccgcagctttttcatcacccggtacagtctgctctttaccgtgttcaggttctcatccagtatcttcgcgatctcctccagctgcctgtcctcaaagaatctcagaaccacaatggcacgatccttcgggtcaagattttctatagcacgttttaaatcaatattttcatagatatcttcacttgccgcctggatctcctccacatccgcgctctccttccggctgcgcaggaagctgcatgcctcgttgaccacgatccggtatacccaggtctccacgtattgcggctccttcaggctgtcactttttaaaatggctttataggctgcttcctgtacaatatccagcgcgtccgcttcattatgtacataactataagcaagacggtaatacttctcatacccctccgtcagggcacgctccaccgcctgttctttttttctgtctgacatatgtcctttcctcacttttatgaaaactgcatgcaatcattttctctgatattcattttaacacatattcttcttaagctgtctattattttgacgctgtattcccacaaaaagtttcaccggcaaatcaggaaaatattcccaacagcttcggctacacaaaagatcccgggctgctcacccgggatcctttgaaaagagatgtatgaaactatgcgttgcatttgttcctgtcgattcgaaatgtaagctcttacattccgaaccatgattattttaccattatttcgactatttggcaaacaaatttccatcagttgcgactttttcgcacttttagccaaaatcacaccttcttttttgtctaatcctcatatttgaagtagtcaaaatccgctgctttgcggcttccacagcctccgttgttggcatagatgcctaccagcgtgccggtatgtcgcttgggatcgtcgggaacaccctcgtcgcagaggtaaatgcagttctccaggacacctaccagctcccagttctccccatcatagctgtaatagaaagttctggtcagtttctccaccactactttcagatacacaggaccttccttcaccttgtccacttccaccaccagctcctcgccgtgattgcggttgatgaccagctgaatcttccgtccacgctcatagcacagagcgcatctggcataagtggctgtactgtagtagcaggtcagtcctgcctgttctccgtccttatccgggtagaactccagcttcgtctccgccacataggacagctcctgttctcttctcaacagcgtatttttcgcacggatctcattcaattgtccgtctctggtccagatccggaaatatccgggacgttccgtcaatgaccaggaaccgttatccgggttgcgcacgaactcccattccagattcagcctggtatcgttaaaatcgtcaaacagatttctctcataaatgcactccggcagatccggtgcaatctgtgtcaggctgggaccttttccctcgttgacagtaaaccatccatcctccgtccactgtacgggatccagtgccgactctctgcctacggtcgtgtaattcccctcattgggtcttccgcagagataatagcaccaccactgaccgttctgatcctgtaccagcttgccgtgaccggctctctggatgggtgcagcgggatccttctgacgcataactggattatagggggagcactcgtaagggccgtagaaattcttacttcttcccacgttgatgccatgaccgtaaccggtgccgccctcagccacaatggcgtaataatagccgtcctttttcatgatatggggaccttcggagcaacgctcgccggtgccttcccatgcagtcttcgcaggacccgccaccgccagtccgtccgccgtcaggggaactgcctgtgctgccttggcaatgatcatatatctgctgccgtcatcatccacgaacagggatgggtcaatatcgtccacttccaggcataccggcttactataaggaccctccggcttatcagacaccatcaccagctgtctgcgcattacgttgttatcacgcttgccgtccgcattcagacgcaaagttacataaacatagtattttccgtccacatattcgatatccggtgcccagatgccgtgggaatcccggatgtcactaatgtccagccactccggattcgtgatggcatggccgatgatatgccagtgaaccatatcccgggaatgggaaatggggatcgccggaaaatactggaagctcgaattcaccatgtaataatcgtcaccgacacggatcacggaaggatccgggaaaaagcctcgctgtacaggattgtgataagttctgggttcgttcataggaatctccttttgcatataatcacagtgttttgttcctgctctcagtgtattctttacgggctcttctgtcgtgccagttctgttttcaatttgtgacatatattgcagccattgccgtgttttttcttatcgcatcaagagttttcatgccctatttattccataatagagtactgcatccactcatacaaaagcttcgtaccttccatgatctcaggaggcaacaacgccctggctaccagtttcagttcgtcggattcgatgtccgttctgcgaaggtgggcgtaatcgccgtcaatgctttctacgatatactcaaaacgattcattgcaaagtctccttattaaatatgcactaaaatatatccatcctgcaacgatacggacccatccgccggccactccggcatggtatcgcggatcgtcctggcctgctccagtatctcaggatctgtaacctgcgggaaagaatgtccgtgcatctctagaaaattcatcatctcacggttcgttccgtcaaatgcatcaaatgcccactgaataaaaggataattagcctctcccgtaaaacaatatccctggggtgtgaaatatttttctttcagatgaggatctactttgtctgtaattgctgcgatcacacggtactgccatgagccataggaaacataataatcctccaccagactatacggggtgctgtaatgtcctgtaaagatcaccggtgtgctcttcccataatcacgttctatttccaatgcgatctcggtcaacacttcttttgtattcaggtatttgttatagtctacataaaaagcctgattcaacgcagccgcctgattatatatgatgattcccgccaaaacaagatatgccggtctaagccacggcagggctcttcgttctgaaaaaagcagatagagcaataaaaaaccgatacctgtaaaaaagggcatatactgacaggagcgatacaatgtcactcttccttctacaatggtcaggagaaaaggtgtaatcatcatacccatcagaagaagaagataccatatatcttttcttcgtattcccagcactacggcaatcatgcccaaaacaaaagttgcaatcacatatcccagtatgggcaaatataccactgcattcacataatacacaatccaaaatctttttagtaacatccataattcctggatcggttgattcgagccgaatattttcaaaacttcagtaatactccgctgattcataaagcctaccatatcctgtaaccggaacacctgtatcataactttaaggattacagatctcaagattataactcccaacgtgatcgatgcacctatgattaactggcctatcacatatccgctctttaatcttctgttatctgtaaaagcgcgtaaatataaaagtagcaatatgcctatgataaacagcagcaacatagactcataacatcctatcgccacggtaatgcatataagacttccaagataatattttatagcacttttacgcgtcccggaccatttgtccattccgctccaaaaacatatcaatgccaacgctgaaaatacatatccaatatccactccgtcatggtagtagtatacatacacttcactaatgatcggattggatatgaatatgcaggaaaatatgatataccctgtcagtcccaccttgcgaccgaatattctgcggaaaagaacacaaaacaaggttgcactgatacacaataaaataacgccgatcagttccatcataaacggcgagaagtcagacaaatgaaatattttatttatcagatagatgaaccatcttcccattacgacttccagtccatcctccaaatacagcgaaacagccgtatcatctattccaatacttggatgcgtcatttcaaacccatacccgcatatagcagtcaggcataaaataattacatatattttttgttgaaaaaaatattgaaattcctcccacagttttttcatgtttttttctccgcctttgttcttactttatcccagtgtaaaggatttttccatcaacgtcaagaactgtagtggattacgcatcctcattgatatcctcgataaacacctagaaaaaacaaatgccacacccgaggaattcgacgcagcagcggcttatcgcataaattgcttcgcaattcatgcgatatccgctggacttcgtcatatccgtgacataaaaagtacccgacctctcaagcaagcttggagatcgggtattttgcacatccacgtttatatcttcgaaaatcgctctgcttcgcagagcacgtgcttcgcacttatgattttctcgataaacacccataaaaaacaaatgccacacccgaaggtgtggcgcttgttttttctatggggtgtttacatcattccgcccataccggctccaccggcaggcattgcgggagtctcttccttgatgttagctacaacgctttcggtagtaagcagtgtgcttgctacgctggtagcgttctgcagggcacttctggtaacctttgcgggatccaggatgccggcacttaccatatctacatattcctctttcagagcatcgaagccgacaccgacctcagactcacgtaccttattgatgataacgctgccttccagtcctgcgtttgctgcgatgtgatacagcggagcttccagtgctttcaggacaatgcctgcaccggtcttctcatcaccttccagagtagctgccagtttagcaacttccttggatgcatgaatgtatgcggaaccaccgccacagatgatgccttcctctacagctgctctggtagctgccaacgcatcttccaggcgaagcttagcttccttcatctcagtctcggtagcagcacctacacggatgactgccacgccaccggacagcttagccagtctctcctgtaatttctctctgtcgaaatcagaagtggtctcttcgatctgcttcttgatctgtgcgattctggactgcaatgcttccttatcgccttcaccgtctacgatcacggtgttctctttctgaaccttaacggattttgcacgacccagcatatccattgtggtatccttcagctcataaccaagctcggaactgattacggtaccgccggtcagaattgcgatatcctccagcatagcttttcttctgtcaccatagccgggagccttaacagctactacattgaaagtaccacgcagcttgttgacgatcagggtggtcagtgcctcgccctctacatcctcagcgatgatcaacagcttagcgccggactgaacgatctgctctaacaggggcaggatctcctgaatgttggagatcttcttatcagtgatcagaatataaggattatccagaactgcttccatcttatccatatcggttgccatgtaagcggagatataacctctgtcaaactgcataccttctaccagatccagttcggtctgcatggtcttggactcttcaatggtgataacaccgttgttgcttaccttctccatagcatctgcaaccagctgtcctactgcttcatctcctgcggagattgctgctactcttgcgatgtgctccttaccgtttaccttctggctcatcttaccgatggtttctactgcacatgcagttgctttcttcataccttttctcaggatgatggggttagcacctgctgccaggttcttcatacctgcatttaccatagcctgtgccagaacggttgcggttgtagtaccatcaccggctacatcgttggtcttggtagctacttcctttaccagctgtgcacccatgttctcgaatgcatcttccagctcgatctcttttgcaatggtaacaccatcgttggtgatcaggggtgcaccgaaggacttatccagtactacgtttcttcctttgggtcctaaagttactcttacggtatctgccagctggttaacaccagcctctaatgctgcacgggcttctgcgccgtatttaatctcttttgccataataatcagcctccaatttatttgttcttagtcttaatttcttttcaaattttgcttttactgaataattgcaaggatgtcgctctgctttacgatgatgtactcttcgtcatccagctttacttcggttccggaatatttggaatagatgacctgatcgccaaccttaacttccatcttgacttccttgccgtctacaacaccgccggggcctactgctacgacttctgcctgctggggtttctccttattctgaccggggagtacgataccggacttggtagtctcctctgcaactaactgttttaatacgactctgtcacctaacggtttcaaattcatgataactgcctccttaatagctatttaaaaatattattactcgttttcatttgttagcactcatttttatcgagtgctaattgctatagcttatattagttttatatgcccagtttttcaaacgtattcacaactatttaaaatctctattctcattttttctcttattttctcattttatctttcatttttatatagcatgagtgaaaatgcgatttaatatttcgtttataattataaaaaagaatctcgcttatttcctataaattaaaaaacagcccgatgctatcaccggactgtttcccatacttacctataaaattgatttactttatgctgttttggcatcgtcatggtatttctgccacttcttcttataaataaagtagcagggaattcctacgaataccattccacctaaaatattaccgatggtaacgggaataaagttgttcagactgtgaagtatcgtcagtccctgaatctgctctgccgtcaatccgtatgcttcctgtgctttcgccacgtaaacaggattctgcgcagccatcatgccaacgggaatgtagaacatatttgcaacgcagtgttcgaagccgccgaccacaaacgccatgatcgggaagaagatcgcccagatcttacctacgatatccgtagctgccactgccatcaggatagcaatacataccaaaatattacacagaatgcctgaggtgattcccttcaggggagaaatgcccactttgccgactgccaccttgatggcataggcacccagcagccctccggtgtaatccaaattaccggaaaagtagatcagggtatcaatgatcagggcgccgatcagattgctgaagtacaccacgatcaggttgcggatacattcgaaccacgttacctttttgccaaccacatccatgacgatcaggcagttaccggtgaaaagctctccacctacaaatacaatgatcatcagtcccacggggaagataatacctgccacaaatcgtgccagccctacattgtcaatggcatgtgccgcggtgctgctggtggctccgcccagcgcgataaatgcacccgccataatacctaacaggatcatcttgcctaaaggaagatgggctttaccttctccggctttcatgttggtatcaatgacttctgacggcgtattaaaatgctgttccatataaccctcatttctgcacagctctcatctgctgtactctcttaactcatttattccttatattacactactttcatgatagtaagcaagatattcacttcatgtatctgattatatacatttctgttttcaaagtggaatctcgtttacaaaacgggaaactcggatgactattgagcagcgtctgattttgtcgacaaagagtctttttttgtaatttttttgcctttttttgcaaaaaaatgctagacaaaagacataatgtgtactatactaaacttgttcggtgagagccgaaccgcttatataagtagatttccggaagaattccccttttacacaattaaagtggctgcaggtttcccgcctgcggctgctttaattgtgttataagatagtttttaagctttgctttaaaattgcaaaagtttttgcaaaaatttaaaattttcacttgctaagtgataagtatctatgctataatagctttcgtcagtggttcagctgatacaatttcataggggaatagtacagcggtagtgcggcggtctccaaaaccgttaacgggggttcgatcccctcttcccctgctaagaaaagtcgattttatcggctttttttatttctgttttagatacaatttcaccccggcacgacgcgattcatagatctgcgccatgccggggtgttgtctttacagctatattgttatatctcctctttctccgaatccggtgcgatcacagatccgatggcggtcgcgtaatcagagtactccggaatgctgatcttcacatcccacaggctcttgaaatcctcgatgatctggcggcactcgaagaatttagtcagtccgccgatcaggatatactctttgatgccggtgctcatagatgccaggattcctgcctggcagatattctcgatcaccatatgtacaatacctgccgcgatatcctccggtttggactgggcatctgccttaccgaaattagaagccgtcacatccagattcaggcccggcaacttttctttggccagatctgcgatccgcagatcgatcttcgccacatcacccttacgggacaacggcacaatttcatgaatgtcgccggtattcagcatgatcgaggacagtccacagatcgttccgcctcctaagccgacaccacccaggtgcttcatctccttctccgtcactttgacgaagaagcttccggtacccatactgatgacaatgacttcctttttatccgtaagataatatcctccggtacctgtagcgacgaattcatccactttataggtaggacgatcatataccgctttctccacatatttgcttcccacaccggtgatatagactccttccacatcagccaattccagattattctcatacagatatcttccgaatgcaccatagagagatgccacctggctatctgccttgaccgccatgggcggaagcatatgttctccttcaaaagctacgatttttgtcgtactgctaccgatatcgattcctattttgacaggcatgttttcaacctcctcatatcacttaactgttcatcgtctcatttccagatacatttccacagttcgagaccgtcagccaaacactttatccacagcatcctgtacagaactgacgccaatgacccggatcttacttccttttttacactcttccaacgagacaagcggcaccacacattcttcgaagcccagcttctctgcctctgccacgcgttgttttgccatgctgactgcccggacctcgccgcttaatcccacttcaccgaaagcgaccagtttcggattcagtgccttattccggaagctggacagaatcgccagaacgattcccagatcgatcgccggttcctggatcttgatacctccggtgatattcacgtaggcatcacaggaagataattgcactccggaacgtttctccagcactgccatcaggagatttacacggttgaaatccgtaccggtggtctgtcttctgggaattccgaaattgctgtggcacaccagcgcctgcagttcgatcagaagcggcctggtgccctccatagtacatgccaccacagagccactggcattctccggccgtccgttcaacatatattccgaagggttcttcacctccgcgagtcccgtctcccgcatctcgaaaacaccgatctcgttcgtggacccgaaacggttcttcaccccacgcaggatacggtaggaagcatgtctgtccccttcaaaataaagtaccgtgtccaccatatgttccaacactctgggtcccgctacggttccttcttttgttacatgtcccacaataaaaatagaaatccccaatccttttgccagttgcaacaggatgcctgtggattcccgcacctgtgatacgcttcccggtgctgcagatacattttcattatacatggtctgaatggaatctatgatcacgacctccggcttgctcctgcggatcacttcgccgatgatgtccagattcgtctcacacagcaggagcatatgttccgaaaatgtgccgagcctgtccgcccgcatcttgatctgtaccttggattcctcgccggagatatacaataccttatgtccggcctctgacagattgtgacacacctgaagcagcagggtagatttaccgatccccggatcgcctcctaccagagtcagggaaccctgtacgattccgccaccgagcacccggtccagttctttgatcccggtgagtgtcttgttctcctcacggatcgcgatttcagataatacacagggttcggaagcctctctgcgctctcttctactcccggtgccggtgtttttcaataccgttttatctatcgtctcttccacgaaagtgttccactctctgcagccggggcattgtcccagccatttcgtggattcatagccacagttctgacagaaaaaaacggtggctgtcttaccttttgccatgctctctcctcaatcgttataaaaaagagcccagacacgaagtactacaatatcctccgtgtctggactcctttgcagtgcgcctttacgcctctacgatcttcacaggtacttcccctgctgcttccagttctacactcaggctcagctttccgccaagtccggtcttcatggttcctacgttcttaccgtcaataaatacttcgtactcggtgtcgtcctttaatcctactgtgatctgggaatcttcatcaccttctacgatgaattctacactgttatcggactctttgaactccaacacactggttccgggaacagattcatataaaaacataccgttcttctccagctttgtcatctcattgtaggtcttaaccttcagcagatcccctgcatgctcataatcttctacctttgccttcttggccaacttatgattaccaaagctgatagatccgtctgcttcactgcgaagtatttcttccactactgccatctgtctgtcctcctgaaagtaactgcatccgcaacacttctttatctttcgtcctttgcgaatggggtttgaatagttacagtataatatatctcaccctgtttttctacaaaaaaatttttaaattttgtaactattcagagtcatttaaatatcattgaatattcgtcgaatacttgcattcgtaagaatatttcatgatatttataagacgaagtaacctcaatgagcaaaaggaaagctctgcaagagcgattttgcgaattgagtgactgaatagttacaaatgcttaattcttaaccgtaaatacgactttaccattcttaaatcctgcagaaaccttatctcccggcaccacctttttcagcagtatctcttctgccagagcatcctctaccactgactggatcgcacgctttaacggtctcgctcccatcttattgtcagcatattttttcaccagatgctccttcagtgctacagtgatcgtcagatggatgcccagctggtcctcgcatctcttatacagattggatgccagcagatttacgatctctttcatattctcattgttcagctggtggaacacgataatgtcatcgatacggttgatgaattccggcttgaagctgcgctttacctcttccatgacattggatttcattttctcataatccttcgtctcgctcttctccgttgcgaagccgagattcttgggatctacaatccgctgtgctccggcgttggatgtcatgatcagcaccgtattcttgaagctgacctttctgcccttggaatccgtaatatgaccgtcatccagcacctgcaaaagtacgttgaacacatccggatgagccttttcgatctcatcaaacagaacgacagaataaggattcctgcggaccttctcgctcaactggccaccttcttcaaatcccacatatccgggcggggaaccgatcatcttagataccgaatgaccttccatatactccgacatatccacacggatcatggcatcttccgagccgaacatagcctctgcaagcgccttggataattccgtcttgccgacgccggtaggtcctaagaacaggaaagaaccgatgggacggttcggatccttcagtcccacacggcctctgcggatggctttggccacagcggtaactgcctcttcctgaccgatcacacgcttatgcaatgtcttctccagcttcagaagtctctcgctttccttctctgccagcttctgcaccgggattttggtccactgggccaccacctcggcgatctcattttcaccgatgcttaaagtattttcctcttcccttttttcacgctttttcagcaaacgctcctgcttctttaccagagcatcctgtttcttcttgatctctgccatctgggcaaaagcttccacgcggatagccttctccatctcccagtccagctcccggatcttatccgagatctcctttgccttatccggtgcatccattgcatgcagtctggcactggccgctgcctcatcgatcaggtcaatcgccttgtcgggcagattcctatcattgatataacgactggacagtctcactgccgcctccaccgcttccggtgtaatggtcacatggtgatgtgcttcgtacttccccttgataccctccaggatgcggacagcctcttcctctgtgggttcttccaccgtaaccggctggaatctccgctccagtgcagcatccttctcaatatacttgcgatactccgcgatcgtggtcgcaccgatcagctggatctctccgcgggccagagacggtttcatgatattggacgcatcaatagccccctcggcacctccggcaccgatgatcgtatgcaattcatccaggaataaaataatattcccatcctctgtgacttccttcagtaccttcttgatccgctcctcgaactctccgcggtacttacttcccgctaccattccggacagatccagtgtcagtactctcttattctgcaccgtaaaaggcacatctcccgccacgatccgggctgccagtccttccaccacggcggtcttgccaacaccgggttccccgaccaggcagggattgttcttcgtccgtcggctcaggatctggatcactctgcggatttcttcatttcttccgactaccggatccagctttccttccctggccaacgccgtcagatcccggctgtactgctccaacgtagactgtttcgccttacggtctcccttttttccaaggtcttctttgtacagattgccgtcctgtccgatagcgatcagggtatccacataaattttctgtacattggctcccagcgtgttcaacaggcgtaccgctacgttttccccctccttgatcagggccagcagcaaatgctccgttccggtctgcttctgtccgaaacgtgcggcctgatggtgtgcttcctccaggattctcgcggctctgggagaatatccctctctgtccttcactgcgacaccgttctcaaacgcaatcaaatcccggatcatgtccatgacctgcccggtctccacaccgttatcagccaataccttggccgccacaccggtgtcttcctttaataatcctaccagaatgtgttccgttccgatgtaaccctgcttcaggctccttgcacatctggaagcctgcgccagcgcattttgcgccttatccgtaaactgtgactgcatcaattcagtcctccatactcttcatatatttcatcaatcagctcatgaacttcctgcctggaaatattcttgcagctgctcttagccagtattacctgcaattccttccgcaattcatctaccgcacgcatgcgatccacatcgagtgcaattaccgcgccttttcgccggtctaccttaacataaccttcctgcttcagaaccgtatatgccttatttactgtatgcatattgatcccgatcgtatccgccagctggcgcacgctgggcagagaatctccttcatgaaattgtgacgtggcaattcccatgatgatctgattgcgtaattgcatatagagtgcttcatcactgttgaaatctatctctattatcatcaaactcgctcccttcccatgtcactgattgttatattcctattataacagtgaacgcagtactgtcaactgtaaccggggaaagtttatcgttttttaatcaaaaacggcatctcacttgtgcaagatgccgtttgcattttattgatcttcgtctccgtcccaattcaggaattcaaattcaaattcatcatcatctgacatgaagtttttggacttccagccgggattctgattgccttcactctgcggtacaggctttgtgggtcttgccaccggtctgccggcctgctgcgctggtctttcactctgcggtgccgtgggtctgcctccctgaggtgcaggtcttccctgtccgggtgtcaccggtctgcctccctgaggtgcaggtcttccctgtccgggtgtcaccggtctgcctccccggggtgcaggtcttctctcctgcggtgccgcaggtcttacggtctgtccaatgggtctctctccctgaggtgcgggtctgccatctggacgtgttccctggcctgtcggtctggatgccggtcttctctcggctcccacttcatgcattactttctggctgccttgcggcctgccgccctgcggtctgcctccctgaggtgcgggtcttccgttttggggtctgcctccctggggtctgtccactcttcttctgcgggccgtttcctcttccacgccggagaaataggatgcgtcattcatatctttgattttgaagatcaacagtgtcaccgctgctaccgccgctacaagcagaatcaccaaaataatgatgactgctttctggctgctgatttttttctgattggtctcatactgtgcattgatctctgtgatctggttcagggaattgaacagatcttcaatcttatattgcttctgccctgccatgtccagcagataccatgcatctccctgcatctgagtatcccagtctttggatgtggtctgtgtatcttccgcaggctgctcgtctgtgggttgttcctctaccggctgttcttctaccggtgcctgcagctctccggataatgcaacataatccgaacgaatgaagcctgtcacctcgacactgttggaaataaagcttatctgataccatgtctttccatcggttcctgttgcctgtccggtcacagtcagtgccattccattctccgcagtagtcacgatctggctggtggtagacgcattgctgcgcacacgaacagactgacctccggtcacggtcgcactcaggggttccactgcagtaacctccacaggagtctcattcacaacaggcgccggtgttgctgtggtcgtagtcgttgtagtagttgttgtagttgttgtacctgaagaagacggcggggtagatccgtcggtaatgtttaccagatcggaacgaatatatcccagcgtattcgcatccacatatacttcataccaggtataaccgtctgctcccttggtctgacttttgatggagatcgccttatccttggccgcgctgccaatcacttcactggaagaatccgcagttttacggatcttagcactggatgctgttaccttggctgcactttccgcatggctgacaattgccagattctcactaaaaagtcctgctcccaacacaaataccagtgccagcattccccagaaaaccttacatttacttattctctgtactgtctttttcatctgcaactccttttgtatcctgaccttgtcttacgcttcatcgattgctttgccaatgtcatgacgcatgtatttattctcgaaagagatccattccgttgccgcataagcgttggcacgggcttctttcagatctgctcccttcgccgtcacccccaggacacgaccaccgtttgtaacgattcccttgtccgtaagcttcgttccggcatggaagcaataataaccgtcttttccgtcgaagttctccagaccgcttattacaaatcccttctcataggatacgggatagccgtcgcttgccaggaccacacataccgcagcattgtcctcaaattgcaggtcgatctgatccagtgtgccgtccacacaggtttccatcacttcgataatatcattcttcatacgcggcagtaccacctgcgcctccggatcaccgaatctggcattgtattctaataccttggggccgttcggagtcagcatcagtccgaagaaaatgactcccttgaaaggtctgccttccgctgccatggcatccacggtagcctggtagatgtatttcttacagaatgcatccacttcctctgtatagaaggggctgggagaaaaggttcccataccaccggtgttcagcccctgatcgccgtcctttgctctcttatgatcctgcgcagaagtcatgatgcggatggtcttgccgtccacaaaagaaagtacactgacttctctgcctgtcataaactcttcgatgaccatgcggttgccggctgcaccgaactttttatccagcatgatctcatccacgcctgccagcgcttcttctaaagtattgcagatcaatacgcccttgcccagtgcaagaccgtccgccttcagcacgatgggaaagcttgcctgctccttcaggtacttaatagcctcctccgcgttatcaaaattctcataagctgcggtgggaatgttatatttcttcatgagatccttggaaaaggccttgctaccttccaggatcgctgcatttttacggggtccaaaagcccgcaggccctctgcctccagtgcatccaccagtccgccgaccaggggatcatccatgcctacgatggtcaggtcaatggcctgttctttcgcaaatgccacgatcttatcaaattccatggctccgatgggaacacattctgcgatctgaccgatcccggcattgcccggagcacaatagatcttatctactttaggactttttgccacacaggttgcaatggcgtgctctctgccgccaccgcctacgatcaatactttcatacccatatcttctgccttccttaattttcgctgtttgtatgctttacttttccgttcacgacacagatccgtccgttggcaatgtcatccactgccttcggaagaagcagccactctgcctgttccatcacacgtctctgcaacgtctccggagtgtcgtcgtcctccactgccactgccttctgtgcaatgataggaccctcgtccatgccttcattcacaaaatgtaccgtagctcctgtcactttcacaccgcgctccagtgctttttcatgcacatgtagtccgtagtatcccacaccgcagaaggaagggatcagggacgggtggatattgatgatccggttgctgtattcatgtaccattgcctccggaatcttcaccaggaatcctgccagtacgattaagtccggagcaaactccttcacctttgcaagcagtgcctcattaaatacttctctgctctcataatccttcggagacacacagactgcgggaatcccagcattctgtgctctctctaagctcttcaccgtcttgttattgctgatcacgcccacgatctgtgcgtttttaaccttacctgctgcaatagcatcaatgatggcctgtaaattcgtgccgccgccggataccagtacgactactcttaacatatggtcacacccttttcaccggtctcacaggtacctaccacataagcagtctcgcctgctgccttcagagcttccatagtcttatccacatctgcgggatccagtgccagtaccatgcccagacccatgttgtaagtattatacatcatctcgtctgtgatattgcctttcttctgcatcaggcggaaaatagcaggcacttcgtagctgcctttcttcacgactgcacggatgccgtcgggaagcattctggggatgttctcatagaaaccaccaccggtgatatggctgcagccctttaccttaacgcctgcgttcttcacagacttcatagccttcacgtagattctggtaggagcaagcagtgcctcaccaagagtcttgcccagctcgtcataataggtatccaggctctcttttgtcatatcgaatacttttctcaccagagaaaaaccattggaatgtacaccggaggaagcgatgcccaccagtacatcaccgggcttgatattctcaccggtgatcagatctttacgttctaccacgcctacggcaaatcctgccagatcatactcatcctcgggcatcagtccgggatgttctgcggtctcaccgcctaccaatgctgcgtcagactgcttacaaccctctgccacgccctttacgatagtagcgatcttctcgggaatattgcgtccgcatgcgatataatccaggaaaaataaaggttcgccgcctgcacatgccacatcgtttacacacatggccacacagtcgataccgatggtatcatgcttgtccattaaaaatgccagcttcagcttggtacctacaccatcggtgccggacaggagcacgggatcctccatatctttgatggcacttaaggaaaatgctccggagaaaccaccgatgccgcccattacttcgggacgcatggtctccttcacgtacttcttcatcagttctacagacttgtagcctgcttcgatgtctactccagctttcttgtaatccattttctcctcatttccgccgcaggggctctttcgttttattagtggggcagcctcttaagaggtccctgattctctgtcttatcttcttattttttcatgccttccaggtatgctttatagccgatctcctgcagttttgcatctttggcttctacctgttcttttaattttgtgctgtatgctttcagttttccgagaagttctgcgtcggaggttgccagaatcttggcagccagaagtcctgcattggcgccgccgttaatggctactgtggcaacaggaatgcctgagggcatctgtacgatggaatacagagaatctctgcctcccagggaagtagtgtgcatgggaataccaatgacaggcatcgggaaaatagcggcgcacataccgggcagatgtgctgccataccggcaccggcaatgatcaccttgaagcctttttcctccgcactttttgcatattcaaaaaatacatccggctctctgtgagcgctgatcacggtcatctcataagggatgcccaattcttccaaaatgtctgctgccttcgccatcacaggcatatcggaatcactacccattacaatgccaaccttagggcaattctctgtatttgccataatgtcctcctcatgtgtcggttttcaccgatttttccatatatctataagtgtactaaaatcttgtcgatgatgcaatggttttatgaaagttcctgcaacggttcgttcagttcttccgttcccggcaggacgaatctgccgttttgaatgatagtgatccggtctccgtcctttttcaccgcggtcagctctgccagttcatcataaggaatggtaatgtccgtatgacagttaaaatatgccttggacggattcacactgcggagcgccgccacctcgttgtctcttgccacgatctccttgccgtcgggattgtatacttttacttcttccgcatgggaataacaggtatctcccactgcaaaatgcggtcccatcttctctgcgatcagaatgggcattttggactccacacccagtttttttgctgccacataggctgtggtattcgtgccgatggcaaattctcctaagggcagtgtcttgtggcggaacaggatattctccttaataaatgccttattttcttcctctgtggcaaaattggcgcaattataattttggatcttaccgttttcaaaagtgatctccagatccttatattccagaccgtttaagaatacccgggttacatgcagcacaccgttcgtaccttccagtaccggagaggtaaatacctcacccacggggatgttcacatctgccacgcagttttcaaaaatagtctctttcgcagggttcttcagtttccataagtttactttcagatcggtatgattgccgttacaacccttaatttcacaatgatctgcctgatccagggcatcaatgatggtctgctggatccgctgatattttttataatccagcgtattgatctgtatcgtctcccggaacagttcctcgaagcagtcacccacctccgggattgggaacgcaatgatcgtgaagctgcgctcttcttctataatgtactgtctctgcagctggcccatctgggtacggttctctaccagtaatgcactctgctcatccgtcattttcaggctttccggcttgttcaccggctcgaattccttctctccgaaggtctccactaccgccggtcccgcataaccgcgtgcctcttttttatatttttcaaacgcggtatgcatcacttccagttttcggctgcaatacattttgtctaagaacagtgccttgtcatccttatggtcgaactcgtattgtctgttggggctgacgctgtagaagccattcttgtaaatggacggattgtacaaaatgctggaagctgcacggtagatcaccggctgcagtcccattttctcaaaattctccagggctcttctcatcatgcgctcaaagcccagctgataacggacatccacgaccgctttcttcgacagatccttgccggttacttcaaagccgatacgatacccttcggtgtaagtgtctgccatggtatggacagtctcctccggcagagaattcataaattccgccattttcaattcattttcgcctacatactcaccataagcatacagataacgtagatccgtaaagtctgcagttcgaagaattgccgctgcaaaattattctccggacataccatttcacgtacccgctcttctgccgccacatccgcataatcactgacgaaccagtagaggatctcacgaatagctgcatacgtgggaagcttatggttttcctgctgttcatatacaaatgccgcatatacctcagaaaacagctccatccggatcaccagctcatccaaacgtccttcgtaggtaaaaccgatcaggctccgcatttctgtgtataaaaaggacacaagcacaccgaattcttctcccagcatcttcacagcataagctggattggcaaaactgttctcatagttttccggtaaaatatcttcatacagagcacggttgcgctgctgtaattcttccaatgtggcagtggcctgtttcccctgctccaggaactgtctggtatcctcgatcagcagtaaaaacttcgctactgttgtaaaatattctttccagggtagtaactccgctccctggaaatcttcaccgggaatctcccggatccggagaagcgccagttccaaacgttcctgtaaaatttctctttcttccataatatctgttaactccttatttccaaatgactgtcgtgtgttcccatgctcctgcctccggatgtcatatcttacagccggctccccagatacagtaaaaagctgatgccaccgagggaaattacattcaatatcgtccccagcacaggaaagaaccggtaaatatccttgtctctcagtgtcagaacgccaaggatcagtccgatcagagaatagaccgttgccagcacaccggtgactccgtatcctccgtgcatcacgcccccctgactgtaggacaaatacgtcacaatgccaagagacgccaggctgatgacacccagaatcgtagacatgatcgctttatccgaatgttttttattcgtaaaaatgtagttctttttccgcataatatatctcctatggaacccgaaaagggcacttcctatgtggaaatgcccaatctgtgtaccaaaacggcgcctttcttctcttttgtcctcagaacaggatgtgggatttgccggagataagcttgccgccgctgatgatcagcagtactcctgccgcaattccgactaccagggagatcactcccaatacaatattcagagcacccgctccgcgcatgatcttatagattttctcttccatggaatcctcctgtcttctatccaaaacttttcgaagccgcctgcttaagcaccatatacggcgtaatattcatcaattgccttcttcagggtgtcgtcgatgtatacttctcccttgtaaggtctgttgtacagatgatcgataacatcctgcatggtcacgatggcatgtgcatcgaagccgtacttttccttgatctcttccagtgcgctgactttaccgcccagtcccttctccatacggttcagggataccatcagaccaacgatctctacgttggcagctcctcttaccttgggaaccgtctcttccatagacttaccggaagtggtaacgtcctcgatcatgataactctgtcgccgtcttttaaggaacttcccaggaagcttcccttatctgcgccgtgatccttctcttccttacggtcggaacagtaacgaacctctttgccgtataatttgctgtaagccactgcggttaccacactgatgggaatacccttatatgccggtccgaacaatacatcgaaatcatcaccatacgtatcatgaattgctttggcatagctctcccccagcttcatcagctgagaaccggtgacatacgcaccagcattcataaagaaaggagactttctaccgctctttaaggtaaactctccgaatttcaatgccttacaatccaccatgaactcgataaattcctgcttgtactgttccattctatgcaaaacctccgtaattttcatatcttttgttctgccctttatcataccatatttttttttaacattcaatgaatttccttgcaaagaaaaaaggcagtcagctgactgcctcagactgtagacaaaacgctcttggtcagcactccagaagcgttttgtctgcagtctgagcagccttattaaggctactctctgttctttaatacctccgcaggtaccagcttattcaatctgcctaccagcaggaaattgatcaccatatagcatagaagaattccaccataaatcataatatatatctgcggtgtgaacttcaggtccatgccgatagcaacatttgcaatgcaatacggatacaccagatccatgctccattttgccagtggaacgcagatcaccgctcccagcagaatcacatagaaattcccatccagatagagtcttcgtatctcccttctacggtaaccgaatactttcatcagtgaaatggaaaaggcggaacgatcgatcatcactttcatcatcagatacatgacgatcataaaaatcagtgcagatattgccacgagcattactaccatcggtcccatcatatctgtaaaaatctgtgagctttccgccacattatctttggatactgtggcatataatctgcaattatcaatatccagtgcatgatctgcaaacacgacattataataatcgtcctcctgatcaaacaattcctgcatgacatccctgtccaggaaaacatagacgccggaggtgaacgaaacaatatctttcacagtaaatgcataatctctctcattcacctcatcggaaagcaccagcttgtcacctaccttcacaccgaatttctgtgccgcagcactggagatcacaatctcatttttcttgtctgctgttgctatgggaaaatacggattgtcatcatcaatccccagcactgtcacatccagattgtatccataggcttcctttttcagattctcgacatacgccggtgttccaccctccggaacatcctccgtaggatatttataagtatacatataagcatactttgtttcttccagacaggcgtttccaaaattgatacacagtaccgcacagtctatggacagcatcaggatcagcaggcagatgaacataccgatcacaacagcaaatgcagaacgtatttcccgcagcatctgtctgatctggaatctgagcagaaatttcatatttcccagattcatgttctgtaccctgccggcttttcctgccgtctgctcgttacgaagcagtgacagagccgtgcgttttaactttttattgatcaccagataatttaccactgctgccgtcacaggtggcatgatcagactgtaaaaaagcagataaccgggtgtcacgatctgcataggcggcagagaataatatgcaatactatcgcccatctgccagcctgttccgtatttggaaaatcccaggatacatccgacagctccgcccaggaaagagatcagcatgggatttaacagatagtggaacagtaattgtcccctggtcacacccagggcatataatgcacctatgacgctgctttccttttcaatattatgtatcacaaatacggaaatcacataagtaaacaggaccatgagaataattccggccaggataccggcaaacctattgatgaccacatcgcccgcagcggcatcgatacgcggattgtcctccgctatcagaaattgggtcagattatcaatatcgaaggtgaaatattcctcgatcatatcatcggcttcctcctgcagttcccgcacgccatcccgcaattccttacttccgtctgcgatctcgctcactgcatccgtatactcgatgattccttcccggaaatcctccagatccgccagggtgtcttttgcttcctgcagggaatcccgtaattttatatccatgctgctgccctctgcagccaaccgatccaattcttccttataattatccgcggtcagatccacagtaatattattttctttcagctgtgcctccaccatgtccatcagagcatccactacagcatccgttccgcttaccaatggttcactggcagtatacaggacactcaatccaccaaacaactgctgggatccgcctgctgcctctcccacacctgccgtataagctttgacaccatcgcggaactgtgccactgtatccagctgtcccttcaccgctgccaattgcgccgctgtctgggatgctcccttctgcgtaaacacagctgccatttgatccagctgttctccgtaaccgtccaatgtcagtccggaaaaggtgatcccataagccgcatatggctccagctgagcctttaactgttcattgaccatacccagaatggcattgaaaattccataggctccctggttcagtgcagcactgttctccgtaatcttactcataccgcccaccagcgcgccgcctccggcggaagccgcattgacaccatccgtgtaggatttcacgccgtcccggaactcctgcaattcgtccagcgattttttaatatcctgcagatcctcctgcatggatgcggtataagcatgcggatcagcgatcatggtgttcagctgctgttcgtaatttgacgaagtcagcgtcacctccacaccggcatcctccaggctgtcatttacctgctccagcatggcatcaaacagggtatctgccgcatccgtaagatccgtattatgttctgccagttcatctacgccgtccgtcagctcattcacgccatccagcagttcccggataccgtcctgaatatcatttttcgtttcttctgcatctgccagcatttccagaaaataggtatctgtcaccttgctgcgatccagtttgaaggactgtagcagttccttcagttcctgatccgtcattgctccgttcagcagataggtgtaggtgtaatcctccgtccggaaattctgtccgcccgctttcagtgcttcgtaatcctctgccgtgacgaatccgactccaaacagattgctgtccacagtggtatctgatgttttctcatatgttgcatcgtaatccggtgtacttccgattcccgcaacgatgaaatctctgcctcctacggtaagggtatcccctaaccccagttcatgtttttccgcatagtgctgttccagcaggatctcgccctgcatgggcaactctgccccctgttcaggagcaaacagatcaatcttctctctcgcctgatagatacgtaaggtagcctggccctgatgaaaatccagtgaaaaatcctgctgtaccgtcacacctttatctgtgatctgtgtgacctcactgtctgtcagggggacaaatactccaaactgtccatcctctctgtgatgaacagcggcactctcctctgttccctgcatgatcgtctcagacgcccccacgatagctaccaccatatacatgaccattgccaccaggaaaaacaatgccagatagcgcagcaggttttcccggatatcccgaagtacgcgtttgctcaatatcctctgcatcctacaaatcctccagttctgccgccggaacccgcttctcattccggtaattcttgctgatctgtccatccttgatcatgatgacctgatgcaccatatttttaatggaattattatgcgtgacgatcagcatggtggttccgtactgtctgttgatatcctccagcagcatcagaatatctctggaggtttttgaatccagcgctcccgtgggttcatcgcacaacagaaggctgggatttttgatcagtgctctggcaatggcacaacgctgctgttgtccaccggacagttgtgcagggaacttgttctgatgttccgtgagaccaagtacctgcaataattcctccagatccaagggatttttcgtcagatactgacagacctgaatgttttctttcaccgtcagattgggcaccagattatagaactgaaaaatgaaccccagcttatttctccggtaatcggacaatgccttgcttccaagtcctgccacttccattccgtctacgacaatggatccggaatctacggtgtctaagcctccgatacaattgagcaatgtcgatttaccggaaccactggtaccctgaatgacacacatttcacctttttccactcctgcagtgatccctttcaatacctgcacataaccgccgccctcgccgtaacttttcttcaggtcttttacttccagatacatatccttcctcctcgtgcttattgataatgattttcattaacataacactgttatgttaatatcctgaaacagcacccctgcaaagtccgaactttttcggggtgcatatatcttagctttccgtcatcatgcccatccagccccgggccaaatacctggtcagggcatccacatgcttcagtgccatactttcctccgattcatgcagaaacagatgcatgaaagtatctaccataatgtgcgccatccaatgtgtcatataatcatcgatccgcggtctcccggtagcgccggtcaccatatcgcataatctgcggtactgctgttccgaaatatccacgatctcgtccagacaattttcgaagcgggatccctgagactttgtcaacaacaataaaaaggcatcccgattcgcatacatttgccttatgatctctctcgaggtctccaggtcatcatcgttctgttccagtctgaccacctgcgtttcacttcgcatctccgcagcataatgttcctccattgtcagatagagttgtttcagcggtttctccaccaatgcagcaaaaagatcttccttatctttgaagaaaaaatacaatgctcccgtggtcaccccggcttctttgcagatgttccgcagggaagccttcatatatcccttttccaggaactctctccccgcacattccaaaagatgctttctggtctctttattctcctttgttgcttctttttttatgtcatttccctccctattgtgtttacatctgttcacttgttcacataacattgttatgtctgaattataaataaaaacaggattgctgtcaaccctgtttttattcgtatttctatcttctgttttattttgttttcaactgatcgattttctcctgcagatctgcaatggcacgctggctattcttaatggcttcacactgcttctcaaaaggaggctcaggcatatcactgtactgctcaaaataaatcttgccgatctccagataatttttcttcatcacttcttcgcaggtagaaatctggctcttcagatttgcaatagccgccagttcttttgccttatctgccgccacttttcctttttctgtaatggtatcgccaatcttctctataatatccatggtatgatctcctttctggtactattattttactcttgcacgctttccacgtcaatagcagacccttgtgttcagtttatgtttatagtaagatagaaatatattatttttatcttacgctacaaaggagtgttcattttcatgtccagatcaactaaaaaagaaaatcttctattctgcattgtttcaactttaatctcaacatttgggattctgttgattctgaaatccaacggcttttatccttttaaggaagtaactctttttacctttgatatgaaagaacagtatctgccgtttttctcctctttgcattatctgatcggtggagatgattccattttctttcattgatctaaatccctcggcggcaattatattggtctgtatgcctactatcttgcaagccctttttcctggctgacaacactgttttccattgaaaaactgcctcttgctatttttctcatgaccgtcagcaaaatttcgctctccggattaacgttttcggtttatgttaatttcctgtggaataaatataattcattacccgcacagacctcttcttatcgaagattactcgctcatttaacgttgcttcctctgcccgttgcatacgcgctgatgtcatataatctgcaatttgcactatccatcatgtggttggatggtgtcattttattgcctttactcctgcttggagtggaaaagctgctggacaagcaacgtaatctttggttcattctgccattaacagcaattttctatttcaactattatatctcttatatggcaggaatcttttgtgccctttatcttcttttcagacttcttaccacttactctcactcccggcacgacttgtggagaattctgaaaaatttcgctctttctacattaatatccttgggactggcagctcctttgctgatcccgactttttccgatatgtttatcggaaaactgtcggatcctctgaccagtgttgtttatgatcctcgattgatcaaccagccgctatccgatatattgggacaacttcgcaatggcaccgttaactaccttggcgtcaccggacttcccaatatttattgcgggtatctcgctattcttttgtccattcttttcctattttgcaaacggatctctctccgggaaaggattggcgcctttttactgacaagcttcctgcttcttagtttttatctttggccgttgaatatcttttggcacggctttataacacctaattccttcaactacagatattcctttttattcagcttctgcctgttgtatatgagttgccgctttctatgtgttctttcgtatcaattaccatgttttttagagaagacgcatcgtttcccggcattggagcttgtggttggactgcttttgctaattacctcagccgatctcggtatcaatggcagagccattttccgcaatattgattacgcaactccttatatgcgtatggatgaatacgtatcttatctgaatgacaacaaaccactgattgatgacattaaagcctcggactccggaatgtaccgtatctgtcagaattaccagcttacttccaatgatccaatgcttttgggatttaagggaatgtttcattattcttccacttatacccaaagtgtcaacgctctgacatctaagctcggaatcggtcaggcatggttatggaataccggctatggtaccacccctgtgacagacagtctgttgggcgtgaaatatcttttgtcagacactgcagagccttccggatattactccttaaaaacgacggataattcggtgtccgtttacgagaatccttctgctatggaatttatctacagtgcacctttggcttcggcggatatctcatttacttctgatccttttgaaaatcagagccgttatctgaataacttatgcggatcgaatactttattctatcagaaatacgatatagaactcgccaatcctgctggcagtctgcctgctgatctggaatatgaccctgtttcctcctggagctattctttcatcgccgaaaatacggatccggtatatatgtatatgcccctgactccatttgtctctgcagatatttatgtcaatgatgctttggcaggatcttttgagtacggtaaaagtatttataatctctgtcttggatgtttccacgccggggaagccgttacggtaaccgttgtctcagcctcagcgacagcgcccggtgatacttatattgagtctttggatactttagcgttgcaggatgctttgacctctctacagaccggtgaaattactcttatctcccacagctcaggaagactttccggtaatatttcggtacataaaggtgataccattgttacctccattccttatgatgtcggctggcatattcgtctggatggtcataaagtacctgcctctgatatcggaacctatgcagatacttttctcacgatacaggcccctgagggaaaacatcatttagaaatgtattatctgtcacccggcatcgtcccgggacttctgatccttttgatcactttaatgcttcttctggtcgtaaactttttacaaacgcataagaaaaagcaacggtaatacattgcgccgcacggaacacttgtgctataatcgctttgtaaatccaatggaggtgacagcatgcaaccgctatacactactttgaaagtcaataacgaaattgaattatgtgaagtttctgatcctgattgtaagcagcttattgagcgggctcttttaaaaaatcggatttcctattatattcgttggccgaagtcctctttttttaacaggaaaaaggattcctgtattatctgtatcaacgataatgtccgggacacagctgaagagatcgtacgtgggatctgtgacgagtccggatataatgtccgctttattttaaaacgctcctctaatacatatttataaaaatacattttattaatttttgtatattaattgacatttttccctttatagcgcataataatttattataaaaacaaaggaggggacttttatatggagaaacgaattaataagcatgtatttgcctgggttttctgctttttacttggtgagttgggtgttgatagattcgtcagaggtcaggttggtctcggaattttgaagcttctcactgccggtggttgcggagtatggagcctgattgactggatcattgctcttaccaaagcatatggtgctgcttatgccaattccgaagaggttgtatttgtagacggaaaatatactgcataatcacatgatcaaaaaagcttttgtcttttcaggcagaagctttttcattttatcataacagacgatcaatttgatataaaatataaatcatgaagaaaaaaacaaaacatatattattttttagtttatttattctactgctcctgttatttttattgctcgcaggctatcaatgtccactccgtttctttttgggcattccctgtcctttttgcggaatgacccgagcgtttttatgtatcttagagggtgaccttgcaaaatccttttattttcatcctctgtggcctatcgtgttgggaattattattatttttcctctttggaagtttcggcttcttcacttatcggacaaatggatcgatcatggggcttttgcgattggaattctgttcttactctgctttatcataaggcatatgacacaatcccccattgtacagattgattttacaaaagggatttttcatttcttttcatatatgaatatatgaaaaaggagctgtaatacagccccttttttcaatcttcttatccaatcgctttatccgtttttttcaatcaaaatcgaatttggtgtaacgctcatacatagcgccataacggaatcttgccatttcattcttctgaaggacatcttcttcggaacctctgtactgacaacgcagacagtaatattccttcttatccttatcgtagaacatatccatatcgatatctctcatgaagcaagagggacatctgtagtttaatttgccttttccagcttgagccatgttgcaacgacctccttatccttgatcttggaattgtaacccagtgtaaacatcggggagaatgcgtatccttccttcacgtatccgacagcgccttctgcgttggtgctcatggatactgcggtctcgatctgagggatcaccgctcttacttcgtcagcgtctgccttctccatctcacggcacttgtactcgtaatccagagtctctacctcgtcacccttcttggtgcttaaggtgatacccagcatatcctcggaatactctgtggtaccgtagcaggctacgatatactcgttcagttctacttcagcgttcggatcactcatctccaggatcttacgctcgatcttgatcgcagagctgccttcctcgaaggaaacgatggtctgtaattttacagtcagatcatagaactcgatgtctacgggatccagtgtcaggattctggtgttgccttcctgagagaaatgagccttggtacggcacaggcacagatccacttcttcaccgttgtgttttaacttggcacttcttacggtaccttctcctgcatagtgcgtgaagtaacctgcacggtacttctcctggatcaggaaaggataggatgcatcggtcacatgcttggtaccgatacctaccggccactccagcttagcagcgtaaggacgcaggtcaacgatagcaccgccctgatccatatttacgcaggcacgcatgaaaggatcgcaataccagaacaactgcttatcggagccatacaggatatctctccatagagcacactcgggctcggtgtaggtcttcttctgacgataataatcagcgaactcagccatggtcatatcggtaagcttgccttcctttttcaggtcgccatagtacttcataccatcttcatagctcttcttcagcagttcgtaaggttgctcccaacggcccattttgttcagccagccgggtcctacgaacatcatgttgtatgcgtatccgttgttgtatttctccagggaacgatactggtcgatcaggttgtacaggtaagggtactcccatgtcttggtgtcatagatcataccacgcagtacgttctggggatgggttccgaaattggagccgttaccgtcatagcatgccagcaggtctctggacagatgggggatcgctacgataccgctgtcctctgcctcattggctgctggtgcatgggtgttctgcttggaagggatccagggtgcccagggaccgccatccatgaaggtataccaggagttgttgcaggtatggtatgccttggggccttcttcccaacaggttgctaccgcacattttacggtaggataggttgctttgatataattggtcaaatctgcatccatgtagtaagaaccggtggattcgggatagaatccgaacttctcatggaacttgccgaacacatcatccacgatagactttttgtcttccatggagaacatccagatacagaaatccttggtcttgtacttttcacggaactctgtgcagggcagtcccaacagagacagtgcgatctcatcaccgtacttctcgtgatctgccttagccagtgctaccgcttcgtcattgaacagggaagcataggtcatctgaatggtggtcttcaaaccattcttgtgcgcagtttcctgctgaaacttgaaaatatccagagactcggtgagcagtgcttttctgcccagatcctcttctttgccgtgtccggttactttttccgcatactcgggaaccatctccggacggtgaatgatattcacaataaacttatccatcttttcctccatctcgccgttaggcatcttatattacttttgaaagtctctgatcactttcaatgcgggtagtgcatttccatcataatcgaacagtgcctgattggcccattcgtttcccccgggaccgggatcctgaatatacttcagggactcctcgttggcccagccacagccgggcaccgggatccatgccggctcccagtaatagaagccttttcctctgccatccggaacctgcgcaatgcgttccatgaccttctgcatgaatgcagcctgtccttccggtgtcataggatactctactgcctccgcaaggtgaggcttggtcgccatgcccttgcgctctttcggtgcgagcttttctctgtccgcatagtcttccatagtaaatcccatggaaacctctgctacgatgacatccttctgatatctctgtgagagatcattcatattattggtcaggtcatcaatggttccgtgccagaagggataataggacaatccgatgacatcgaagtcctctcctctctgtacataggcatcaaaccattctctgcaacgggcattgttgccgccacagtccagatgaagcatcaccctgctgtccggggatacttctctcactgcacggatgcccgcgctgatgaatcttgcaatattgtcaacattgtcccattttccgtggggccacatcagaccattggtgatctcatttcccacctgcaccatctccggaagcagatcgagacgctttaatttcaaaagcacatcctttgtgtagtcatacacatgcttctccagtgcatccgcgtcggcatacgcccactccttgggagggaactgtttgccgggatctgcccagaaatcactgtaatgcagatccagcagatagctgtaacccagctttttgccggccgaagccagtgccaccagcttggtgaaatcactggtaccggcaccgtaaggctttccgtcttcgctgtaaggatcgttccagagacggatgcgcagagagttggcaccgtattttttcaggatctccagtgcatcgccctctttgccttcatcataaaaccttgcaccgagagccacctcttccggcaaagtagatacatccatacctttgataaattcttccataattcagttgtttactccatagtttacataacatcgttgcgaaagcatccactacgtggatgctttcaggttaaatgctcttgcatttaaccttttaccgcaccaccggtaataccttccacatagaacttctgcatgatgacaaacaatacagagatgggaatggacaccagtacaccacctgcgcagaactgaccaaagtaagtattgatcaggctcttatccagcatattgtacagaccaatagcaacagtccactgggaagatatgccggcatttaacatcagctttgcatatacgaaatccatccagggggacaggaaggagctgataacggtatatacaatgataggacggctcatggggataacaaccctccagaagatcgtagcctcactggctccatccagataagcggcctcgcgcagggaattcgggatcgtatcgaagaagccctttgcaatcaggtaacccagaccggaaccggcagaatataccaggatcagtccgaggtgcgtattggtcaggttcagagtcttcagaatgaaatatactgcgatcatggacaatacaccggggaacagattcacaataactgctgcgttcatcagcggcttacgtgccgggaaacgcatgcaggaggtcgcataggccaccatcagtacaaaagcggtggagaccacgcataccgcacatgcaatgatgaaggtgttcttgaaccagttcgggaactgtgccacactgtctgctgaaaaaagcagattcttatactgcgccagactccattccttcgggaaaaaggtgctggtattcatgccggtatatgcgctgaaggaagtgaccaccagccatacgataggcaccagccagacaaatgccaaaaacgccagtaacaggttatgcaataatgttttaacaaatctcttcattaacggaacgcctcctctctgtcacccttcaggaatctgctgaaggcaatgagggtaaataccgcacataggataaacacaataataccgatggtggatgccatcttgtagttgtaatagccctgtgtcagattgaacagccaggtgatcagcagatccacttccttcgcctgggagttcgccatagcctgattggtggtggtatataccccctgggtcaacagatagattacgttgaagttattaatattcttgacaaaatccgttaccagagaagggccggtgacgaacagcatatacggcatggtgatatgaataaagctctgcatcggagtagcgccgtcaatcttcgcactctccagctgatcagaaggaatattcatcagcacgccggtggcgatcagcatctgataaggaacaccgatccagatattgatcaggatgatcatgacgtgtgcccatccgggagcggacaggaacggaatataactggtactgatcgcgccgatatctctcagccactgagtaattcccgcattggcacagattgtgttcatgatgccgttgttcgcgaaaaagttacgtaccagaagaagggaaacaaactggggaactgcgatcgttacaatgaacagagttctccacagcttcggcagcttcgttctcttattattgatcagcaaggacaacaggataccgcccaggtaagtggtaaaggttgcgaacagtgcccataccagtgtccagatcaaaatcttacggaaggcataaccgaaggtaatggtcattccaccgttagagaacagattcttgaagttggtaaatcccacccaggtaaacaatgcggaaggaggcatatgtccctgatcatagttcgtaaatgcgacagcgatcaggatcaacagaggaatgatcgtaaaaataacgactcccatgacgggaagtgtcagcagtgtgatatagaatttgtcattcttgaactgctgcagatcctctacaaacgtattgatatgttctcctgcctgtgcttttttctgaagccggtaaacagtcacttcattcttaagccagatcaccaggaacgtgaaccagatgacaaatgagactacggagaacaacaggatcataaacgagttgtcataatcgttgaactcattctgcatcgttgcgatattgaaaaccgtctcctgctgaaccgttcccaaagttccaaaatcacgtacatactctgtggcaaagccaaaggtgaatacaatgactgccacttcgagcagagtcattaaaatacctttgataatttgttttctgcggatatatcctgctcccatccagaccagggataattttacgaacagatctccttttacgactgcttcaccgaactccttgaagaatccgccgattccgctctttttcttcttcattctctgccctctcctttcttcatattaatataaaaattttagtaactgttccgaacatcttcccgcgttcatctgaccagttacataatccggcaggcaggagtcgaacccgcttaccggaaacgtttcctgtaaaaaaggcatccatccactacgtattgttgttcatagcttcaggacgcctttctattctctgtattcgttctgcaccagaacgctttcatcattcatttatagcagaaccggaacagatcatcttcccaaacttattcagcgggtacggaaacaccttctaccagttcatccagtgctgcctggataccagcttcatcatcagccttcagctgaccctgagctaccttctcaccaaaagtcttggaaggatcccagtacttgccgccaacgatctgaactacaccataagcggactgctcagacagagctgcaatagcggtattggaagaaacctcctcggaaccagctacgttgatattggaaggtccgatctctctctctgcgaaacgtactgcctggttgtcttcgttggtgatccagtcagccagcagagttgcccagcctgcatttgcagaatacttgttaacgcctaccaacttgaagcctgctacggaaccctgctggatctgcttgtcaccacaggtgtaggtaggaagcttggtagctgcgtaaccatcaccgaaagcggtctgagctgcggctgcatcccaggtaccggaaattactgcacacaggtcgccggaagcgatctggttggaaatatcaccatcagcgatcggaaggaatgcgctgttgccggcaatacccagcatagactgtactacctgtacaccggtaacgccgtcagcgctggtgccgttccagtccatagcagtgctgccgtcatcattcagtgcggtagtgaagcctgcaccatagaagaaggaagcgttataccaaccggaagcaagagtcataccaaccttcttgccagccttctcagctgctgcaagtaaggtatcccaggtctgtgcatcttcgggagttactaactcggaattgtaatataagaagtaaccgttatcagcactcatagggaatgcatacagtgtgccgtccttggttgctgcttctacagaaccggaagcatttgcgctcttaacatcagctacgctcttgcctgcgtaagtttccagagctgcatccatctcatcaacagactgcagggcacctgcatttaccaggtcaaacagctgatcagatgcgaaagaatacacatcagcagcagcctcgatgtcggctaaaacagtatccttagctgtggactcggactcggtaccaagctggatatcgaagtttgcataatctgcgtaatgctccttgaaggaatcgatcatgccctgtaacatggtctgatcttcctcagcaccccagattctcagggaaacgtcctgcttctcagcgggagcggtctgtgtagcctcggtagaagctacggtggtagcagcggcatcagtgctggtgttggtgttggaagcatcagagtttccacaagctaccagagagaatgccatagtcagtgacattgctaaagcgactaactttttcattttgttatcctcctgttttgttttgcaagtttgtgcgtattgcgcaaccgcttgtctacgataatagtgtagcaacatttccttatgttgtcaatttataataatgactgatattgtaggcgaaaattgtgcattttgcacaaccaccttttgaaagccttgattttactgggtttttagcacatcctattttttgaaaaaaatgctttttttatgatttttttgagtaaaatataggaaaacgtttttccaaattatgattttcacactccaactcacccttttgtagactccttcaggatgatctcatagtccaaaagtgttttgtccggtactgtcttgccatggatcatatccaacagcacctggcaggatcttctgcccagttctgtgatattgaacttcagtgaggttatggtaatcggataattctccagaatacggctgtaatggcaggacgccaccttcatctgatccgggattctcacgcccatgcgggcaagctttctgaccacttcatcacagatgtagtcatcctggcacagaatgcactccacaccgctttttttcagctcttccaccgctttttccaccatagccctgctgcttagatccgtgtagaccaggtcctggttcagcttccgttttcccttgcggtaggcttcctcatatccctgatacctgcagcggtttaccatctggtccatattgcttcccagataggcaatgttctggatccccttagcaaacagaaccgtcaccagttccttacaggctcccacattatcatggtctacctgtaccacatcatcatccgggaattttccaactgccacgaagggaatctgcttttgtttcagaaatttcacatatttgtcgttctcataagtcctggtaaggatcattccgtccactttacggtttttgatcaatctctccagtggtttggtatcgtttccgttcgtggttaccacaataatgtcataatcattagcctgtgccacctcttccactccatacatacaagtgtggaagaaaggcatatccaccagagtattcacttccggaaggatgatcgcgatattattggtccgggactgtgccaggctctgtgccgccgcatttggataaaagccgtgttcttcgatataagcaaggatccggtccctcgtagccgcgccgatgcgccctttccctgaaatcgccctggatacggtgctggcagacacccccagttctcttgccacatcatggatcgtcatagtcttgtcgttgccggaattgttgttcatctcattcaccccattctctgcgcaatccgtctgttttatgtcttccagagtctgtttttcatgcgcaaacgattgttcataatcatagtagcattttactactatgctttcaatgcgcctttttacacaaattggccatccatttctatacaatagtaacaaaacagggggattcttgatgttatttcatctgttttccttccttccggttccggaactgtttccaatgcgcaaccaataccgttcattctgttgttcctgtctgcggcaggctgtctgccacacacagcctgccataccccacccggtcgttgggatattccctctctccccttaagggtctggcaccttttctgagatatgccttgattttttcgccgtagaggaaggggtcatttccctgcacgatcccccattccatcagaagcgccgcggcaccgctgacaatcggtgtggcgaaagaagttcccgtaacagggagaaaaccgccataaacatccggagcctggatatttacaccgggagccacaagatccggcttggtcagtcctgctgccgtcacaccgatggtacgggtgctgtcggcataacccctgccggagaaatccgcataggtatcatagaccggatcgtaagcccccactgtgatcaccttcgctgccgtggagggaaccgtcagtgtcatctgcggagtggaacggtaaaagccagtgctgtctcccctgccgttccccgccggaagatacagataatattgtcccgttacggtcattaccggctccagccggatcgtccatatccctgcgtcgatataaccgcctgtcaccgggatcatctccagatagatctcctgcgccaccgcatagggcaggggttctcccagatagaccagaatccttgtctgctccaacctaagcgtatatttcccgccctgaatattcgtggttagctctgcctcctcacctcccggagattgcagccttatctgaaacacatcgctgtaatttttccacagctggatattcaggcttttttcataatttccaacagccagttccacgcggctgtctctcgttatattcccggcgaaatgccctcttgccgcaccctcattaccactgcccacacagatcacggttttgccgatctcggaagcattgtccagaaaacgctccagcagagagcttccgtcatgggaaccatagctgttaccaaagcttagattgatgacaagtggcatattcaactgtccggctttccgcagtgcataggtcactccacgcaggatttcggttgtacgggggaatccttcttctgcgcccccgctatttcccggcaatcccagcttcaccacgatcagttccgcctcgggggccgccccggtatagagaccacctgcacttttcccggcggcgatccctgccaccgcggttccatgtccggacaggtctctgctgggaatccggcggtaacgatccaatgcaggcatctgtaatgccgcatttatttcctccgcggtatattccgtcccaaaggcaaatccatccggcatttttccatatcccacattacctgttttctccggcactgtccgatcctgtggcagcgtccgatccctgaggactgtctggtcccatagataccgtatcctcgtactgccatctgccttccggaacacctcctgatcccaggtgatcccggaatccagtacagccaaaagaacgccccttccattcagaaaaggcgttctcatagtgaccggtggaaaacaggatgtccccgcaggaaacgtctgtccataataaaaccgcttgggtttttccacatactcgatctccggggtatccgataccgtatccaccagtgcctccggcaccgtaaggatcgcatatccggcgatcagttcctccaccacaatattctgttcccgcagtctgtccagactgccgtgatattttacgatcagctcccagctgcggatctccgcgctgtaaccgacattcagactctctgtctgttctcgttcttcctccggggtctctaaagcaaggttcaggatgttttccagcttctggtccatcagaatttccgtccttggtcctgtatttcctacatcgtatgcaggcgatacaaaactattcacgaaagtccggagtaatcttccactcttctacgattccttcgggatctgtccgtccacatgcaggatatgtttgatcagccagtccgtcaggtaattcagaatatccatgatctgttcatcctgttgggcctgatctccttcatccttctcatgctgatctataaattcatccagtttcttgataaattcctgatgctggatcttctgggtaaaaatctttttgtactggatggattccatatacgcttcttcatctgtaaaatgttttacggtataatcacgcagtttttccagaattgcatcgatcttgtcatacttgtccggtgtaaactcctcctgcagcagctcgtaagcctcattggcatagtcaaacagctgcttatgctcctgatcgatcatatcaattccaatatagtattccggtttcatttcaaacataacttcaaccttctttcgtatttttttcggatcctttttggatcatttcttgattctttctttgaatctttttttcattctaactatgcacttttcgtccaaagctttcaatgctttttatacttttttaatgattttccgggataattcatcattcgccccagaattccttcagcgcccgcactgaatattctgtatccatcatacccgcagtctccaccgctgaatgcatggccagctggggcagtccgatgtccacactggacaccgatacatgagccgtggaaatattaccgagggtggatcctcctgcgatatccgaacggttggcataggtctggtaaggcacctttgcccgttcacagtaatccttcatttttgcagctgagataccatctgtagtatatttctggcttccgtggaatttgatgacgattccaccgtttaagtaaggtctgttcgtgggatccgccttctccggatggttgggatgtaccgcatgggcattgtccgcagagatcaggaagctatccgcgatccagcgcagatacgtgctatgatctgccaaaagtccctccgtaattctgtctaacacatccgcaaggaacgtggaatctgcaccctgtctggtgccacttcccacctcttcattatcaaataccgcgcagatattgatatattccgtaggtgtactctccgtaaaagctttggtcagcgcaaaggcgctctgcagatcatccagtctcggagccagaacaaattcaccctctgctcctaagaatcttccttcctgtctggtatacaggaacaggtcttccccgagaatcgcttccgcatccacgcctgctgcctctgctgccagtccaagcagcgcaggcttctcctgcggtccatctgcggtctcagctgttcctgcggcatcggtatcaaatgccacatccgcaaacagtgggagcatatctacctgcggattgtactccacacctttgttcatctcccggttcatatggatcgccacatttgggatcacgcagagatcccggtcaatattgaccagtctgctctggatgccatccgttccgcgcaccgccagtctgcctgctacggagagcggtctgtccatccaggtggaaaggatcatgccgccgtatttctcggtattcaggcgcatatagtgatcttctaccgtaagttccggtttttccttcaccttaaagcatggggaatcgctatgtgctgctgccatatggaaccctttcacagtttccgtaggaatagcaaaagcgatcacggaagaatcattgcgctccgtgtaatattttccacccttcacaagcttccattcctcgttttcccgcagtctgacatatcctgcctcttccagcattgctccgatattcgcaaccgcatgaaaacaggtggggcttttctctataaaatccagcatttctttcgctgtcttctgaaaatcatccatgttaatcgtccagtccttccgctgcccactaccggcagacacctttccctagcgttccgcgcgcatgggattattgaggaaatcctcataggtcaggcggataccgtcttccagctccgtcgtgtaatgatagccgagactctccagcttgctgacatctaaaagttttctgggggttccgtccggcttgctgggatcccatttgatctctccggtatagcctacgacctttgccaccagctctgtcagctcccggatggtcagttccttgccagttcccagattcacggtctcattgccgctgtaagtattcatcagataaacgcaggcatccgccagatcatccacatagaggaactcacgcaggggagttccggtaccccagcagaccacttccttcgcgccggacaccttcgcctcatggaaacggcggatcaatgccgggagcacatggctgtgagtcggatgatagttgtcgttgggtccgtacaggttcgtcggcataacactgatatagtcggttccgtactgtctgttcagaaactcacagtacttcagaccggatatcttcgccagtgcataagcctcgttggtcttctccagttcagaagtcagcaggcagctctccttcatgggctgcggtgccatacggggatagatgcagctgctgcccagaaacatcagcttcttgcagctgctctgccatgcggcatggatcacattcatctccaggatcatgttttcatacatgaaatccgccagtgcttcgctgttcgccatgatgccgcctaccttcgctgctgccaggaatacataatccggcttttcctttgcgaaaaattcctctactgcatcctgtctgcacagatccagctccttatgggtgcgggtgatgatgttcgtatatccgtttctctccagtgctctgcagatggcacttcccaccattcctctgtgtcctgctacgtatatttttgcgtctttttccatgatgttgctctgcttcctctctgatctatcctattatttctcagtctcctgcagcatgattgcttccgccttagccagcttcagatcgtgttctgccatcagacggcacagttcctcatagcttgtcttctggggattccatcccagcaccgtacgtgccttctgcggatctccccacagatctaccacatcagtaggacggtaaaaggcttcacttacctccacgaccaccttgccattggctttgttgatccctttttcatgaatgccgcttccctgccattccagttcgatcccggcataatggaatgccaacgtggtaaactctctcaccgtatgctgtacaccggttgcgataacgaaatcctccggcttgtcatgctgtagcatcagccacatgcactccacataatccttcgcatagccccagtccctcttagaatccagattacccaggtagagcttgtcctgaataccacagacgatccttccggctgccagtgtgatcttacgggtcacaaagttctctccgcggcgctcagattcatggttaaacaggataccattcactgcaaacatattgtatgcatcccggtattccttcacgatccagaagccgtactgttttgccaccgcataggggctgtagggatggaacggtgtattctcgttctgcggcacttcttccactcttccgtacagttcggaagtagatgcctgatagatgcggcaggtctcggtcagtcctacgatacgtaccgcctctaagatacgcagcacgcccagcgcatccacatcacccgcatattccggtgcttcgaagctcacctgcacatggctctgtgctcccaaattatagatctcatccggacgcacttctccgatgatccgcaccaggctggaggaatccgacagatcccctccgtgaagaacaattttattctcccggatcagatgatcgatacgtcctgtgttgctgatggaggatctgcggatcagtccgtgcacctcatagcctttttccaaaaggaactctgccagataggatccatcctgtccggtaattcctgtaattaacgcttttttcattctctgtcctcgtctttctcacgcctgcttacggctgatatacaatgccgtgtgcgcaggcatctgccttattctgtccgcagaacacgcctgcgatcgccagtccgaaaggaatggaggttcccatacctctggaagtgatcacattaccatctacttcgaccggtcccgcagtcactgccgcgccttccagatggtcttcaaagcagggataggagcaggctctttttccctgtaagatgcctctgtgcccgaatatgctcggtgccgcacagattgccgcgatgtattttcctgctgcgtaaaaagcatcgacctgctgcatcaggggctcacaggcctccagattcttcgtaccctgtccgccaccgggaagcaccagacaatcatattcctcaaaatccacctgcgacagtgtcatatccgctgtcaccgggatcttatgtgatcccatcacttgtttttcttccgtaatggacaccatatcaatggtcaggccgcatctgcggcaaatatccaccacagtcagaccttctatttcttcaaacccatttgccagaaaaattgctatcttactcatggttttccctcactttccgtttcgtttcctgcctcatctgtaagtcatacactctgactttgcacagttatgattagtatacacaatttggaggcgtaattcaattcccatgggcagatatttgtagatttcactgtattttcaagggaaatcatgttatactaaagaagtatttttaagtcttaattacagaagcgaggcattaatactatggaaatcgagcgaaagtttaccctgaaatccttacctgataatctggaaagctatccttctcatcatatcgagcaggtatatctgaattataatcctgtggtcagagccagaaaacaggatgatgagtattatcttacctacaaaggcagcggcatgatggccagagatgagagcaatcttccgctgaacgaagtatcttattatcatttacgggaaaaagctgacggcagcgtgatctccaagagacgctatctgattcctctgcagcatcccggattcaaagaaggctttcccactcctcccgcagattattccctgaccatcgagctggatgtttttgacgcccccttcgcccctctgatcatggcagaagtagagttcggaagtaaagaagcagcagaggcatttgtccctcccgcatggtttgacaaagatgtgacttactgtaaggaataccacaattcctatctggcgctggagctgcatcacgcgccggagaattcctgaaatgtaaatataacgacttgcgccacaaagcgcacgttaaaatgcacgataattcccattgggaatcccgtgcattttatttttctgtctataccaccgtaaaacaacgaatgctttcctttaactgccctaccgaggcggccagttcctccactgcataagagatatctttcatctcctgctgcagtccctggttgtttttctctaccgcagacagcttttccgtactgtctcccacagttgcttccatctgtgtattggcagtattgacattctgcagtaccgacagcagttcgtcgatcttctgtccgaattcgttcatcatttcatccacatgatctgccgcttcatgatagttgctgccggtatcctccagtgcatcataatctttcataactctggtattcataaattccagcagtctggtggcgttctcggatagttcctccacgctctctactacacgattgctgatttcctggatattgttggcagattctctggagctgtcggccagtttgcggatttcctctgccacgacagcgaatccacggccagcttctcctgcccttgctgcctcaatggacgcattcagtgccaacagattcgtggttccggcaattcccagaatctcttccgtcagttctgtgatcttgtggatctgcctgctgttggcgatggattctgtcatagccgtgtcaatctccttcatgacaagggttgcctcctgcttgctctccaccgctgtcgctttcattttaccggctttttccttgatatccgctgcatagtctcttccgttctgggctacttccagcatattttccaccgtgtgatccaatacaccggtatcctgctgtactccgtcaattgcccctgtcaccagctgcattccctcggacattatgcccagattctgcatggtatgatccgcagtggcatttactttttccacattggagataatgtcagcctgcttttcttccatctgtccacagccctcggtgatggctctgatgatgatctgcatctgagctaccagatcattgatggcaatggccagtcttcccacttcatctctcgatcccacatgaattcttttggtaatatctcctttgttgcaacgaatcccttctaccagttcatctacctgtttcgttgcctttttcaccgggccgatgacccacagccgcagtcccagcatgatcacgatcactaccacaagtaatgcaatacttgccacggagatgatccccggcactctggcagcactctgctccatttgtccctgggcctgttccatttcctgcgctgtgatctccagcatccggttcatgtaattctcgatatgttcattaaacatcggaaggttggatgtggcagatacatatgcctgggttttgttctcggcactggtgaccagcagactctccaccgtctttctgtattttgccagttctgcagaagtactgtccagtgcttctttacgctcatctccctcggaaagcagggcgccgaattcctctatctgctgttccatatctgcaatatcctgcaaaattttctcagacagagtatccatggtcacactgttggtagtcatgacatgggtgagcacctgactgttgatataagtgaactgtctggaaagtccgcttatcttttcctgctctgcaacctgttcggatacgatctgatcactcgtcccgatcacactctgcagcgtccataccagcactccgacacagctgatcgccgtaattgccagaagcagcaacagcaccatgatcttaatgccgatgccgactcctctttttcgctttcctgtattatcttttttccgttgtctttttcccttatccatacccttctcctgtacgcaacgaataaataccatcaaaagggcctacggcacaaaagcgccgggccctttttgattagatatgtagaaattaattcttggcaattaattttccaccacgtttggatacaacatcgaagataactgctgccagaagtaccagacccttgactaccttctgcatattctgatcgacacccatcagggacatacccaggttgataacacccatcagtaccgcacctacgataacaccggggacagttccggttcctccgtatgcggaagcaccaccgatgaagcaggagccgatggcatccatctcgtagttctgcccataagtcggctgtgcggatgtcatacgggcgatggttaccatacctgccagtgctgccaggaagcccatgttcatataagctaagaagtacaccttgttggtattgataccggataacttggttgccttttcattgccgcccactgcgtagaagtaacggcctacagtagtattggaagtaatgtaaccgtataccatgatgacgatcagtacccagatcagcacgctggggatacctttgtgctgtgccaggcgatagctgaatgccaagataactactgcgatcacaacgatcttgccgatcgtagcgccaagactgggagcttcgtatcctttcttcaccttatctgctctgttctttaactgcagtaccgcaaagatcactgctgcaatgatacctgcaaacacacaggtcagattgatcggtccgtttccgaagaaatcagggatataacagtcagcaccgccgccgaacagattaacgaatgttgtgcaatccttaatggatacggtcataccctgtaatactacgttgctcagtcctctgaatgccagcatacctgccagtgttacgatgaaaggagggattctcacataagcgatccagaagccctggaaagcaccgatcagggtaccgatcacgaacatgatcaggattgccagccacatgttcatcttcatgttcaccatgaggactgcaccgatggctccgacaaaacatactaccgatccgacggacagatcaatgttaccgccggtcaggatacacaataacataccggttgccagaatgaatacatatgcattctgggagatcaagctgctgacgttcatgggaagcaggatcgctcctcccgttctccatgcgaaaaatgccgtaaccacgatgagtacgaggatcatggtatatcttttaatgaaatcgaggccttttgttttattcatgccaatgctcctttcttaccggctgataatatcttggacatgataagctcctgtgttgcctcactgcccgccagttctcctactatttttccttcgttcatgacatagatccggtcgcacatacccagtatctcaggcagttcggaggagatcatgataacagattttccttctgccaccagttgattgatgatgcagtaaatctcatattttgcaccgacatcaatacctctggtcggctcatccaggatcaagatatccggatccgcgaacatccattttgccaaaagtactttctgctggttaccaccgcttagattacccacattctgttctaccgtaggacattttgtattcagttttttcttgtaatccacagctacattgtactctttgtctttatcaatgactgtatggttgctgacagcatccagatttgccagagtcgtgttgatcttgatcggattgcttaagatcagtccgtttccttttctgtcttccgttacatatgccagacggttcttgatcgcttcctgtacgctgttcaggtttactatttgaccgttaatatacagttctccgctgatattggagccatagctttttccgaacaggctcattgccagttccgtacgacccgcacccatcagtccggagattcccactacttcgccttttctgacattcaggttaacgttatccactaccttacggtcggaatacaacggatgatgtaccgtccagtcttttacctccatccggatctctccgatgtgcggctctctcttcgggaaacggtcggcaatttctcttcctaccattcctttgatgatccggctctcggtaatatcatcttttcctttcaccagagtttcaatggtagatccgtcacggatcactgtgatcttatctgccacataggaaatttcatttaatttatgagaaataatgatagatgtcattccttttttcttgagttccaacatcagatccagtagtgccttggaatctgtctcattcagagaagcggtaggctcatccaggatcaacagctttgcatttttcgccagtgcttttgcaatttccaccagttgctgcttacctacaccaatatcctttatcaatgtctgggggccttccttcagacctacggtctttaacagttccgacgccctggcattggtttcattccagttgattttgtacttatgtccccgttcattgcctaggaacatattttccccgattgtcatataagggatcagtgcaagctcctgatgaatgatgacgatacctttttcctcactgtccttaatcttatcaaacttacagacctcaccgtcatagatgatatctccttcataagaaccgtacggataaataccgctcagtacattcatcaatgtggactttcctgcgccgttttcacctacaagggcatggatctctccctcttctacctgcaggtttacattgtcaagtgcttttacaccggggaatgttttggttatatttttcatttccaataagatttttgccaatggtatccctcccaagtcttatttccacattatctaatcaaacaattgcttttggtatttccatgaatacggcaggcgggatacgcccgcctgccgtgaggatcttttcagatccggtaaatctttataaattactgtaaatctgcttctgtatagtaaccggaatcgatgagcagttctttgtagttgcttgcatcagcgaatacgggctcacacagataggaaggaataacgccggtaccattgtcgtaagttgtggtatcgttgacaggtgcctcgccgcccttcatgacagcatctaccatctctacaaccttggatgccagagtacgggtatccttgaagatggacatggactgcttaccggagatcatgttctttacgttgggcttatcacaatcctgaccggtaatgataggccattcgccggtgtagtttgcttccagggaattggtaacacccagtgcagtagagtcgttggagcacagaacagcatccagctttgttccgtctgcatagttagcggaaatgatagcatccattctggactgtgcggtctcggtagaccagttagcggttgcaacagtttcgaaatcggtctgtccggattttactaccagcttgcctgcatcgatgtagggctgcagcacatccatagcaccaccgaagaagaatcttgcgttgttgtcaccaggatcaccggttaccagctcgatgttgaaaggtcctgctgcgttgtccagatccagctggtctctgatgtattcgccctgcttggtacctaccatgtagttatcaaaggttgcataataggtaactgcatcggagttcatgatcagacggtcataagcgataacaggaatgtctttttcctttgcctgctccagaacagttcccagggaatcaccatcgatagatgcgataactaacatctggcatccggagttgatcatgttctcgatctgggatacctgcgtaggaatgtcgttggatgcatactgcagatccacttcatagcctgcttccttcagctgggcttccatgttggtaccatcctggttccatctctgcagatccttggtaggcattgctacaccgatcttaccgccttctgttgtcgtggtgctggcagtgtcggtgccggcagtgtcatctgttttcgcttctgcagatgtttctgttttgttttctgttgccggtgtggatgcctgctgtcccccattggatccacatcctgcaagcatcgtaacagccatagccgttaccagaagtgagcttaataatttcttcctcataaaaagtaacctcccttatttggtttgtttttgttgctaaatagagaatatcataaatcctatagcatgattttacgaccttctgtacttttccgtcctattcagaggacaaaaataagctgtgctagcaatatcttgtctgccggcacagctttgtcaccaaatttttcctattgtgtttttagaatctatctcttttccccattttcaaagtaaatccaatattatttgggcatttccgagggaatgttcagataaacatcctcttttaagtgaaatccgcttccgatgatcacatcattcatattgtttttatccacactgattggttccagaccaatgtacggaacttcatactttccattctctatggttaccgtatctccttccggcaacggctctccctttgccagaagcaccgcacactccgctgccttctgcgacattttttccaccggtttgtagactgtcatgacctgtgtcccctcgacgatgcgctggcacgcttccaggtcggcatcctgccccactaccataatatctcctgccagtctcttttctttcagagcatgtaccactttgcttgccagatcatcattgccgcacataatggcatctgcctccgatacaacatccatatgctcatagatatatgccccggcaagttccgctttccagccatctgcatgcatagaatccaagatcgtcacctgattatcctccatgaccttgcgaaagcccttttccaccatggcaacgttgctgtccacggcagagcctcccagcatcagcacatttccgccggccagaccgttttccaacagtgcctctcccatcatggtgcctactctttcgttgtcaaacgagatatacaggtcaatatctgtattctgcagcagtctgtcataagcaatgatcttaatgccggcatctttcgccctctgcacttcctctgttaatcctttggagtcaatgcatatcacaacgatcacatccattcctttgtcgatgaagtaattgatctgctttttctgctgctccagatcaccgttcgcattctggacattcacttccgctcccagttcctttgccgttgaaacgaaaatgtcacgatccctctgccatctttcaatgacaaaagaatcaaaactcatgccgatctgaatcttatcattttccgcgacctctccctgattttttccggtctccagatttccgcaggcacacagcaataacatcatcaccagaagccacgcaacacatatccatctctttttcttatacattgccctgttcctgtccctttccacggttttccttgtactctgtcggtgtcacgcccacgttcttcttaaaactgcggctaaaataattcggatccgaatatccggttctggcacagatttctttcatggagcactctgtcgtctgcagcagttcttttgccttgtccatccttaaattggtcaggtactcgataaagttttccccggtagtttctttgaatagtttactgaaataatacgggctgatatttacctctctggatacatcatccagggaaatgtctttgtgatagttattcttaatataatttttcgccgtctcgataatgctgcccgacttttcttcccttttattcagaacgttccggcaggcttccttcactttttccaggaaccatgttttcatggccgccggttccgctatttccatcacctgcggcagatactccgcacgggaattcagctgatagatcataccacctttttcataggcaatgtgctctgaccacagggcaaattccagcaccttaagcctcatattcatcagatcggaaccactatccaccatccagtcaaaaaatgccgatgccgatgcggaagcattgtcaatgtcgccatcctcgacttccgcaaaaagttttttctccaacttcaccggataatttccaccatattcgcatttgatcggcaggtcatccacatgtgccacactgccggtggtcgccaccagtgcattcagcgcctccgtataagattccgaagccatcagaaaatctttcggttctccgatgccgatgcggaagctgatatccgttctcttgcgcagatatctggtgagttctctggctttttcaatgagttcgatacgctcattatagtccatcacatctttctcataaggtaccagcactgccagtttgtttgccatgacggtacccacaatacagtcaaaattttctttcagacagtccctgacctcctgataatgcctctgcattctgacactgcttcccaccgcattcgtcatgtggtttccctgctgctcatccccgcataccacagcgatcatgtaggcatattgcagcgtgatccctaaaattgaccggtaattctcaatatcctcgcgaaaatgctcctgtaataagatattgtggatcagaccgctttcaataatcggtacgaccgtctccagtttttccttgatcaacaactcatttttgcgtttcaggcgctctgcatcgattcgctccattgccttctgcaatgctgcaatgatccgggtcttctccatcggcttggtaatgtactccatgactcccagtttgatagcttctttcgcataatcaaatttgtcataagctgacattacgataaacactgtatgattattgcttctccggatctctttcatagcatcgatgccgttgattcccggcatctggatatccatgaccgcaacgtccggacggaagctctctgccagttcaatcacacttctgccggtcttggcatactgcacctcacaggtatccttgaattctttttcgatgatgaatttcagggaatcgatcacgattccttcgtcatccgccagcatgatcttatacatccgtcttttccctctcttttatcggaagatacaggattacttccgttccttgatctttcccgtcacttaaaatcgtcattacatcttcgttttgcgtgaaaagttttaatcttgcgataacgttccccatcgcaataccattggaaccgccgcctgactgctcttcgtgataattgccgccaagtactttttctatcgtatccggatccattccgatgccgttatcccggatactgatccccagcgtatctccatccacatggtataccttcagccggatctttccctctccgttcatctctctgatgccgtgatttacggaattttccacgatcggctgtaagatcatgcttggcatgcagctgtccagcagatcctcctcaatttctttcccataatggatatccccggaaaagcggacattcagaatataaatgtaatgatccaccagttccagctcttctctgaccgtcacgatatcattactcttttttacattatagcggaaaaattccgccacattctgtacatattcataggtacggtcggcgccttccatcatggccagctgtgctcccgcatttaacgtattgaataagaagtggggattgatctgcgcctgcagatactttagctgtgcatcctttaagtgtgcttccatcaaaagctctttttccattaatgaacgccggatttccatgctctcgcgcaggctttccagatactgtctgatactgataagcatctggttaaatgctcccgttaccacgccgatctcatcctccgactgtacttgtaacagttcggtatcaaagtttccgcccgctacttcgtcagcggttaccgccagatcctttaacggactgatgatctccccggtaagctttactactatagatacgctgaccacaatgacgatggataatgcaatcacactgaccatttcgaaattacggaaagcagccgacagacggctgtagttctcggagttgctgcggaactgttcgttgttcagactgtaaatataggtattgatatattcatacatctgtgtcgcgttctcgtaccggacgcggtatttctctacatttctcccacgctttgcctcaatcgtctgacttacgaggtccaggtattcttccgacatatgccggatactgcgttccattctctgaaaggtggctcccgtcacctcatcgctcatatcctgcaccagttgggaatatgtctgttcattccggtaaaattcctccagggaatcactggtcttggaattcagataatccgtcatactgtcctgcaccgccatcagtgcatcagatacttcgttcagccgcagattcccctgatagaccttatcgatctccgaagacatgctgttgattcccagaagcaatatcaccgtcactgcaaatactaccagattcgccaatacaaaaatgctgctcatcttcgcctgaagagacagctgtcgaaattttttcctcatgcgtacctcactctgtcgcttcctgcgcttgtaaatattcacccacgttattctgatcaataattgtgacatccgccgtaaaatactggctggtatagccaaaacgatagtactcctgcaaagcatccacgcagaaagctcccatctgctccgtgtctatcgagatcgttgcattgactacatttcgctcgattgctttgagtatcgtatcggtatcataataccctaaaattgcgacctcgcccacgcagttgtaatctaccactgcctggtagacacaggtagtgctcagttcgttcaggcagataatgatatccggcagtttttcattcataaaaatatcccggatggattcctccacggaaaaagtattcgtatcgtccacggtaattaaggaaagttctatctccggtccccggattttctcctgttccagtgcgtcctgaattccggagcagacaatattttgtgccgagttcagtgcatgggcattcaccagtaccgctaccgtcatgggcgtggtactctcactgacggaaaccagtttcagtacctgacgtccgtattctctgcccagattataacttcccacaccgacaaagctgcagcgcgcactgtgagtgttatccccatacagtgtcaccaccggtatgccccgttctaccgcttcatcgatcatctgtgacatctcgtcactttcatccgattccacaaaaataccgtccacaccggatgacatcgcgatccgcataaggtctgccctggaatactcctgggacagatgatctcccagcagatccacgtacacattctcttcctgcccgcgctcataggcgccgcggtacaccgactgccagaaatccgatttgcggtcttctgtgatcatcacataataccggtcatatttttctctgtctgttactttatgaaatccccgcacataggaacgaaagattactgtgcatatcgaaatgactatgatagcaaaagccataaacccaatgacgatccattgtcctttattacggcctgctctgtcagtagtacggctcatgtttctcctctctctcgcagaaatccgattgcagactccgcccaatatagataaccataccataataacgtgcctttttccataagaccacaaaaaagtcctcttgttttgacaaaaatgcactaaaaaatgctacctgccatagctatccccatttccacgcatgcaaatattgatgatttgtccacaaaaaatacggaaaggaaactatcccttccgtattcttacaatgtgccttacgctgcgtggcacactttacagtcttccgtataattttgccatcttataaatctttttcgccagcttcggatccaacgcatccttgtccatgcgccatttccagttgcatcccaacgtggagggaatattgatcctggcactgctgtccagctccagataatcctgcatgggaatgatggcggtatccgcgcagctggacaatgccgcccgaacgatctcaaagcagagctttttatcattcttatgtcccagatacttcttcgcgaacttcttatccttctccggcatgttctgtataaatcctaccgtagtatcgttgtcatgggttcctgtatagaccacacagtttttatcatagttgtgaggcagatattcactgtcatttcccgcatcaaaagcaaactgcaggatcttcattcccgggtaacctgtcttcttcaccagacggatcacgctgggggtcaggaatccgagatcctccgcgatgaccttctttttgcccagtttcttcttcatcacagcaaacaattcatagcccggtcccttctcccagtgaccgttctgtgccgtaggatctccgtaaggcacgaaccagtactcgtcgaatccccggaaatggtcgatacggagcacatcgtataactgatagcaatatgcaatacgctgcatccaccattcataaccggtcttcttatgatatttccaatcatagagcggattgccccacaactgtccggtctccgagaagcagtccggcgggcagcctgccacaccgatgggacgaccttccctgtctaactggaacagcttcggattcgcccaggtatcggcactgtcaaaagctacatagataggaatatctcctacgatctctatgccctttttattcgcataagtcttcagttctttccactgttttgcaaacaggtactgttggaagcagtaaaatgcgatctcatccgagagctttttgcggtacttgcgaagcgctgccgcttttctgaaacggatatcctcgtcccattccataaagcagacgccgccgaatgcattttttactgccatatacagggcataatcatccagccaataggcattgtccgtgatgaacttctgatattccggtgcatccataagtccctgttttttcgcattctcaaatgcgatcttcaggactttgaaccgggacagatagatcttctcatagtccacgtaatgttcattatctccgaagtcataaccgtcacagatctccttcgtcaaaagcccttcttcgatcagaagctccagatcgatatagtaagggttccccgcaaaagtggaaaacgactgataaggagagtctccgtatccggtaggtccgagcggcaggatctgccacaacctgttgccggacttctccagaaagtccacaaaacgatagctttccctgccaaaggttccgatcccatatgcggaagggatactggataccggcagtaaaattccctgttttcttacgttttctttcattgcttttgtattcctttgatttgattaaaaaaataactatccagtactttgccgtcgctctgaatagttactaaaaaatggaagcaagggggctcgaacccctgacctttcgcgtgtgaggcgaacgctcatcccggctgagctatgcttccgggtactgcagcaatcttctgccatctttattatagcaccggcattcggaattgcaagtactaacaaatgcggttagtgggatttgaacccacacgggtaaccactggcacctaaaaccagcgcgtctgccaattccgccataaccgcttacgtgtccacaaaagaacacgcctaattatactctgccacccttaaacttgtcaagcatcctgcacgactggctctccgatatgacagatgactttccggtagattcttaccaagaaatacgatgttaacagcacactggctaactccgcaatgggaaatgcccaccagatcaacgtcacttcgccactcagggacaacagttttgccaccgggagcagcacacacatctgtctggccacagatacgatcatactgtagacaccgttccccaatgcctggaatacacttcccgccacaatacagaacccggcgaacacaaagctcagcgaaatggtctccagggcaggcgctccgatggcgatcagactctcctccgcatcaaacatgcgcataagctgtgccgggaaaatatgcatcgcaagtaatcccacgaacataatacccacgccatatgccacactatgcttgatcgtcttaattacacggtctttatgaccggcaccgtaattataggcaatgataggcaccattccgttattcaggccaaataccggcataaatacaaaactctgaagtttaaaataaataccaaataccgtctgcgcggaaccgaatgccgccaggatgagattcataccgtaagtcatcagagaaccgatggcctgtacaactatggaaggcgctcccaccttatagatctgtacaatcagatgtccgttcggtcgaaatcctttcatggaaatattcagttcccgattacatttcagattaaataccagagcaagaattgcagctatgatctgcccgataacggtagccaccgccgcaccggcgattcccatccggggcattccgaaatagccgaagatcaggatcggatccagaataatattaattaccgccccggttccctgcgtgatcatggtatagaaagtcttaccggtagcctgtaacaatctctcaaaggtcgtctggagaaaaatacccattcccgccacacaacagatcgtcagatacgtcactccgtactctcgtacttctaagacttccgtctggctggcaaaaaaggggcgactcaccagcagaccgatcaccgcaaaagccacgtagcttgcaatcgcaagaaaaataccgtttctggcaatgatatcagctttctcaaaatccttctctccaagagtcttggacagaaacgcattgatacccactgccgttcccactgctacggcgatcatcaggctctggatcgggaatgccagggataccgcacgaagtgcgtattcattgatcctggagacgaagatgctgtccacgatattgtacagtgcctgcaccagcatggagatcatcataggcagggacatagagatcagtaatttgtcaatgggcatgacacccattttgttttctttggtctgcataaaagcgctcctttcgcataaaaaaaagccccaagcggggtttttgagaatgggaaaaatgatgtatgttttcaggatatcgtaacatcaagtgaggcatgggggattcgaacccccgacaacttgattaaaagtcaagtgctctaccgactgagctaataccccataataaaaacagggctagctggattcgaaccagcgaatgcagcagtcaaagtgctgtgccttaccgcttggcgatagccctataaatatgacaccaagcgtgccattacgacacttcactaatgaaaaagggtggataaagggattcgaacccttggcctccagagccacaatctggcgcgctaaccaactgcgctatacccaccatgcgagacagtgacggtcaattaagtccttccttatctcaaatgtgctcgaagggattcgaacccccgacccacggcttagaaggccgttgctctatccagctgagctacgaacacatatctgtcagtcatctgcattagcaaaccgacgaagcatattgtaacttatccgacatcatttgtcaacagttttgtactaattttttgaaaaataaacacaaaactcaagttacgcatcggggtgacaggattcgaacctgcgaccccctggtcccaaaccaggtgctctagccaagctgagccacaccccgaggctgcgtcacatcggaacctccgacaacgcaggtgtaattataacctagtttttttctatctgtcaagagaaaagttgcagaactcctacgtctgtactacgtgttttacaccggaaccattatcgcagatatgcaatggtaaaatgtactttttcctctctatcgatctccataatggcataagacggctgacgtccttcctgtcttggataagacaggcttccgggattcaccgcaatgatatcgtcatcgatatcgatcaccgggcggtgtgtatgtccatacaatacaatatccacaccacgatcaatggcttcttttttgatcgtctcattccccatggagacataataattatgtccatgagtcacccataccttatagggtccgatatccagggtgatctctctgggcagatccgaaaaaaaatcgttattccccagcacaatatataccgggcattttgcagcagcagacagggcatactcactcccctccgcatcaccgcagtggatcaccatatccggatgatgcatttccagcactttgaaataattttcgttctttttatgggtgtcacttacgatcaatattttcatatttcttaagttcctctttcatcagctgcagcgcttttcctctgtgactgacctggttcttctcttcttctgtaagttccgcggttgtctttctgaactccggtacatagaaaatggggtcatatccgaatccgttcttccctttttcatcatatccgatcctgccctcaatcgtagcgcgggtcgtcagttctcttccgtccggtaaaacagcggcaatggcacacacgaatctggctgtccgttgttcctccggcaccccttccagtctctggatcagattttcgtttttcacagaataaggagtatcctctcccagatatcttgcagagtatatccccggttccttattcagatagtcaatctccagtccggagtcatccgccatgacgatttcattcgtaaacgccgccaccgctctggccttgatcaaagcattttcctcgtaggtttttccgttctcgtcaatatctgccataatccccgcatctttcatggataccacctccattccggtgtcctccatgatcattcggatctctttgatcttaccggcattgccggttgcaaatacgattcttccctgcatattccactcctcaccgcatatgatccatcattgcgtattagtataaacctcgttaatagcttccgcaataccttgtgcaagctttttttgatagtcttcctgtatcagcagttgtctctcagcagcgttcgtcacataccccaaagagattctggctgacgggattgcgatctcccacaggacatcttcctctgttgccgggaaaagtcccactgcccgattgctagctgccaccgtaacctgccttgtaacgcaatcggcccactgaaggttgccgaactccggaatataatattcatcattatattctccgctgatcccatagaccgacgtattctccggatctgacgacaatccgatctccagatacagatctgctccaacccagtcggcgaactgccttcttgcctctttcgtaacatcgatatcctctgtacgggtaagatataccttcacctgccggtcttccatcagctgggctgtctgtctggcaacactgagcgccacttctttttcctgacagccggaagccgtcacaccgagatctctgccgcctcccacaggatccaataccacgatcctgtcatagagttccttggggctgacataatcgacccataaacttccttcttccagagtgctgtgatattccagcacttcccgcatcgaaagtctcagcagtacaccttcgttctgtgcctcgcagattcctttttccacaggattcagatctcctgtgatcctccgttccttatagaatgcttttcttccgttttctatgtagatccagagttccttctccatgtaatggttttccaccactacattctccgctttcgtccccgattccagtggtatacagatctgcctgtcggctttttgatccgtctgcatgggtagctgcatctctccggtctgttccgtccggtattccgggaccagttctccctgctcctggcttcgtgcggaaatcaccaccgtcttgtgcgctgctgtccatagcattgctaccatggaaaatgttcccaacaggagccagaggaccaatgtcaccttcctattttgtttttggtctctgatttgcaatcgtttcttcatgaaaggttatatttctcttctcttcggcggcttcggtcccaaaaactggtaataataggttttcatcattccgttatatatcttcctgttcttgtctgctttccgtccgatatctttctctgcctgctcgtaagcagtgatcagatacatgctccaggagtccagttcacgaaaacgttcccctatggtacggtaaagtgccggcatctggctcttatcctgcaatcgttctccgtagggcggattagttataatgaatccatactttttcggatgatggagatcttccacgcctcttctctgaaaatggatcagcttatccacaccggccatacgcgcattttcccgggctatttttaccatatcctcatcaatatcatatccctggatatccgtctccactgacaggtctaccatctcttccgcttcatcgcaggtatcataccatattttctttcctacaatatgtggccattcttctgccgtaaagctccggttcctgccgggggccatattggccgccatcatggctgcttctatcggaaacgtaccgcttccgcaaaaaggatccaccaggatccttcctccgttccagggagtcagcatgatcagcgatgctgccaggttctccgcaatgggcgcttttgccgtcagcttccggtatcctctcttatgcagggattctccggtactgtcaagtcccaccgtcacttcgtctttcataaggaacactctgaccggaaagcttgcaccatcctccgggaaccaggagatttcatattgtgatttcaaccggtccaccatggcttttttcataatagactggatatccgaaggactaaataatttggactttacgctggccgctttcgctacccagaacttaccgtccttaggaatgtaatcttcccagggcagacttttcgttccctgaaacagttcctcaaatgtctctgcgtgaaagcttccgatcttgatcagaattctctccgctgtgcgcagaaaaatattagctctgcataaagcttcttcatcaccgaaaaaagtcacacggccatctgccacatccgtaatatcatatccgagatctgtaatctctctcttaagcaccgattccataccgaaatggcagggggcgatcaattcaaaacgtctcattcgttcctccgtatctcaatcaaacataggaacattatatatgcattccaaaaatatgtaaataggggcattcctgcgaacgcccctgacttcttatgcacaaaactagcagttcttattctgctccttattctcgctctgatccctattctggttcttactctgattcttgttctgattcttactgctctgcttattctgagagttctggttctcgtcataagagttactatacttgttctcgttgttctgatcgtaattattagacatatctgtgacctcctaacaggatttttagttacaggagtagtatgtctatttttcacaaaaatatgcttttaaatttatggtactttagaaccaatttttatcttgcatttttgtgacattagtactataatcataaatgtgaatagaagaacccttcatgattctatttgcacccttatgtattatttatactcccctcaaaagagccatcagcttccccctgatggctcttttattatcgttatttatcagtttagccagtctcgaaacagttttaccaaaaacagtactaccagaatcgggatcaataccggtgccaggaaggatagtactgaaaataccgcgctgatcaccagtaccaccacaaggatccccagaataatccagacccagaccggcagcttcgctaatacatctgccattttactccgatgggtgccatattcgccattgccgtctccgttataactgtgatgtaccgtcgatcctgctgcttctctgtattctccgtttccatagacggtattacgatagccggaccgattatcaccaccattggtctgaatgatcgtacgcgcaatcagtctcggatctcccaggctctccagtacttcctcttccgtacggcccttccgaatctccgtattaatatagtcttcgtaataattgacattatccataaccaagccgggggacacacgtccgttcagtgccatccgtagccggtctataaaatcctgtttgttcatactaatacagcttcctccatttacctcattattttagcatgacataagtactacgtaaatatacggagtgggaagtatttctaaaacttttctaaaatgaaatacaaaaaccccggagacatcatctccggggccttagatgtacgtgacaggattcgaacccacgaccttctggtccgtagccagacgctctatccagctgagctacacgtacattcacaggttttcgcctgcaacagtatgtattttaactgctgcaggtgaaaatgtcaatagaattttttaattttttcaaacaattttattatcagcagatttttccgatgccggtacgactttcgcatcatacttttccagaatagcctgcttgaactcttcgtaattatcctcatcatcgtagcaggcgtattcaatctccagcggttcctccgtcttcatcagaagcattcccaaaagagactttgcatccattgcggtcttctgaatacggatatcgatcgcatcatcaaattcattgcaggtatccacaaaatgtctgatttcatcctccgaatggaaggtaatatatagtttttctctcatcctttgttctcccatctgtccgcttgcggacaccccatacctttgtatattatgccaccaaacgcataaacctatccccgcgcgcccatcaaacggggagatgcgcgtctttagcgtgctgccagtgcctgtgcgatatcctcacgcatatccagtacggccgcgcgggaagcatctgcataattctgctcaccgaactgcgcatacttctcctgctggtatgcggcaatgatgccacgggaggagttgatgatggcacccagtccgtcttcattgaagaagtgtaccagatctgcacccttaccgccctgtgcaccgtaaccgggcaccaggataaatgccttgggcattaccttacgaagcactttgccttgctcaggataggttgcgcctaccacagcacctacatagctgtaagaatcacccatgcagtcagctccccaggctgctaccttttctcccaccagctcatacagcggtctgccgcccaccaactgatcctggaactcgccgctactgggattggaagtcttcaccagtacgaaaatgccctttttctcttccttacagatcttcacaaaaggattcacgccgtcggagcccagataagggtttacagtcacgaaatcctcatcaaaaccgtaatagctcctgctgcctacctgtactttgcccagatgtccgactgcgtatgcctcggaagtggatccgatatcaccgcgcttgatatcgccgatgacgatcagacctttttctttacaataatccactgtctttttaaatgccaccataccgggaatgccaaactgctcatacattgccacctgaggcttcacagccggtaccagatcataaattgcatccacaatacccttgttatactgccagattgcttctgcggcaccttccagagtctcaccatactcagcgaaagccgcctttttaatatattccggcacaaatttcatcataggatccagtcctaccacgatcggtgcgttggtttctttgattcgagtgatcagtttgttgatcatatttcctccgttctgcaatcattttcattgcattttattttctcaattgtgtaattttccctctgcggtgtatctgtaataaccgcagaaaaggcaccgccttcgggcgatgcctcctgacctgtatctattctaccccaactaatgtcagttggtcaacgtacttcttgatatttgaagcatttacatattttttatggctgtcgccgtttactaccaccagtgtcggtgcctgcattacgccgtaacgtcttgccagctccatgttctcctccgcatcgatggtcacgtagggcacatttttcagatattccttcaccagcttgcagttcgggcaggtcttggtcgtgaatagatacttgatatcctgcggctgctccaccttcacttccacgtcctccgcaaaattggacagcgttaccacacttctggtgggacgctttaaggaagaatggtcaatgtcatactccgttctgttggcatattcctgtaacttaccatcattccagttctgcaccggacgatagtaaccggtgattcggctgtacacctcggtcttcgccccacaatgaggacataccttcacctctcccgccagataaccgtgttccttacagatggaataggtcggcgacagcgtataatatggcaacttgtaattggaagcgatggtccgcaccagggaagccgctgctttccagtcgggaagcttctctcccaggaacgcatggaacaccgtgcctgaagtatacagggtctgcaattcatcctgaatatccagtgcatcgaaaatatccacagtatagtccaccggcagatgggaagagttcgtatagtaaggagtatctccgggctttcctgccgtcttgataccgggccagcgctttctgtcgtgcttggccagacggtatgtggtactctccgcaggagtcgcttccagattgtaaaggtctccgtactgctcctgataatccgacaggcgctctctcatatgattcagtacttccttggtaaactcctgagttctcggatcgctcatatccgctctcagccagttggcatttaagcccacctcgttcatgccgatcagaccaatagtagaaaaatgattctcaaaggtgcccagataccgcttggtataaggatacagtccctcatttaacagctttgtaatgacaccgcgcttgatcttcagggatctcgcagcaatatccatcatgtggttcagtcttgcgtaaaattcgtccttattggcagacagatatgcgatcctgggcatattgatcgtgacaacacccacgcttccggtgctctcgccggaaccgaagaagcctccggtcttcttacgcagttcccgcagatccagacgcagtctgcagcacatactgcggacatcgctgggctgcatgtcggaattgatataattggaaaaatacggtgtaccgtattttgcggtcatctcgaataacagtctgttgttctcggtgtcggaccagtcgaaatccttcgtgatggaatacgtcggaatcggatactggaaaccgcggccgttggagtcgccctcgatcatggtctcgatgaatgccttgttgaccatatccatttcctttttacaatccttgtatttgaaatccatctccacgccgcctaccagtgccggcagttctgccaggtcatcgggcaccgtccagtccagtgtaatattggaaaaaggagcctgggtaccccagcggctgggcgtattcacaccgtagataaatgcttcgatgcattttttcacttcaggatagcttaaatgatctactttcacaaagggggcaagataggtatcaaaggaggaaaaagcctgtgctcccgcccattcgttctgcatgatccccaaaaagttcaccatctgattacacagtacggataagtgtctcgccggtgcagaagtgatcttgccggtgatgccgcccagtccttccttgatcagctgctttaaggaccatcccgcgcagtaaccggtcagcatggacagatcatggatatggatatccgcattgcggtgtgcctcggcgatctcttcgtcgtagatttcggacagccagtagttcgccgttaccgcaccggaattgcttaagatcagaccacctacggaataagtcaccgtggagttctccttcactcgccagtcctcgactttgacatagctgttgaccacatccttgtagtccaggatcgtggatttcatggcacgcatcttctcgcgctgcttgcgatacagaatatatgccttcgccacttcctcatagccggcctgtcccagtacacgctccacactgtcctggatatcttctacatggatctcatcattttccacctttttctggaaatctgcggtcacacgtaacgcaagaagatcaataatgtcattattatagctcatctgcgtcgcagtaaaagccttcataatggcatcattgatcttcgtcagtgtaaagtctgctttggaaccatctcgtttgatcacctgaaacatcttatgtacccccttaatctcatgtccccattagcagctgtccttttcccggcacagttgctgttaaaacctatcacggtctattctacaacactttgtgggggaagtcaattatcgagtacaatatcttgtgtatacatcagctcacccgtcgatttgtacggagacggctttacgctctcttccacaccttccggtacagcacatacgccaccattgcggtcacgctctcggtgcacacgaacgcccaccatacaccggtgacaccgatgaggcggcttaagacaaatgccgcaggaatgatcaccgccacataccgcatcacagagatcaccagggaagccatcccccgtcccagtgcctccagggctccggagccggtcaccgacacagcggacagaataaagcccagactgatgatatgcagtgccgtgataccgatggtgatggtctccggattctcggtaaacagtccgatcagtcctccggggatcagccagcatagcactgtaccggcagccatgatccccgctgtcagttccagtgtcagatgatagatctgctccacacgctttctctctccggcaccgtagttatagccgatcaaggggcggatgccctgaatgataccattcgagggcagatagataaaggtctgcagcttgtaataaactcccagcaccagtacataggctccggaataagctgccagaataccgttcaacgcggagatcagcagagaaggcagtgccatattcagggtcgcaggaatgccgataccgtaagtcttgccgcagatatcccctcccggacgcagatattttttatgaagcttcaccggcagaggatccgccacataatagatgagatataccagtaacgtgatcacctgtccaatgccggtggcaagcgccgctccggcgatctccatccggggaaaaggtccgatgccgaagatcaacaacggatccagtacgatattcgtgacaaatccggcgatcatgctgaccatggtagcccgcatccggcctaccgcctggaatattttctccagtgtgatgcccccggtcacaatgacggaaaacaggaacactacattggaatattccatgcccagcgcccgcaccgcatcacttttcgtgaacatccccaggaaccaattcattccacagagaaacagcagcatgagcagcacaccgtgcaatacccccagcaccattccctgggtcgccgtcttatccgctttttcctgattctgtgctcccaaatagaaggaaatcatggcattgacccccaccccgaagcccaccgccacagcagtcagcagattctgtgccggatagaccagggaaagcgctgtcatggcatcctcactgagctttgccacgaaataactgtccacgatattatagagggaattgaatgccatggaaagcatcatgggaagtgccatggacatcacaaggggaaatattttcttttctttcatataagtctggttcattttctgctccttatacaacaaacgccacacaacatttctgctgtgtggcgaaaataagatcaaaatcttgaaaaatccactgcccttacgggttttgtaatcgagatttactttgttccagtgcgtattataggggagaaatctctgtctgtcaagccaacacgcctaaaatttcagcaaacaggtgtgaaccttcctccgactgatagatattaataccgtcaatatctgtgctgtggttggcaaatgccggatataaaaaccccgcttccggtctcccaacctcatagtctcccgtgaccggaccgatggtaccgatcaggaactgatagacctcctcggattcccactgattctccttgtcttttcccttggtgggtacatcgtagctgccgaagaaaagataaatggcataaggatagcccggctggtatttctctccaatatattcataaagggagtacaataatgcatcattttttaattcgcactgccgcagggcttccaacagctgtattacgccgccgggtctcctggctcccaggtccagacgatagttcttcagattcacattggtattggaatagggaacggtcttggcgatattcagattcctctccttctcgcttccggataatttgaggaaatgcgtattgaaggtaccgtcaataaatccctcttcatccatgtacgctccggcaatgcgggaaaagcagctgcgggacacggtcattctcctggtcagttccaacatatcttctctgtctatgtgcatttttaatctctcacctttccatcatggctctgaatggttactcatcatgtataaattatgaatcatatccgatgtaggatttttttatattagacttcgttcacagcagcttgctcttcgcattggcactcttgctatccgtatattccagcatggacagttttccatttgtacagtcgagaatcgcagtagcacagttgcccatatgcacccgccagaaatcatcgacaggaatattcagaacaggattcagaatactgcggttcactcctccgtgtgctactaccagcaccgtctcgtaagtgccttccaacggcagaagcacctgtttcacgaattcaccgcttctttgatacagttgtgcaaaactctccgctcccgcggggggaatgtagctgcccgggttggtaaaaggctggctggcagcatccttgatggtccgaatatccacgccttcccagggtccgaaattcagttctctgagtctttcgtctgtggtaagggtgatcttccggtcgcctatgatgatctctgccgtgcgcttcgcccggatcaatggtgaacaaaatgcaatttcaaacggaacctcctttaaccgatccgccgcatcgtgggcctgctccaatccctgggcattaagcgcaatatccgtctgcccctgcaaaagtcctgcctgattccagtccgtctcaccgtgtcttaccaaatagatcttcatgtatttgtatcctcataacttccgatagtatttctgttacaaaatactactgttttctctgctttgtcaatcgtatcgtcttaagtgtcgaaaaaagaaagccacgcaaagcattatactttgcatggttctcatcttacagctcattcttgtttttaattggtcttgccttcgtccatttcctcttcggtagtaatggcaaatgcaatgttggtcgcatggtctgcaactctctccagaccggatacaatatcagagaagatcataccggcttcgggagaacattctcccttggtaagacgctctacatgcttcttctgcagttcgcgttccttttcatctacctgatcctctaaagtgatgatctcctgcatatgggtctcatcgctcttggcaaacatttctacggcataacggatgatcttattgaccatctccagcatgtctcccagttccttctgggcttccttgctgatggatactccttcttccttacgctgtcttgcggcatccgctacattctccgcatggtcaccgatacgctcgatatcattcaccacatggaacagagcacccagactgttcaggtcttcgatgggcagtgtcgtctggttgatcttcaccagataatccgtaatggcatgattcaggaagttgatatttttctctacctcgtagacttcctcaatgtcttcttcatccaatgtgatcagggcattcatggcacggtttaagttctcctccgccagagaagccatacgctccagctccttgacaacctctaccactgcggtagcggggttgaacaccactttgtcgccgatgtattttaactgatagctctctctgtaaccaaccttctgatcttcgccgggtacgatcagataggtcatctttaccagccagccggtgaacgggaacagcataattacctgtgcgatcttgatcagcgtatgcgcatttgccacgaaccggccgttgtccgcggagatagacttgatcagttccacgatctgatcgcctgccacgaacagagcaatgtagataataaccgtaccaatgatattgaacagcagatggatcagtgcagctctcttcgcatcctttttaccggtcatagaagctaacattgcggtagcacaggcaccgatattacatcctaagataatgtaaagtgtgatcggtaacggcagcagatcctgattggcgagcaacagtacgatactgaccgttacggatgagctctgaataatcgcagtcagggcaaatcccatcaaggtggctaagaacggattcttcagagacatcagcagatttactacctgcggctcatttttcatgttggccattgcctgggacatggtgctcagtcccacgaacagaataccgaagcctacgaccacttccgctactttacggactttttctttcttcgtaaacatcatcacgaccacaccgactaacagaattaacggtgcgatcttggacagattaaatgataccagctgtgacgtaatggtggtaccgatattggcaccgaggatgactcccgccgcctgatacaggttcatcagaccggagttaacaaagctgacgaccataaccgtacatgcggaggaagactggatgataccggtgaaaataatacctacgatcatccccatgaaacggttcgtggtaaaaatctccagaatacgacgaagtctggctcctgctaccttctcaatggaatcactcatcagttccattccgaataaaaacagtcccagacctccagccattgtcaatattgttccaaagctcatttttaatccctcaatctctcttgattctcttacgaaaaaccaaaataattattttcaaatttaatctaactataaacaatccaaaatatattttacgagatagaataaaaacttgcaatggatattttacttttcttttacgtttctttacatttttttactcaatttacgcgtttcgcccatccgcaatatccaggtccagctgtttcttaagctcttccaaagatccgaatctgcgttcagggcgccggaagcttttcaatgccacttcaatctcctgaccgtaaatatcctgagcgaaatcatatagataagattccactcccatcattttttcggaagaaaccgtcggcttggtccctacattgctgatggctttgtaggccctcccattataacggactaccgcataatagacaccgttgggcggcaggagcttacctgcgggcggcagaagatttactgtgggaaagcccagggtatgaccgatatggttgccatgttccacgcatcccacaagagtatagggcatccccagcatcttttccgcttcttccatccggccctcttccaccagcttgcggatgtaagtagagctgacctcgatgccatccacttcgatcttctctatggtccggacacaaaaacctaactgcggagccattttctctaaaagttctgcattgcctgctccattttttccaaaagagagatcttcacctgctgccacaaaacgggtattcatctgcttcgccagaatctctgtcacgaaacgctccggttctgtggctgcagtctcttttgtcagcgggaactcgatcaggatgtcgatccccagatgttcgaagagacgccttttctcttctcttgtcgtcagttcttttccatccgacagtccgaacagcaccgccggtgtgggatcaaaagtgaaaacacaggctgccagtccgttctttttcttattcaggatttcctctaaaagtcttctgtgccccaaatgcacaccgtcaaatttgccgatagctaccgctgtatctttttccaaataaaagtctgttgttcctgcaatgatttccaagtctatttcctgctttctgtgttacttgggaagattttcatgggcttgtaccattcttttaccccgtcatacgcataaatgcccacaaagctgtcatcctctctgtagacacgcacccactctcccgcagggtaagtagtctgctccatggtctgtcccggataaaaggcgttcccgttatcgatcaatttccgccatttttcctctacatgtactgcattaaaatccgcaaaaatacggtccgtgggaagcagtgcctcctctaatctgtccgtatcccggagttcctgcagctgtgcaagtgtcagggcatccgcaagccggaattctccgaccctggtgcggacgagactctgcatggtgccaccgcagccaagcttcccgccgatatcggcacagagactgcggatgtaagttcccttggagcattccacacggaacttcactaccggaagtcttatttccaggatctcgatcgccggcagatccacatgtcttgcctgccgttccacttctttacctgccctggcaagctcatagagtttttttccgttgaccttccgtgcggaatacataggcggaatctggtcataaccgccgacaaagctttcgatcacttcacgtacctgtacctcatccaccgctacttcccgttcttccaaaacagttcccgtggtatcctgggtatctgtgatctgacccagtaaaagttctgccacatattccttggtcctgtccgtcagcatttcgcatgctctggtagcactccccagacatacagggagcacaccggtagcctgtggatccagtgtacctgtgtgccctatctttttctgccggcagatcccgcgaagcttggctaccacatcatgagaggtaaaacctgcttccttgtatacattgatgatgccgtccattaatcctgttctccccgcaattgcttatcgatgtgcagtgacaaattattgatacagtcatgaaaagtccccttcatggtgcagcctgcggcacgtacgtgtccgccgcctccaaagaaggatgccaccttcgccacatcaaccttctcattggaacgcatgctgaccttgtactccagtacaccggtctcatacatgaagattgcacagtcgattcctttaatattgcgcagctggttcactatgccgtccagatctcccggtactgcattgtagaaatccatggtcttacggtccaccatgctcacgatgcagcggccgtccatgaagcgtatgctctccatcagggctctgcccatgatctgcgactgcagataggtcttctgataaaagctctcctcaatgattttagaaaaatcaaatccaaaagagatcagaaatgctgctgcctgcaatgtctccggtgtcgtattggaatactggaatacgccggtatcgtggatgatgccggtgtacagtgcttccgcaatatctctgtcaatgagttcggcatccatgatgtgatacagcacctcacaggcactgcccacctcgggccggacgagatttacatcaccgcagccgaaattgctgatgtgatgatcgatgttgatcttctttttcgcattctggaaatatttctccgcgtctcccagtctgtctccactgcagtccagtgcaaaatatacatcaaaaggatcctgctccggacattcggtctggatctcatcgtatcccttcagataggaaaactcttcggaaggcttctgtatatatacggtaacttctgcttcgggaaggagtttcctcaggtacatctgtaaggacagacatacacccacgcagtctccgtcgggacgaatatgtccgctgatgccgatcttttttgcgccacgacattcttcacgcaaatccattattcgtcaccttcctctgtctcttccgtatcttccacaacttcattatccggcttctgtgcctcatccgctgcaatgacttcatcgatcttgtgggacatgttgacaccgtattcgatggactggtccatcacaaaagtgatatccggagtgttgcgcagattgatggtacgcgccagttctctgcggataaagccctcggcgctctttaaaccctgcagggtagactttctgacttcctcgtctcccagcacactgatccatgccttacagctttttaaatccggtgccacttccacagcgaccacactggtccagggactgatccgggggtccttaagaccgccccggatgatctctgccagaacacgctgcacttccccgttcacacgggtattttttacactattttttctcattcttattccttcttacttcaaacctaaaccatgatataccggaagcttcgcttcgtaccacaccagaagtttcgcgaagcgaaacttcgcgctaaagctttagaatatcttaggcgtggtattttcacgccttagatattctctttagcgtggtacctccaccatgatataagcttctacgatatccagctcctgcatcttgtcaaagccttcgaatacgagaccacactcatatcctgccttaacttccttcacatcatccttgaatctcttcagggaagccaggttgccctcgaagatctgctcgccctcacgggtgatacgaactttacagcctctctggaagacaccgtctaagacataggaaccggcaatgttaccgatagcggatgccttgaagatctgacgaacctctgcatgaccgatcaccttctcctcatagacaggatccagcatacccttcatggcagcttcgatatcttcgatggcctggtagatgaccttgtacagacgtacatccacgccctctctctctgcggttgccttggcagtcgcatcgggacggacattgaatccgatgatgatcgcattggacgcacttgccagagatacgtcggactcattgatggcacctacgccgccgtggatacattttactactacttcttcattggacagcttcatcagggactgctttactgcttctacgctaccctgtacatcagccttgacgatcaggttcagttccttcagattaccctcctggatctggctgaacagatcatccagagacattctgcccttggtctcttccagcatcttttccttattctgtgccaggtaggtctctgcataagcttttgctgtcttatcattatcatgtgccaggaatacttcaccggcactgggaacatcggacagacccaggatctctacaggagtagaaggtcctgcttccttgactctgcgtcccttgtcatcgatcatggctcttaccttaccatgagccacacccgcggagataaagtctcccacatgcagggtacccttctgtaccagtacggtagccacaggaccgcgtcccttatccagctctgcctcgatgaccagacctcttgcctttctcttggggttcgccttcagttccatgatgtctgcagtcagcaggatcatgtcaagcagctggtcgataccctcgccgctttttgcggatacgggtgcaaatacggtgcttccgccccaatcctcggggatcagctcatactctgccagctcctgctttacacggtcaatatttgcagagggcttatcgatcttgttcactgctacgatgatctccacacccgctgcctttgcatggttgatcgcctctacggtctggggcattacaccgtcgtccgctgctactaccaggatggcgatatcggtcgcattggcaccacgcatacgcatggcggtaaatgcttcgtgtccgggagtatctaagaaggtgatcttacggtctcccacatttacagtataagcaccgatgtgctgggtgataccacctgcctcacgatcggttacgttggtcttacggatagcgtctaacagggaagttttaccatggtcaacgtgacccataacacagattacgggaggtctctccaccagatctgcctcgtcctcttcgtcttccttcaacagttcttcgatgacatctaccttgacctctttttcacagagaatgtcatattccatggcaatgttctctgcatcttcataggagatctcctggttcacggttacgatcttaccttccaggaacagcttcttgatgatggctgcaggctgtaacttcatcttctcagccagttctttgatggtaatggattccggcagcacgattactttgatctgctcttcctgtacctcttccttcttcttttccggcttgatgaaacgtccgggcttgttcttcagtgcgtcctcgtcttcgtagatatggtccttcttggaacgcttgttgtccttctcctggctgaaacgtctcttttcatcttcgcgcttcttctcaatatctttacctgcaggttccggagcgaagcccttattctgtctgttatctccgaatcgattacccgatccgccattgcctctttggtcgcggccgttattgccgtaaccgcgctcaccgttgccgttattcctgcgatcaccctggccgccttccatacccggacgaccctgtctgttaaatccgcctccctgaggtctgccattgcccatacctcctctgtttgcgttctgtccgccctggcggctgccctgaccatagctgccctgacgattatcacgattgccatctctgttatcacgattataaccgccctgaccacgatcgttctgaccacgattatcacggttctgtccgtaattattctgtccgtaaccaccctgacggttgtcgcggttattgttctgcggtctctccgcaggtctgttctgtgctgtattctgaggtgcctgtggctgagctgctgcggtattctgtgttgcctgttcttttacaggtgcctgtgccgcggtgttgtttgcgggcttcttcggctgctgtcctctgtttccgggtaccatatccacactgggggtgggagaaggcggggtcagcggtttgatgggacgtaccggagcctgtgtctgtacacggttaccgtaggaattattctggtatctgcctccctgtccctgattcgggcgctgtccgccggcgtttctctgtccctgtccgttctgaccgccctgacgctgtccggacatcttggaattctgagggttgcttacgaagataatttttttctttttcttcgtctcatcctgacccttattctctgttgtgggctcctgcaccttatttgctgcgggctttgcttcttcctgtgccttcacaggctctttttctgccggagtgggagtttctgtcttctctgccgcgggagcctgctttttgtgtcccagactcttacgaaccagcgctgccgcatcctcttccagagagctctgtgctgccttagcctcaattcctttttcctgtaaaaaattcaatatatccttactctgtagttctaattcttttgcgagttcatgtactttgattttcgccatgctttcctccattctgcctaaccgggcaaattcgcttccaattgcttgatgagtgcatctgccagtcccgcatcacacacacctaccgaagatcttaagttccggccgatcgcccagccgagctcttcttttgtgccatattcgtataccgggacttcataataggaacatttgtcgtgaaacaactttttcgtattggcggatgcatcttctgcaacgatcaccaacatggcagaaccttttttcacagcgtcctccgtctggaattcaccgcttaccaggttacgccccctcatcgcaagtcccaaaagggaataaatcttattctgtttcaagctgatcaaactccttttccagcatatcataactttccggagaaatactcatcttgaaagaacgctctaagcctttattcttccgggccttctgcagacattccttctgtctgcatatatatgcaccgcgtccgttctttttgcccgttgtatctaaacagatctctccttccggagtcttaagaacacgcagcatttcttttttgcctttcatttctccgcagcctacgcactgcctcagtggaatcttttttgccattgattattcctgctctccatcaaaatcgtcttcggtttcatcctcgtaatcatccacataatcctcataacggaagccgggagcatccttggcctgtgtctcggatttgatgtcgatcttgtaaccggtcagccttgctgccagtcttgcgttctgaccttccttaccgatcgccagagacagctgataatcgggaacgactacctttgcggtcttctcatcgggatccgcaaatactgctacgatcttggcaggagaaagtgcattctggatcaggttaccggggttctcatcccagttcacgatatcgatcttctcaccgcgcagctcttctacgatagcattgacacgggcaccgttcatacctacgcaggcaccgaccgcatccacgttcggattgttgctccatacagcgatcttggtacggctgccggcctctctggcaatgctcttgatttctacggtaccgtccttgatctcggtaacttcagactcaaacagtctctttaccaattccggatgggtacggctgacattgatgcgaggtcccttcggggtattcttcacttctacgatgtagaccttgatacgctcggtgggtttgaagacttcacccttcacctgctcattctcggtcagcatggcatctgccttacccaggttgatgctgatgtttttgccgacatagcgctgcactacaccagttactacatccttttccttctcataatactgattgtagatcacgcttctctcttcttcacggatcttctgtaagatcacgttcttggcattctgggtagcgatacgtccgaattccttggacttgatctctacatggatcatgtcgccgacctgtgcctttttggagatctcctgtgcatcctccagagcgatctgtaagcagtcatcctctacatcgtccttcgtgggtacgacttccttctcagcatataccaaaaaatcgcaggtttctctattgatctccacatggacattgtcagcctttccaaaatggttcttgcaggctgtcatcagggaattctcgatggcttcaaacaaggtctccttgctgatctccttctccttctccagaacgtccagtgcctccattaattccttattcatcatttcctccattccggctttcgccttttcttagtgtatggtttcttcttattatcaaaaatccagtgccaggcggatcagtgcgatgtctgctctggcaaaagttctcgtggttccctcttctgtgatcgtaaccgtatctgcatcaaagctttccaggatgccggaaaattccttgcatttgtcgatgggtttaaacagtttgatctccacctcttcgccgatgctcttctgtaaatgcttatcctttttcagagttctgcccagtcccgggctgctgacctccagaatgtatgcatccggaatgaaatccgctttgtcgagagcttcggataatgctctgctgacattttcacaatccagaatattcacaccctccggcttgtcgatgtaggctctcagatagtagtcactgccttccttcacatactccacatcgtagatctccacctggtttacttctgcgatgggcgcaagcagttcttcggttctgctttcgtagtcctctcgtttggacatgtatgccctcctttactgatatgaactgtcgtcacaacaacaagaaagagtggcgcgcgtccactcttactctagcaatcatctttaaactatacacagtatagaccctgtgtaaaaaaaagtcaagtcttaataatcggttttattctttacactgtttctcatttttcttgttttttgccatttttcccgacaacaaacccaaaggcattccgcactccgggaccggcgaaaaagatctgccagcacagcgccatggggaagttctggacggtcttctgcagccacagggcgatgatctgattgccgggatgcataaagagacaggtggcgacaaagctcatcaccgggcacatcagacatacgatcatggatgagatcgccagcgtgataagaatgggcttatcctccggggataccatacggaatgccagcttccgggacagcttttctacaacaaaatactccagaatacaggcgataggccacataatggggatctcgtggaacgctaacaggaagatctcgttggtcatttctcccttgtccagtgcgatgttgtaacagaccatggcgtacaccataacgaacgccatgatcagggtgaaaataatgttctgtaattttgttttcggcataattggatgccctccttttctaaaaatgagcgcaaaaagacacatgtgtgttgttcgttaatcagtgagcagtgcgcacatgtgtcgtttccaattcttacctaaagtctttatgctgttttactatttttgcaacggtgagattttatcacatagattccggaaaagtcaatatgaaataatgtattttttcttccgcggcttccttcggcggtccccaggatcttacgtccttttccttaccgttctatcttagatacagaggggagaggaaaaatgttgcaaggttttaaaaaaagaaaaatgaaaacgcaaacgggactgtcctttcgaacagtccctgaagagaaaaagagataccaaaatagttttggataaaagctgattaattctgaacgttgaatgcgcccatgccgggatatacggctgctgcacccagctcttcctcaatacggagcaactggttgtattttgccacacgctcggttctactgggagcaccggtcttgatctgacaggtattcagtgccactgccaggtcagcaatggtggtgtcctcggtctcaccggaacgatgggaggaaatagcggtatagcctgccttgtgtgccatcttgatggcttccagagtctcggatacggatccgatctggttcagtttgatgaggatggagttaccacagcccagggagattccctttaccagtctctcggtattggttacgaagaggtcatcaccgaccagctgtaccttatcgcccagttctgcagtcagctttttccagccttcccagtcttcttcatccagtgcatcttctatcgaaatgatggggtatttctccaccagtttcttccagtgtacgatcagttcttcggaggtaaatacggtgcctgccttaggcagcttgtattcgccgaccttgccggtcttccattcgctggaagcggcatccatagcaatcttgaagtccttgccgggctcgtagcctgccttcttcacagcctctaagattgtctcgatagcttcttcgtcagattttaatgccggtgcgaaaccaccctcgtcacctacggaagtagccagtcctctgtcctttaaaatagaagccagtgcgtggaatacttcagcgcaccatcttaagcattccttgaaggaaggagcgcctacgggcatgatcatgaattcctgtacatccaggccggaggacagtgcatggcagccaccgttgatgatgttcatcatgggaaccggaagtctgttaccggagatacctcctaaaaagcgatacaggggaatatccagggaaatcgctgctgctctcgcgctggcaatggatactgccaggatcgcattggctcccagcctggacttatccttggttccatctgcgtcgatcattgccttatcaatcgcataaatatcaaaagcatccattccctgcaatgtctcgttgattacggtgttaatgttctccaccgccttctgcacacccttgcccaaatatctgctcttgtctccgtctcttaactccagtgcttcgaattcaccggtggatgctccgctgggagccatgccgcgtccgatggtaccgtctaccagagttacctctgcttctacggtaggattgcctctggaatccagaatctctcttccgattactttttcaatctctaaatagttcatttcgttcttctcctttatcctctattctaacttctattcccaaaccttctccttcgtaaatcccctataagggctgaaaaactcctcccgggagatcccctcccggcagtccacggattcagcagctccgtttcctctgaggagtttcacatgattcactcattagttagttgcacctaacttttgaattattatatcgggtattcttcgaaatagcaatagttataaatgagaggatttctcaaagagtccccaaaaggattttccatgtatatctctttgtttttaggtaaaattaattttagactatcttttatacatttttcatctatttctaaaatgtcattcctttaaaactaaaatatagtaaaatagacttcatcaaatcttaaaagaaaacatttaaatagtgctgcatctgcggcagaatgagaggcaatatgaggagtttcggtgagatccttacatccctgcgggaagaacggggcatctatcagaaggaactggctgccatattaaaagtatccgttggcaccgtctctaattacgagaacaatattcacttcccggatcaggaagcattactgcagctggctgattatttcggagtgaccgttgattatctgttggggcgtacttcctatcgttacagtctggataccttaaatgaagaatatgctcccggcaggaccgtggctgagctggtagatatcatacagcatttcagtccccagaacacggcatcctttctggattatatcgaacttctgcaattacgacaaaaggcagaggattgctcctctacctcgtagataaaaactgctgttcccggatggccgcctggtcgtccgggtaattttgtaagtaggcttttaacagcactgccgctttctggtaatcctgcagatattcatatgctacgatttcgttgaaggacaaggtctgcatcaggctgtttccttcgatctgttttcctgcctgaaatgcttccaacgccttctggtagtcttttttcgccagctcacataatcccagctgattatagatctccgcatccggtccctgcttggacaggtaattgctatacacactggaggcataattataatctccggtggctgcataagctttccccaggtacagatagctgtccactccacccttacctttggcttcttccagtgccagataggctttctgataatctcccaggtaataataaatacgaccgctgtcataggcatccagctttttgtcggtattcagtacattttgcagatactcctgcccgacttcccggtatccgtagtctgccagggcttcgtagatctcgatcagccggtcataatttttcggatccatagagattgccttgtcgaaatccgccttagcactctcgtaatctcccagttccagttccgccgatccccgcaggaaataggcgtccttctcctccggcttcagtcccagaatggcatcatataccttttttgcctccgcaggctgtccgttcttccggtaggcggctgcgagataatagttcatatcgtagtctacattctgcacccagccgtcactaagctccaacgcctctgtaaaatactgcactgcctgatcatattctgtcagccccatgctggcaatcccccggcctcttgcaataagacggctgttctctttctgtgcttccgcttcgtcaaaggctgtcaatgcaccctgataatccagtgtttccaccagctgcatcccttcggtgattttcgtagtatcatttccgcagcctgtcagcatgcttatcatcagacaacagactcctgccatcactattttcttatgtgttttacccatgctttcctccacggtctgtttcgatccttactgctctattactttactgctcgtccagtttggatgtgcaatgaggacatctcgtagcatcaatggcgatctcactcttacagaacgggcatttcttcgtcgtaggtgctgccggagtctcctctttgtggtgcagggtgtctcccagcttgttgatgaattttaccaggcagaagatcacaaatgctgtgatcaggaaattgatgaccgctgtgataaaattaccgtacatcaacaccggtgcggtgtcaccgcttcccagcttcacatataaattagaaaaatcagtgcctccgaagattgccagaaccggagtaaggatgtcctgattcagagaagtaacaatagcggtaaatgcgccgccgacgatcacgccgactgccatatccattacatttcccctcagaataaactttttgaattcctgcatgaatccgcttttcctgctcatttttctcttccttcctcttatggtatgatggtcgaaccgcgctgttcgcaaaatcatgcaagcatgattgtgtctctcgtatatgttcatggtcgaactgttttgttccataatagcatacaccccttgaaacctcaataggaaatggggtatactcttttcaggaaaatacagtaagacatagaaggaatactatttatgcagcggatcaatgaagacatcaaaaccggcaatttcaaacagatctacctgctctacggagaggaacgttatctgaagaaccagtacacgacccgtctgcgtaaggcattgtgtcaggacggcgacgagatgaacacccatttctatcaaggaaaggatttctccttgggacaggtcatcgatctggcagagacgctgccttttctggcagagcgccgtgtcatgttcttcaaggacaccggactcttcaaagccggtggggaaaagctggcggaataccttgcagctcccaatgatactacctttttcgtatttacggaaagtgaagtggataagcgcagcaagctctacaaagctgtgcagtccaagggatatgtggcagagttcacagtacaggatgaaaatacactgaaacgctggatcgccggtattctgggcaaagaagggaaaaagatctccgaaaacaccgcgcagctcctgctctccaagaccggcaccgatatggaaaatatccagatggagctggagaagctgatctgctattgtctggaccgggatgtggtcaccgcagaggatgtggaagctgtctgcaccactcgtatcaccaaccatatcttcgatatggtcaatgccattgcagaaaagcagccgcagaaagccttacagctctattacgatctgctggccttaaaggagcctcccatgcgggtgttgttcctgatcgccagacagtgtaacctcctgctccagaccaaggagttaaaaaacagaggtcacgacaataagaccattgcctccaagatcggcgtgccgccctttgctgccggaaaatatgtggcacaggcatcccatttcaagacttccgtgctgaaaaatgcggtaaagcagtgcgtggagaccgaagaagccgtgaaatccggacggatgaatgatatgatgagtgtggagatactgattttatcggtattaccctcgtaagcttgcaaaatgcattaaatgagttctgctcacgatatagaaaagtccatggacagttttcctgctcatggaccttttatttgcattacttttattaccatgttacatattcagattcaaagtaatggtcttctgtaacgatacctgtgacgccttgaacttttttggatatacatctttgtatctgtaaatactcaggataattcccaccagtgcgtagcacagtaaaatattatttctgccaacagataagaacggcaggaaggtcgatgtcagcgggatccatcccaacattcccgcaaagttcagagaaatatttaataaaatgatcattccgcatccgaatcccatcaccatgcctagttcatttttctgtcgggccgcagctccgaacataaacaataccagtgctgctaggatcgcggctacaaagattccggccagcagtccgtaactgttcagaatataagagaaaatgtaatcctgattgaattccggcaaacctcccaccacatcttttccactgttgccccaaagtaaaatattttcattaaatttatgaagcatggccgtcatgtaattggcatctccggaatgggataaataggagcggatcctggcttcctgataggcttccaacatgtgaagtgcatacattgcagtcaataccaggaccggccctgccgtaaaaagcagccacatgccgataatcgtctttttcacaggcagttgaaaccaccccttccagacagccaccgtaagttctatcagcatactgaccatcatgatgacagccacaccgaggctggggattcgggatgtaataaatacaggaagaatcagccacaggatcgccctgcacagtgcggatacaccaccgtccctgtatttatataggatagcgccgtaaatcggcacatagaacatcatcagggaagtaatcgacacccggaacattccaaatccaacccagtcgccgactccgttaatatccacaccgaaaaagctggtcagccgcaatcctcccaaaataagtataaggactccaatgaacctggagtactttgcaattaatgtataatccagaaagtagatcacacacatgagaaggaatcctatcacaatacatgagacaaacccctccgtagtatagcagtacacttcctgtctccatgtttccagctcctgataaccgggttgtctgagaatggattgctgtatcagaatgcccagcaggcttaaaattcctacgatcacaagtaacctccatgcaatcttaggcttgtggattctgtccagtgagataccgacttccaccggatctcccatgtccgcaaccgcatttttctctgcttcctcagaggtcatcccttcggaaagattgtccgcaatctggcattctatatggtctcttatctcctcagcgatataaggtcttgcctttttgcagcgaatctgtgacagcagtttttccaaatatatctccatccctatacccccattgccagaacactggtcactgcagactgatattccatccactccgcttttttggtttccagtaattttctgccctctttcgtaatactgtaatacttcctcgtcttgcctgcatattcctgctcatataccgtaagcaggcccttcgcttccagcccatgcaacagcggatacagcgtacctgcttttaactcgaacacgttacaggattttttccgcagtgtatcgatcatctcgtatccgtacatatccttctccgccagtaatctgagcaaaagcatcgtcatacttcccgacatcattgatttgtccacagccattttttgtcctccttatatagatagccgatatatatcgttgtctataatatatatcggctatctatatatgtcaatatttatttttcaaatcgatcactaatacagttcgacttcatctacgattttgtatttgttatccgtatcttcttttcttatcgttctgtctaacagcgttcctcgaatcatcaaatcattatttgctgtatttttctacattttcaatgctttccgataccgttgcattctccggctcccattcacggatctggcagctggcaaccatctgtgagataatctttttatattttttataatccttttgtgacatagagatggtaatgttatagaatccctgaccgatgaaatcccccttaaaaacataggattcgcttatcccttcaccgcttgtttcgattccatgaagtgctgtaagttcctcattcacttccacggtctccagatcattttcatcccctgcataatagggagaaaagctgttgcaaaaatagatgctgctctcctggctgtcatccggaaaaagccggattccttcgtccgggctggcttcctctatctcggtcgcaggccacccttcctgaagcttcgctgtccattctaccggtctgtctatgcttaaggtaaatcctgctgcctcatttgtgtattcgcagcggatcatctcctgctttccacaaccggccattgcccataatgctgctaaaatcatcagacccacaatccattttttacccataagcacctccgccattctactctgctgttgctatctttacaccctgggcaatatcttctgccatcagatcaatgctcctgatatatccggcactatttacggtccgttttatcaaccggtccccataagtaacctcctaatattccggtcagaataaataccataaaaaagagtcccggaacacctgcgacaaaagcataaaacgctatctggaagctccagatggggattaacagattaagcgctgccacacaggtaacgccaaaagcaacatattccgcaccttttgctttgtcccgtctggtccttgtcgccagcaggaatccccatgccgtatagagcagcatacgtaccaccgtccggactccgctcatttcgtcaaaagaagttttgtaatcctcctttagtgccaccaggacaatcaggatcacaacagacaaaataattttgtagtaatttgaaaaaattttcttcatagctgctcctttcattctacattcaggaatgtatatccccagtccggatcatcgatatatcttgtgcctatctgctgatatgcaggttctctttctgcatgatgtttttgctccttaattgtacttgataatgatatcattatacaattgagcaatcggaaaagcaattgagcggatggaaaccttcctcttcattaaccataacgaaagatcttgcgctatttgttacaaatgcgttgaagatttatacttaagatttatacttaatttatacttatttgcattttcagaatagcatatttcaaaaaacgagacatcccttccgaaccgaaaagcaaaaactaaggcaaaaatgggtgaaaacgacattctattttgtgttttcttattatataatgatgccagggtcaaaaggtctaagcccacatgagcttgctcatatgtgggtgaaagaccttaggacccgccccgatatgagcataaaagtgggatgataatcccacgatatgcgaatatagggtaggattgtgggagtgcgtagcacgaaacaatccgtaggcatcaatgaatggagagtataacatgcgtattcttatttgcgatgacgatttactgatcgtagaaaaactgcaaaaatatctgaaaagctatttcagtcatctgcacctgagctgtccggagatcgtctgcttttcagacggggagtccctgcttgcggatctgggagacaaggatatcctttttctcgatatcgagatgccggggcttgacggaatctatgtaggaaacgaactgaaaaagaaagataaagatattatcatttttattattacttcttattccgaatatctggatgaagccatgcggttccatgtattccgttatctgtccaagcccatagacaggcagcgtctgttccggaatctgaaggacgctctggatctgtatcattccagactggtgaaggtgcctattgagaccaggcagggcgtacacgttcttccggtctcttctatcattatggtggaggcacaggggaaaaaagtgatcgtccacaccacaacgcaggactttgaagccatccataccatgccatactggctggagctgctgccttccaaccgcttttttcagacgcaccggagttttattgtcaactatgagcacattaccgacttcgaccgtatgctggtgcatctggcgaacagtcagtttgacgcttatctgacgaaacggaaatacagcgcctttaagaaagcttatcttctctatttagaaagtacgaggtaagttatggaaagtattttttctattatttttgcatttctggtggaagccatcattctcctgcaatatgccagccgactattttctccgaaacgccccctgtccgacaggcttgtcgtgctgagccttttgtatacctgcctgtgtgccgtagccttttttaacatcaaatggctgaatatgcttttgtatctgtttactaattttctgtttctggtcacacaatacgatgtcaaatggcgcgcagctgccttccattccgcattgcttgctgctgtcatgggaatgtgcgagctgatcgtatatagcatcatcgcccggaccgctccccatttttatatgcagatgggttctttccacaatacccttctttttatcctgtgcagcaagatttctttttttgcagtcatttatctgattacgcatttgttcaaaagttggcagaaaactacagatccttacgatagttctgttgtgctgctgatgatcattcccgtcacatcgatattcatcatgcttacttttgtgggaatgggtgatcagtatacattgactcccgggacgaaccggatgatctctctcagtgcctttttcctgttacttatgaatctgctggtatttggaatcaatcagtacaatcgggaaaaaaatcggaaatatacagaggtgcagctgttactgcagaaggaaacagattttacggaatattataagatgctgctttcgcagagcgaaaaccaggcaattctcattcatgatattaagaagcatttgcaatccattgcatctctgaacgagcagaatgccccggacaaagtcaacgcctatattaacgaactgcttctctcttcggatttcaaagagtccgcccgcatctgcgacaacgaacttctgaacgccattatggcaaggtacaggcggcagtgtactgaacagggaatcagttttaccgctgacatccgcagtggtgtactgcattttctgccggacagtgaccttacttctcttttttgcaatttgctggataatgccatggaagctgccgggaaagttcccgacgcttatatcgaagttaatggcagcaagcgggaaaatacaccttttgttctgatcacagtggtcaattcctgccgcgtaaacccttttaaaaatgatgcggcagatccagccactaccaaagcggataagcgttctcacggcttcgggctgaaaagcatccgcaagatctgcgaaaaataccacgggaatatccaaatgtactataatgatgctactctgaccttccacacggtgataacgctccggggataggttccgttattcccacattcccgttacaaagcacatcagtgccgcccaggtatataagggataaaaaagtccctgatcatccacgccgtcttttaggattttctgtgcttcttctctggtcaacaataaaaagccgtcaaaacattccgtgccaacggcaccatcctggcttaccttcggcatttcttccctgttcagagtgatctgcaccagtgcattgctctcgtccgtcatgcccggggtgctgaataccaggggattcaccagacggatgctgtcactctcttccagtgcgatgccggtctcttcccgcaattcccggatggctgcatggaatacgggattttcctgtgctgcatcctccggatctaacagtcctgccggaacgcttaacaggaattgtcccgccgggtaacgatattcacggcttaagcagagtctcagttcctgatccttaactttcaggatcacgacacagctcaccgcatccggcagcatctgtttaaattcttcgtcattttttactgccgccagattctcaacgcttcttctggtggcatcgaaataatgttttcccggctcatattgcagatcaaataccttgatgaatctgctgtcatagacggtctctacctgttctttttttatgatcggtctgttctccattttcatttcctctttcccgtctgcagaggacctgttcataacgtctctccgcctttttccagtggatcagcttatgccacccttgcacataatccggtctgcggttctggtattgtaaataataggcatgttcccacacatctatcagaaatatgggagtatacaatttcagatccggcacatcctggttcgctgtggtcaggatcataagggtaccgtcctgatcacttacaagccacgcccatccggaaccgaatactcctatggcactctgcgacatctgctctttccattgtctcaccgatccgaaatcacggatcagtgcctcttccaatgttccgcagggttcctgccccacagggcttcgcatgctgtcaaaatacagctgatggttgtatacgccgcctccgttattgtgaatgctttcccgggcttcctcctgcaaggatgcaagtttattatcctccgaagtaagcagttccgtcaaggtcatttgctgtaactgaggataatccgcgagaattgcattcagcttgtccacataggtctgataatgcttatcatggtgaaaatgcagtgtctcctcatccagtaccggaagcagggcatcatattcgtagggcaggggctgtgcgacaaaaggataatgttcttctaacatgagactccaatccgcctgcgggatacaggcttgcgatcatacaatatttaccatacgcctattatatgccgcacttacggattttattttcggatttacacttttgcagtcagcgttcttctctttttgacataaatcaagcaggagagaaaatttattaaatattccctcctgctcaattccattttttatatttttacagctgtgcaatatccaccagtgtcagttccttgcaatcgttcatatgctccatgctggtcacgagagcattggcggtgtccattgcggtgatacagtagataccggtttcgatagcggtacgacggatcaggaagccgtctctggtcttgtcgcggccctgggtaggagtatcgatgacaaggtcgatcttgtgtcccaggatcagatccatcacggtcggggattcctgagagatcttgttgacctttctcgccttcacacctgcctcattgagagctgctgcggtacttctggtagcataaatggtgtatcccagcttttcgaagcgtcttccgacttcaatggcttcacccttatccgcatccttcacggtgatgatcatgttcttgtacttgggcagttctacgcctgctcccaggaatgccttgtacagagcctcattgaaggtcttggcgatacccagacactcaccggtagacttcatctctggtcctaagctgatctcggcaccacggatcttctcgaaggagaacacaggcatcttgatggcaaaatactctgcctcaggctgtaagccgggctcgtagccaagctcacggatggtcttgccgatgatcacttcggtagccagatccacgataggaatgccggttaccttactgatataaggtacggtacgggaagagcgggggttaacctcaatgacatatacttcctcaccgatggcaatgaactggatattgatcagtcccttgacatgcagtgcctttgccagtcttctggtgtactctgcgatcttctcttttactactttatcaatggtcggagccgggtatacagagatactgtctccggagtggataccggttctttcgatatgctccatgataccggggatcaggatatcgataccatcgcatacagcatcgacctcgatctccttaccctgtaaatacttatctaccaggatcgggtgatcctgtgcgatacgattgatgatctccatgaattcttcgatctcttcatcggagatagcgatctgcatgccctgtccgcccaatacataggaaggacgtaccagtacgggatagcccagtctgttagcaaccgccttagcttcctctgcggtgtatacggtaccgccggctgcacgggggatctcggtctcttccagaatcttgtcgaacagttctctgtcctcagcggcatctacatcctccgccttggtacctaagataggcacgcccatcttcatcaggctctcagtcagcttgatagcggtctgtccgccgaactgtaccacagcaccatcgggatgctcaatatttacgatagattccacatcttccggagtcaaaggctcgaaatacagcttgtccgcaatatcgaagtcggtacttacagtctccgggttgttgttgatgataatggtctcatagcctgccttggaaaatgcccaggtagcatgtacggagcaatagtcgaactcgataccctgtccgatacggataggaccggaacccagtaccaggactttcttacgtccggtggtctccttggcttcgcactcgccgccgaatacagagtaataataaggagtggaagctgcgaactctgcggcacaggtgtctaccatcttgtaaacagccttaatgccgttgtcataacgcatcttcttgatctcttcctcggtcttgccggtcagtcttgcgatgacgttatccgggaactcgattctcttggcttccttcagcagttccactgtcagaggctgtgtctccagtgcatgctccatctcggtcagaatggcgatcttgtcaatgaaccacaggtcgatctttgtaatgtcgtggatctgttcataactgatacccttacggattgcttcagcgatcacatagattctctggtcatccacgatcttcagacgctctaacagttcttctacggacagtgcgctgaaatcatagctacgcaggcagtccacatgctgttccagggaacggatggccttcatcagtgctccctcgaagttattgcagatactcataacctcaccggttgccttcatctgtgtggtcagagtacgttttgcagtgataaatttatcgaaaggcagtctggggatctttactacacagtaatccagtgtcggctcgaagctggcataggtcttgtgggtaatggcatttttgatctcatccagagtaaagcccagtgcgatcttcgctgctaccttcgcaatggggtaaccggtcgccttacttgccagtgcggaagaacggctgacacggggattcacctcgataacacaatattcaaagctggtgggatgcagtgcaaactgtacgttacatccaccggtgatctgcagttcgttaatgatcttcagagcggaagtacgtaacatctggtactccttgtcgctcagggtctgggaaggagctactacgatactgtctccggtatgcacaccgacggggtcgatgttctccatgttacatacagtgatgcagttgcctgcgctgtcacgcattacttcgtactcaatctctttccagcctgcgatacaacgctctaccagtacctgtcctacacgggacagacgtaaaccattctccaggatctcttccagttctacctgattgtgtgcgataccgccaccggaaccacccagggtataagcgggacgcagtaccacgggatagccgatagtgtttgtgaattccacaccgtcttccacgttctcaacgaccttggatgctgcacagggctcgccgatacgctccatcagatccttgaactcctgacggccttccgcattacggatggtagccgcggtagtacctaacagctttacattgtgagctgccaggaaaccggattcctccagctccatgccgaggttcagtccagcctgtcctcccagggtgggaagaatgctgtcgggcttttcctttataatgatctgctccagaacctttacattcaggggctcaatatataccttatctgcgatatctttatcggtcatgatggtcgcaggattggagttcaccaggatcacctctactccctcttccttcagggaacggcaggcctgggtacctgcatagtcgaattccgctgcctgtccgatgacaataggaccggagccgattaccattactcgttttacattaggattcttgggcatcttagttctctcctctcatcatatgaatgaaccggtcaaacaggtaaccggagtcctggggtcccggacatgcttccggatggaactgtacggtgaaaatgtttttgccggtgtaggacagaccctcgttggtaccgtcgttaacattgatgaatgcgggaaccgctacggacggatccagcttatcggtatctaccacatagccgtggttctgagaggaaatatatactcttccggtcatcagatcctttaccggatggttgcctcctctgtgtccgtatttcattttgtgggtatctgcgccggtagccagagccatcagctgatgtcccagacagattgcgaaaatagggatctcggtatcgtataactttttgatctcagcgatcacaccggtacactccttggggtctcccggtccgttacttaacatgataccgtcgggattatcatcaatgatctcctgcgcgggagttcctgcggggtatacggtcacctcacagcctctctctgccagggatctggcgatatttctcttggctcccaggtctaacagagctaccttcagtccctgtccggacagctccgttaccagtgccggcttaggctctctgacacctttttcataagcttctttatcaaaacgtgctgcaccggagagaggtccgttctgtgccagctccgtggtgggcgctaccacatatttttccttgcaggtcaccttttccacgaccttgcctgtggtatactccttcagtttcggaagtacttcgttcaggtcataggcttcgttggtggtgatcatgccgttcatggtacccttctcacgcaggatcttggtcagcgcacgggtatcgataccggcgatgccgggtacgccgttctcctctaagtattcctgtattgtgcagtcacagcggaagttgctgggaatacgtgaaagctctctgacgatgaatccatccggccagggtctctccgactcgcagtcatccctgcatatgccatagttaccgatcagggggtaagtcatgcatacagcctgtcctgcataggacggatccgtcaggacctccagatatccggccatggatgtgttaaatacgatttcactgatgatctctttgtctgcaccgatgtgcgttccttcgaacaccgttccatcttccaaaatcaaaaatgccttcattctttcctcacattctgccgcttttgcgacgtttgtatttctctcagtctcctacaatacctgcgaattgctccgctgggtatctgcattgtctacgatacctacgaattgctccgctgcttcgcagctcccgcacttctgaaaacattcggattccgcggatttgcttccgcaaatcgctgcatcctcatgttttggcgatttaaatcggcacctgcctccccatgcaagcacggtcggcctctgccgtttaaatctggtatctgcataatcgatttattatatcataaaaaaaaatgcgtcgcaatagaccctgtctgcataaaaacctacaaaaaacctctccgcaatcccgatactccttggagaatctgacaaagctgtgtaaaagcttacattttccattgcttttttcaccgggtctgatatagaatagatatgtattttctatttttcaattatcacaaaacgctgttttcctacagcagattggacaggcatctatggatcgtatcgaaaatgctcaaatgaactccctgggaacccgcaaactctattatgaagatgtacatcagacggatttcaccgctgtggtaatggaatgtgttcccgacaaggaagagggatattacaggatcgttctggacgcttccgcttttttcccggaagagggcggtcagtccgccgacaaaggcaccttaaacggtcaggaagtactggatgtcagcatcaaacagggcatcctatatcataaagcagcctgtgaacttcccgctggcacccaggtcaccggtcatgtggactggaaccgccggtttgatttcatgcagcagcactccggagagcatatgatctccggcttactgcactcccatttcggactggaaaacgtaggcttccatttaagcgacagagaagtgacactggatatgaacggagaagtctctctggagcagctgcgtctcatcgaacaggaggctaacacttatgtctggaaaaatcttccggtcaacatcaactggcccaccgccgaagaactgacgagcttaaattaccgcagcaaactggcactcacggaaaatgtacgtattgtcgagatccccggcgtggatctgtgtgcctgctgtgctccacatgtagataccaccggacagatcggtctcatcaaaattgtaaatgtacagagccaccggggcggtgtccgcatcaatattctctgtggaaaccgtgctctggcagattataccgaaaaacaggattctgtctgggcaatttcttctctgctctcagcgaaacagccggaagtagcaggtgctgttgcccgcgccaaagaggatgcaaggctgcaaaaagaacgcgccaacgccctgcaggcggagctgctgaacgtacagatggacgcacttccctccccggaaaaagtacgccacgtgcttctcttcgtcggtgaactggatgccatcgccctacgaaacgccgtgaataccctgaccggaaaatattccggttactgtggtatctttgccggagacgatacaaacggttatcgatttattgtaggcagtgcttcctgtaactgtcaggaactggcagaccgcatgcgccgggaactttctgcaaaaggtggcggatccgctcccatgatccaggggaatgttgctgtcacggcagataccctacagacaatgtgggtgtcgctgtaatgaccatcctttctgcctatatatgcatttcggcacatgaattcgtatcaatatttttacatgaaaacccccggcatgaccatctgtcatactccgggggctgtttgtatattttatatatttttcgtttcagaaaatctgattatttctcttctgttgctgcattcttcttcagcgctacgctgactgccttcgcaacgccaccacctactacacagctcatgggcatctccagtgctccgttgataccacagaatgctacggcgaacataaacagattcgctccggttgcattcatgctctgcagatactcggtatgaccgaagcagatcatcagagtggacataaagaacagggtgttcataaatgctcccagcagaccggtcacgaagtaagttacggtcttcgtcttgtcaatcttccacagtgccttgaagatcacaccggacagccatcccatcagagttctggtggggatgcataccaggaaagtgaaaaacggattcattgctaccaaagctgctccaaaaggatctcctgcaaagcactggtaaaagctggtaagtccaaataccagtcccagtacggctccgcctgcgggtcctaagatcattgcaccgattactacgggaatggtcatcagggaaattgctaacggtccgatgcgcagatacccaagcggggtaaacgccagaatcagcatgatcgcgatgagtacggccaattgtaccatctcaagtgtcttgttttttttcatatgaaatttcctttccgcgctttttgcgcctttgctactattcctccatctggcgtcctttggactgccggaggatataattacaagtcattcaagaaaataacataaatgtatacaaaacacaagtacattttttaatacaatcaacgtacggtgcgataccacttcaacgccgatgtataggcttcatatactgtattcatatcaatattctttaatagcatcaggcgggatacctccgcccagttggctgtctcatactgcagcataaaatcgtacaccggtgccagtacgccgatgcggtagatcagtgcattgctgatctcgccagccacatggaccaccttcaaagcctctgccatgggtttctcgaggatcacatccagcacggagaacaatcccatcaggaataattcatccttctgcgccttcaggccaaacgcttccgccagattctcggcaaatttcgcacgaagcagagataatctggtgacctcattcggcttatccgcatacaaagcattggctactgccgtgttgatccactttttcagttcccgctgtcccagcatggcagccgcatgacggatagacgtaatctccgaatttacagccagtggctgaaccattttcagcagatcgatcgtgagtgcggtatcacggctgatgatatccgccgctgtcgtgagttcaaaatccgggctgttcacaatattcagcaggtcaatatagttacccttcaagggtgccacatctgtctgtcccttcgtaatgggaacacgatagaacttaccctcatagaaacgatatccaccggtctccttcagtctctcgaagtcctccatggtatcaatattaccggcgcacagactgatattcgggaataatttcccgaaataaatcttggctttatcaatggctattttacggttattcagaaggacataatccatcagcttcaggacttctctgtaattttcaaaatcactgaccgcaagcttgcgaatggcaagtttatagccttgctgtttcaattccttcagacgattgacatacatttcaatcggcggaatagtattatcgatcaaaagtacgattttttcatgaggtgcatcgcactgctccgtaatatccgcaaaaatagaaatattggtgatcggtacaaaaatctcttttccctgagacaatgtatcgattcccatcttttggatcaattccaatccggtgatctgtgatgctccgtcaaattgtgctgttccaagcagcagcggattcaacaaataattctctctctgggtaaaaaaggaataggcacatacggccattttttcatcaaaaagcggtactaatgtaagcagcatatttttacctcccaattacttatattataccgattccgacaggactttacaagtggtactatcagcacagagatgttgtaacttgagagtttacgaaccatgcaaaaatagaacggaatacctcggtgggagcttgctcacacaagaggttattttgttctatttttataccgtgcgtccaatggacacactcgacagccgtcaatgaaataaatgtggagtgccctttgcgacacatttatgaattgagtgcatggctcgtaacgtagggtcgccgtagactggacaagttccgcctgtgcccattcttccgcctcagtgtgggcacaggagataggatcaagcttctctgtacccttcttccgcctcagtgtgggcacaggagataggatcaagcttctctgtacccttcttccgcctcagcgtgggcacaggagataggaacaagctcctctgtacccttcttccgcctcagtgtgggcacaggagataggatcaagcttctctgtacccttcttccgcctcagcgtgggcacaggagataggaacaagctcctctgtacccttcttccgcctcagcgtgggcacaggagataggaacaagctcctctgtgcccttcttccgccttcgcgtgggcatagaagataggaacaggcttctctgtacccttcttcctcaacgtgaatagtttatgggtatgagaagcttgttttgttgctgatacccactctgtggaaagtttatgggtatgggaagcttgttttgttgctgatacccaaattatgaaaaacggaaggtataacaagaaaattatatattccagaatgcctgctgcaggcgttcgtggggtctacggcagccctacgttacgagccatgcgctcaattcataaatgtgtcgcaaagggcgctcaacatttattggcaattctccgcaatgagccacgctattcataagattgtcagcaaaaggcgctgccaatcgcatttctcttcgcggcgttcgccgcatcacggcataagtaaagacagcgatttgtgcgctagcgcccaacgctgtctttactatgcctatgcgcggctatgctttcgtaactttcaatttatttaaagtactgcacgccggactcgaagatcttcatatcctgctcaccatagatattcatggctaccgcaacatctcttctctcggaatgtgccatcttaccgaagcatctgccgtcgggagaggtgataccctcgatcgcacagtaagatccgttgatgttgtactcctcatccatggatacgttgccgttctggtcagcgtactgggtagcaacctgtccgtttgcaaagagcttgtcgatccattccttcggtgctacgaaacgaccctcaccatgggatgcggggttacagtaggtagcacccagcgtagcgccctgtaaccagggagacttgttggatacgaccttggtgtataccatcttggagatgtgacggttgatggtattgaaggtcagggtaggagaatcctccttctgaccggtgatctcgccgtaaggaaccagccccagcttgatcagtgcctggaatccgttacagatacccagtgccagaccgtctctctcatttaacagcttcatgacagcttccttcagcttcgcattctggaatgcggttgcgaagaacttcgcacttccgtcaggctcatcacctgcagagaagccaccggggaacatgatgatctgcgcctgtgcgatagacttctcgaattcctctacggatccgcggatatcctctgcggtcagattgcggaatactcttgtctccacatgagctccggcacgctcaaatgccttggtgctgtcgtattcgcagttggttccggggaataccggaatgaatacagtgggctttgcaaccttgtgtttacatacatagatactgtctgccttgtagacatcgcttgccactgcctcagtacccttcactgccttggtggggaataccttctctaacttggaggtccaggaagcaagtgcctcatccatggtgatcttcgcatcaccgtatacgaatgcaggttcctcggtcacagtaccgatgacgatgtaatccagctccttctcttccagcgcagccagtttgtctgcgggaatctctgccaggatatcgcccagtccgttgtcgaacaggtcgtctgtggtaacctcatcatcgatcttcacacccagcttgttgccgaatgccatcttggatacggctgctgccacacccttggaatccagcgcatatgcggatacgatggtgccgttctcggtcagctcgtggatcctgctatataattctgccacattctcatacatgggaatgtcgaaatcatctttgtcaatagagaagcgcaccagcttgctgccgggtgtcttcagttccggagtgacgatgtcaccggattttgccacatctactgcaaaagataccagtgtgggcggtacatcaatatcattgaaggtaccggacatactgtccttaccgccgatggaaggcagaccgaaaccgatctgtgcatcataggcaccaagcagtgctgcaaaaggctggctccaacgctcgggatcaccggtcattctgcggaagtactcctggaaggtgaaacggatcttactgaaatcaccgccggaagccacgatcttcgccatggactctgtcactgcatagacagctccgtgataagggctccaggaggacaggtaaggatcgaagccgtagctcatcatggtcacggtatcggtcttgccttccagtacgggcagcttggctaccatggtctgggtctcggtcagctgatattttccgccgtaaggcatcagtacgctgccggcaccgatggaggagtcgaacatctccaccagccccttctgggaacatacattgaggtcgtttaacagtgccacccaggcacccttcacatctccctcttccagcttctcgcctactgcgggaacggcccatttatcgaaataattctcttcttcagaaggaatatctacttttactctggtctcctggtgcgcaccgttggtatctaagaaagctctcttcagatctacgataggcttgcctctccagttcagtaccagtctcggctcctcggtaactaccgccacgggaacagcctctaagttctcttccttggcatagtctaagaaagtatccacatccttagggtctacgaccactgccatacgctcctgggactcagaaattgccagttccgtgccgtccagtccggcatactttttaggtaccttgtccagatctacggtcagaccgtctgccagctcaccgatggcaacggacacaccgccggcaccgaagtcattacattttttgatcagacggctgacttcctcacggcggaacagtctctggatcttacgctcggtaggtgcattacccttttgtacctcggcaccacaggtctcgatggaggtatcggtatgtaccttggaggatccggtagcaccgccgcagccgtcacgtccggtacgtccgccgagaaggatgatgatatcaccgggatcggaggtctcacggatgacatttttgcggggagcagcgcccataacagcaccgatctccatacgctttgccacgtaagagggatgatagatctcttttacaaatccggtagccagaccgatctggttaccgtaagaggaataaccgctggctgcgcctcttaccagtttcttctgggacagcttgccgtgaagtgtctcggatacgggaacggtaggatctgctgcaccggtgacacgcatcgcctgatatacatagccacgaccggacagaggatcacggatagcaccgcccaaacaggtggcagcgccaccgaaaggctcgatctctgtaggatgattgtgggtctcgttcttgaaaaataccagccactcctcggtctctctgtggtcgccgtaatccatctccacgggaaccactacggagcaggcattgatctcatcagattcttccatgtcgtcaagtttgccgtcctttttcagtttccgcattgccatcagcgccagatccatcaggcagacgaacttgtcctctctgcccttaaaaatctcttctctggtatccagataactctggtaagtggtctctaagggagaacgataatagccctcaccaaattccacgtcggtcagttcggtggaaaaagtagtgtggcggcagtgatcggaccaataggtatccagtacacggatctccgtcatggaaggatctctcttctcatcatcgtggaaataattctgaatatgtttaaaatctttgaatgtcatggcaagtcccagagattcgtacagcgctttcaggctgctttcgtccatatctctgaaaccatcaaaaatagcaacatcagcgggatcatcatacaccgtgatcagagtatccggcttctccatgccggtctctctggaatctacagggttgatacagtaagatttgatcttggaaaattcttcgtcggacacctgtccttcgatcatataagtcacagcggtacggatcaccggttcctcgtcctcttttaagaacttcacacactgcactgcggaatccgctctctgatcgaactgtccgggaaggaactctacggaaaatacttttgcatccgcgggaatctcgatggtctcttcatacagatcatctacgggaggctcggaaaatacagtcttgcaggctcttgcaaacacctcatccgaaatattctccacatcatagcggataaactcacgaacctttgccacatcgatgcccagataatttttcagttcatcatgcagctcttttgccttgacggcataaggttcctttttctctacatagatacgtcttacgttgcccatgtctctcctccgataaaaattttatactatgcgatactattcagacctataaatataagtcagatgcccttacaaatgcgagcctttgacgtacatctgattatatttacatggttctgaatagtatcataccattatagcttttttcccacaatagcagaaaacaacaaatttagaccgattttacctgcctttttgagcggttcgtcattcgtgcagtctgtggatcagccgataggcaatatccttctcgctgatcagtgcctccgtatgggcaaaaaatacaatgccgtcggtgggtgccagaatggtctcccgcacagatccgtcgtaaggatctatgatctctgccatctcattgccgtagcgtacatcgtctcccgcatgtaccttcccccggaaaattcccgcccggttcgtatgtacatcgcttaagtccttttcatataatacatgactgatatagccggaatggctctcgtaccggatcagtcccatccgctttaagaatcgtaagaccgctgccacagcctgccttgcgcttgcctcatcgatctggctgttctggttcgtataaacagaaaaagctgccgtcatctcatcctgccagttataattcagggtcttggtatcaatgggcaccggttttctcaccaccacatagggcagtccgaacagatttgccagagaagtattctggtatcccgtctccatcatacgcacatgaggtacaaactctcccggccggtagaaggacgtaaactggatgccgtatacgtaatctttgatttccgtaagcagtgcattggtcagccggtcagccggttccccataatcattgcccggaaaactccggttaatgtccgcttccttaacgccgaaaaaacgtctgctgatgttcacggaataggcattaatggttgggatcaccagaatctgtttcccggcactgatgcagccgttattctccaactcccgcagtgtcttcaccagctgggagcagatatacatctgctggatctcattacctctggctgctcccacgatgcatgccgacttttcccccttgccgaactggaagccctttatatgcatatcttctctgtaagtcgaatgtatggtataaatatctctttcaaacataattttctcactccgtcaggattctcgccagcaggtctccttcatagaccaccggatatgcccgcagtgtaaacagaagtcctccccgttcggtacggatctgctgttttaccgtgccctcaaacgggtctactacctccccgatcagatctccctttttcacataatggttgtgctctatcaacggcaggaacacaccgtccaccgcgctgcggataaattccacttcgccgtcactggataccgcaggctcctgtactacaggttccggtccctcccagatgcccatttcactcatgatgtgaaaaattccgtccacgatctgattgccgaaggatctgtggatatcatgcccctgccccatttccagtaccagtgtgggaacacccagcagattcagggaatgcgccagggtggattcgtgcaccgtggcggtagcattcatccagatcatatcggcgttagtcattttcgcatagggaagcagggcctcggcgaaatcctcgctgagtcgtacctgtgggatctcacgcacgaaaatatcactggcatgcagatccatgcagatatccgatccaataatggaatccaccactgctgcagtgatccgctccatcatatcccccgaagcatctcccgggaacatgcggttcatgtccatctccagtctcggcaccgtgcggctcgccatatcgatccctaacggattcaatgccggatagatgtccacgatccccttcagatattccggatgctcctttactcttctcgccgtctcataacagatatactgcccttccagttcatctccgtggataccggagaccaggctgatccggcggcactgcttcgtctcctgctttggacagatccggttcctgcggattgccagatgccctcctgccggaagttccatactgatgatcgattctatcataacttacctctctgcttaccttcctttacagcgaaaatgctccaggaaatcttccctgaagcatcatcaaacgttgtctgcttattcttccacgcctaatccacgcaacagatacagaatctctcgatccactgcctctgctgtcacaccgatggtctgcgccgagatcttcagtccttccaggacaaacatgatatttctcgcggttccttcacagtcctcacacaaaaattcaccgttgtccactccggcttcgatcaatttctctatgatcttcactgcggaatcaaactgcttcttcagaatgttatcccgcttgggcagatcgttttcaaaataaaattcataggttgcctgtgtcagcgtattttttttacggagaagctcctttttctgctcctttaaaaacagaagaagaatatctgctgcggtagcatcctccgtaatgctgtcggaaaatacatcatccgcctcttcactctccatgcgcagcacttccataaaaatctgacttgtactctcaaaatacagataaagacctccgcggctgatatcgcaggcttccacaatatccttcattgttacttttttaaagcccttctccataaaaacatctctggctttttctacaatgtaccgctttttctgtactgatttttctcccatgaaccttgtcctgcctttccccactcagatcttaccgtttgccggtgatttatcccaaaattctataatttcctgcatctgtctgatgacaaggtagaaaatctgctccgataccgcttcactccacagattccccttggtcctgccgcctaaaacatacttcgacagaatgcctcttaagatgtcccattctttccagccggctttctgaatcatattccgttcgtcctgatgggtacagatccgatgtctggtatatatatatgcataattgcgatccatcagaggactcttcccggcttcccgcacgaaattcaaaagcgttccgtcatataccgggaatgacacagaatggactccgatatcctgcccgctgtacagcgaactggcttttttgccggcgctctgttccagccacggcaaatagggaagtaacggtctcaccgcctgcttatatgattccagcaattgttctctgtattcactgctctgttccataaccccaacatccctttccgtacaccgctttctactgaaaacatcactttttcttcggtcaatataaaagtgacacatatgtatttttattttatcacatttctatcaaaagtacagtagaaaattgttggtattatggtgtataattgattatcataaagtttccgaatgaagaagaggtactggaatggctggaattatattggagaagggtaaaactatatatagctatgggcagccaatgacggcactgcatctgatcacaaacggcagggtggatgtctcctatccgggcggttcttatccgctgggcaagggagatgtcatcggcatctgtgagatctgctccgagatccatctgctcagttacaccactctggaggataccacgatcctgacctatcctttgaccagtctggattccctgaacgatattctgcaaaagcatccggatgtagccaggctttttttattgtcctgttttcgacagatcaatattctgttaaaccgcagctcgatctctgagttaaactgcagtgagctctaccgcaccctgaacgatgatatctccacctataaatccctgtgtgaccgctatcgcataccggcacgttctctggagcatttcgatgaactcaatgcttttctgggagacgattcaccggatatctggctgaatgggtattacatgggtttaaaccatatcctggcctccgacaattaccgcatcatggttcaggaagtggatcttcccatcggcatgctccgcaagggaagtctggatttccggcgcacctatcagagtctggaggagcagttccattatttacagcaggtaggctctttttatttccgggaatccggcaacgatctgtttgatttctatacttcactttattataaactgggacagggcaacgaagacagtaagatcgtctatgaccggatccaccgtatgctctctaaggcaggagatctgtcgtatatcgatcaggatctgttcgcctcccgatcccagagcttccaaagcagcttagatctcatgggatctgcggattcctctgaggctgcagatggcggagactccgagatcttaggcaggctcgccggatccctgaacacgatcttagaatatgccggatcagacttagataccgtatccagcttccgccagcatgtgcatgcttataagctgctctccgaccgcagttcccaagatcaggaagttgcactgcttcgcaggcagctgaccgaagaattctacctgctgtattcgctcctgttcacccagacacttaaacagccggacattcccatgccggtgcggatgtttttatatttcggctatgtggacgaggaactggctggtctgaaaaatgcagtgatcctgtatcgtctggcggaagccatgaccgaccacagtactgccggagtctacactttttatgactggctgatggcgatcttccgcggacagaaatctcccagccggaacgaattcgatcaggattattccgactatatccataagcagaaagtgggcggcaacattactgatgctgagctgagagccctggagaacaatgctatggcaaaggtcaattacgagcttaagaatatgttcccccaggtcaataagatcactttcggacggatcaccacattctgtccgctgttctgtgcggatgatgtgctgaaagatctggaaaactcctatgtcaccgtatcccgcgtgtcgcagatcctcgaagagatccgcctggtggattacaccgctttctaccgggaaagtctggatatggcgcacttagatgtcatgggcaaggaaacaatacatttagaatatctgccggatatcatcctcatgccgaatgtcggcatccgcggtgtcatgtggcaggagatcgaaggtaaacgccggaacagtccgggacgtatggtattctccattttccacatggaggatctgaagactactttcacccacctcaccggagaattccgctgggagctgtgcaagagagtccagggcaaccgttggaacgatgtctccgtaagttccctgaccagcgaatatttcgattatattcagttctatcgcaagaatcatgatctgagcactgaagctaaggaaaaagtgaaatccagcttacagcgtgccaagaacagcttcaaagaaatgttcgtaagagattatatgatctgggtattgttcgaaggtgccggatccccgaggctgaacaaggtggcccgtcagatcatgttcacctattgcccgttcccggaggatatctgcaatacacttgcacagaatccgctgtatagcgagcttttagaccgtcgtaagatcaaggtggcacagggactgcatcatctggatgtgttgacccgtaagctgcaaaatggcaacatcccggttcccgagaccgtagagcaggagcgctattatatcagcggcagtaaaaaatcttaattccgacagcaaaaaggatccggcatctcgcatgtcgaatcctttttctatgtgctgtattttatgttctcacattaccattatgcatcagccagctgtctgcccagttccctgcatgcattcaatccgtcctcatccggagtttcatggcagatcagtccttcgccgtttaacaccgttgctcccgctgcttccatgcgggtggtccagtctctcatccactcaccgtctccccatccgtaagaaccgaacagtgcaatctttttcccggaagcaaagccttctacatcgcatacaaagggttccatctccgcttcttccagcacctccgcgcccatggccggacatcccagagcaaatttgggtaccgccttcagtgcttctatatccgctcctgtcacgaatactacttccgcttcttttccagcctcccggattccctctccgatggcttccgccattgcctgggtattgccaccctgtgtccaaaatactacataaatcttatccatttcattttcctccgttttccgcactttttgttccttttatgctgctgtacttccgcagatctctatgatctccgtcatttttaatccataatgcagcagctgaatcaaattttcctttgcatattcatatttttcaaaaagccgcagtttcctctctttatccgcatataccttccagtacccggtacagaggcaatttttcccacggtgtctgatgaatccttccacatcctccggtggataccccaaaagtaaccccagctcatggggaaaatcatttttggtttctgcataagcctcatacttttcgcacaagaccggcagaatatcttccagcagacaggaaggatacccttcctctgtcagcagcttctgtacctgcatcattcgcagatatttctccagccgttccttttgatacagcagtatgactgttttttcttccgtttccaataacggatacatggaaataaaacttcctgagatgatcttctctaccagacaaaagccgtccgatgaaatcgtcagcagattggatattttaagtcctgtaataagcggtgcgcactgcaatgccagctgcaattccacatcgtctgttttcattccgcacaggatctcccatgtttcctgactcaaaaattgctcacctcctgtatattgttttggttagttgctcctaactcatataaataataaataaaaaagcagctcctgtcaaggaaactgcctgatagaaattctcaaaaattctctacggtaacatccacccggaagcttccttcaccgggctgtacatcgatctgtccgtgattgcgttccaccagatcatgcagaatctccagtccatagccttttctccccggccttccgggaagcttttttgctctgctgttctccacgcagatatgcagatagtccccttttactgccgcctttacggtcaaaaacgcttcttctctctccgtcatttccgctgctgccacagcatttctggtcaggtttgacagtatactgcagattgccaccggatccagcttcagcttttggggaatctccagatcgtattgaaaggcaatccttttctcccggcaggccttctcggtctcccccatgatggcattgaatacagggtcaccgcaatagaggtattccgtcgtagccgccaccgtatcggtcaatgtctccagcattttttccgccttctcatattcccccctgatgcaacagctcctgcagcaccatctgctggttgcgcatgtcatgccggatcttggcgaattcttcccgcctgttttcaatctcatgatagtgattctcggcaatttcccaggtactctgtacctcgctgagacgaagtttcaactcctgcagctgttgctggcgaagcagggtatacaacaacacaccgtctgcaacggagcccagtatggccgctgccagtatccacccggtatacagcgtcatattccggaatacctgctcattgatcgcagtgatcataagcagctggctgacaggaaatacactgaacacaataataatactgacgtcaaatgattctttttcgacaattttcttccatacgaccagaaaaatcagaaaaaatatggctgtcactgtcaatactaccgataacaacaataccattgtcggtgtatagtaagacaatggtggcttttgctccatatacttgttcaaaataccgatactgagcatttccgccagcaaagctgtcagatattcgcatagcataaacagcactttctggcctatcgttcctttcagaaatacagctgcatatgctacggtgacgataccgaccgctatcatggtgccataacgaacaagcacattatcgttaaacaaaaatttcagtgcagctgccggcagctgtgctgccatcaggcccagaatgatgcctgtctgtctgacactatccctgcgcggttcaaacgcataagcaaccaccatgcagtccagccacagatacgcgatccacaacaggatacacattatatagcatatcatagcattgccctcatataacgaaaatatttatctctggaagcactgtatctggtcttgctgacaggaagcacggtcccgtcctgcagtgtaacctccttcatctcaatcctgcggatatactgcatattcaccaaaaagcttttatgtacccgcagaaaatccttgtgcagctttttctcatagacatccagcttttcatataaagagacttctccggaaattgtatgtatcaacagctgatgcgcattgctctctatataccggatctgactgttggcaattttctccgtgatccctccatgctgcaggatcagtgcctcgctgctgaatattttttctctgactttgtccaaaagcttttccagatgttccttccggaccggttttaccaggaaaccgcacagattgaccttctcccagaagattttctcagaaaatttgtcattatatgccgtcacaaaaataaatctggtctgtggactgcgtgcgttatattgcgccgcatacgctatcccatcctgctcattgccctcccattcgatatccatcagcacgagatcataacccatgccgttttccaatgcctcagagagctgagacagatcctggtagtattctgttctgctgattcccggatatcctgcaagcaaccgcttcatactatccaggcagcctttgtcatcatcacataccgctattttcatccggttctcctaacgatcatatgcgggcttactgtcttctgcggttcaatccgctcttcctataatattctgccttgtcctgatacatacgccgctccggttctgtcagaagatgatcaaatccgactgcccccagcgtattcactgcggctccgacagccatggtgaccttcttccggtcaagctctgtccgcagttcctctacttcacggtacagttctccctcctccatgcctctgcacagagctacgaattcatctccgccgatgcggaacaggtcgaattccttcaaggttccccgcaggcagtcacaggctctgaggatcaattgatctcctttcgaatgtccttcttcatcattgacacgcttcagaccggtaacatcgcaatacaccacaccaatcttcgtctgaggcagaatccccgacacatatttttccatggcataacggttcccaaatccggtcaacggatccgtatagctcatgatctccagccttctcacgagattacggcgtcttatggaagatacaataaaatgtcccatgatctgcaggatctccgatgcaaaatcgatatattttgccggagggttatccactccatagaaaccgatcactttttcatcatcatataatggtacgactactaatgaatgaatattctgtttcgacagtacttcatacatctcgggatctgtatcctggatctcgctcaggttctctgtcacaatattctgataccccgcgaacttctgataccactggtcacaaacctccggaggcagatcctgcagattatccttttccggtgtcacgcctttcgctgcccactcatatgtattatcatcatgaccatgatcatttttttcaaaaatataggtacggtctgcctccattgttttcccaagaagctccagcaatacctccaaagtctgattcggagtttcctgtctgagtgcaacacggatcgcctgattcattgctgcttccattttatggtaatccatagaggtttccctgtccccggaatgcccacagtcaatagcgatctccatgcgcagcattctgccatcgtcttccaccagggtatccttgatacggaaatccgtttttaccaccggattgtaatattcccattccttaaaatagccgggtctgagctgctcattattgcagatactgcagggagcggaattcccctgtaacacctcatagcactttaacccgacaatctcttccttactctgaaagccatagctcttcaaagctttttgattcatatatactaattgattcgtctccggatccgatacatacacatactcatccagatgttcaaaaaattcccatatttttcccatgtctaacctctttcatcccctcatacctaataatttagtatacactttcaaacgctttgcggcaagcattttctctcaaaaatacctgtagcaggcgcacatcgtccgtgacaattccatccgctccgctattcacgatctgccgcatggcagcggaagtattggcagtccagccatatacggattttccttcgtaatggatggcttccaccatgtctgttgtaagatttttcccttcgatgctatagctgtccgcataatccagatcatagtcatcctctcccagatcatgggcaatatatactgtggagatgtccggctccagttcctttactctctgcaggattcccctattcatggatcctatgatgcattcgtccaccatatcatacttctgaagcagcgcaagaacattctcctccagtttctgctcctgcccggtgtattttaattcgatcattaatgtgatccggtccccggcacaggcaagcatctcttccagtgtcgggatctgctctcctctgtatgctgcggaaaatgtacttcccacttccagtgtagaaagcacgtctgcctctgtatcccacacacagacatcctcgcccgcagtacgcttgaaattgctgtcatgcatcacgatcagtgtcccgtcggataactgctgtacatcgatttcggcgatgggggctccgtcccggatggcctgctttagtgctgcaagcgtattctccggtgccacctttgctcctgccctgtgcgccaccacgatcatgggagtgtctttaccggctgccaacacctgcggcagcacaccataggtcagaaaataaacgaacagaagcattacaattgctgttttccggattgttttcatcattttgccctcccacgatagtttatgatcacttttattgtaacaattgagcataaactccatgcgaggattttgttaattttttgtaaatattacgactattcagagccatgtaacttcaggtacggtattcggcggatgcttgcatacgcaagaatacctgcctgaagttatagggcgaagtaacgataatgagcaaaaagaaagcttcgcagaagcgcttttgcgaattagcgttctgaatagtcggtaagcccggataagcatttttacttccgaaataccactatcacctcatgcgcaaacagtggaaatgctgccagtacacttaacagaagccactcctgtcccgacagatgcgacgtgccgaaagcccggatgagaaatgggatctccgtcacggcaaactgcaggatgaaaccgatgatacatgctgccaccatcagcagattatcccgggggctcatggcaaatacggacttctgtacatcacgcatgccgatggcatgatatagctggcacattcccagcacagtaaatgcataggtctgcgatttcgccagtatctgttcccgggacatcagttccctgaggcgttctacccaggtaaacggattgcccacaagctccccttccaccgccaggatcccgcagggaagcaccagaaatgccgccagtccgatcacggtgatcaatgctccatagaacaacgtacatgctattcctcctctggcaaacaggctctccgatgcttttctgggcgggcagcgcatcaggcttttgctgtcatttttatccactcccaacgccagtgccggaagggaatccgtgatcagattgatccaaaggatatggctggattttaatggagatgccagccccattgccaccgccacaaacatggtcatcagttctcccaggttggacgatagcagaaaaatcaccgatttccggatattctcatagacacctctgccttcctcgatggctttttcaatggtggcaaaattatcatccgcaaggatcatatccgctgcctgtttggcaacatccactccggttcccatagccacaccaatgtccgccgcttttaaggagggggcatcattgaccccgtcaccggtcatcgccacgatctccccattaagctgtagccctttcacgatccgcaccttctgtgcaggcgtgactcttgcatagactcttaagtccttaattctctttaaaaaagaagtgtcatccagccgttccagttctctgcccgtaatacactggctgcggtgtcccgcgatccccagctgtctggcaatggcataggcagtatccacatgatctcccgtgatcatcaccgtagtcacccccgcatggcggaagatctccacggcttccccagcctccggtctggcgggatcccgcattcccacgataccaaggaacgtcattccctcttccccacctctgcagtcttcactctgtgccgctgccagtgtccgaagagagagggaattcatccgttccacagcctcacctatccgcttccgctgcgcggaggtcatgggaatgctccttccttcctgtaaaatatgggtacagtgctgcaggatcacatccggagcccctttggtataggcaatccctctcccggatctgccaccgggaagcctatgacaggtcgtcatcattttccgctcggaatcaaaggggatctcatcaaagcggggatactgccgctccagccgctctctctgcagaccgtatttcgccccaaagtctaaaagtgccagttccgtgggatctccgatgcgctgctctccccgcagcgaagcatcattacacaaaagcatccctctcaacagctccggcagaatgcggtgttcccctctgccacctgtccccgtgacatcctccatcacgtcgtaccaccagcatttctccacagtgagtcgattctgggtaagtgttcctgtcttatccgaacagaccacactgaccgctcccagtgtctccaccgaaggaagtcttcgaatgatggtgtgcactttgaccattctggtcactgacagagccaggcagatcgtgactactgccggcagcccttccggtactgcggcaaccgcaagtgagatcgctaccagaagcatctccggaatatttctatgttgaaataccgccagcaaaaacagtccggcgcacaaccccagagagagaatactcaatagcttccccagatctcccagccgcttctgtaatggtgtcatctcatcttccgtatccgtgatcatggaagcgatcctgccgatctccgtatccatgccggaggccaccaccagaccttccccatgaccgttcgtcaccactgtggacatatagaccatattgacccgttcggttaacgggatctcttgcctgcagtctgccaggaacagggcatctttctccaccgggacggattctccggtgagcgcggattcttccacctggaggttcgcacttctggtcagtctgatatccgccggaacccgtgcccctgcctccagctccaccagatctcccgtcaccagttccgccgctgggatctctcttcggatgccgtcgcggatcacgatcgtccggggagtggtaagttttcttaacgcttccagtgcttttcgagcttttccctcctggagcattcccactagcgcatttaccaggaccaccgtaccgatgatcaaggcatcgctgacttctcccaggagaatggataccaccgctgcaatcaataatatgtagatcagcggatccttcaactgctccagaaaaagctgtatctttgtctttttccgcgcagctctcatctcgttcctgccattttgccgtaaacgacgaaaggcctcaccttcggtaagacctttcactgtgtcactatttagtttacttatggtttcctgtatattctgcttctcgaacacggctgctctccaatgcttgtttctatgcattgtatgcggaaatgtccggcttgatgataaccgtcaccgattatttctcgtttcttaactggaaagcatctgtcagttcgttcatgttggtcgcctgagcagacagttcttcactggtagcggaagtctcctctgcggtagcggagttgttctgtaccaccgtagatatctgctcgatgccctgttcgatctgggccatggcatctgcctgtgcattggattcttccatggctttcttggactcgttcgccagatcctcaataccttccaccactttctgcaaagcttccgccgttttatccgtgatctgatttcctttttcaatctcctgcagcgaggtttcgatcagttccctggtatgtaccgcggactgtgcactgtcatccgcaagcttccgaatctgttcagccaccacggcgaaacctcttccggcttcccccgctctggcagcttcaattgctgcattcagggacaacaggttcgtctgggatgcgatatcctcgatctcaccgataatatcactgatctgcttggaagtctcattgatccgctgcatggcatcggtcagtcccttcatctcttctccactggttctggcctgttgctgatattccattgccttctcataagatgctccgagagccttggcatttttctccacgatctcagtgacgttcgtaatggtcgcctgcagttcctccacagaaccggcctggtctgtagcaccctctgccagtccctgtgcggcatccgccatctgacccgcgccggcagacacctggcttaccgcatttttgatctcacccagtgtctcactgagcttatgattcagcttgcggatagactccagtaatccgctgaaatctcctatgtaggcttccctgcaattacttacgatcgcaaaattgccctcagacatttctcccaacagatagtccgtatcaccgattacctgctgcaaattatcggaaaggctggcggtcgcctccgcaagtatctgcagctcatcgccggtctctaccttcggtgccggagtatgcagatcaccctgtgctaacagctgtattctgtctgtgcactgtgccaccggctccccgatacgctgtccgatctgttgtgccttgtaaatgctgtatgccactgcgatcacaccgatcgcagcacctatgataatgcctgttacaacggaacccaggaaatccgtaaccggtgcatctacagccaccatccagccgttagtaccatcaatcggggcatacgcctgtaatgtataagcaccttttctgaaataggttccgtatcctgtctcacccttaagcatctgctgctctattttagcaattcccttcagtgagctgtctgtctgtgacaattcaatattatttttctgctcctgggcaatggcggaatcactatgtgcgatcgtaatacccgtagaccccaacaggtagcatccggaatgctcactgatagaaatggctgcgcaaatatcatttaagaactccggatccggtactacaaataccacgccgatgatctcaccgtctttatctccgccttcatagacgggtgcagatatgatcacgctgagttttccgtctgtcttggcaattacgggatccgataccaccacttctccctgcatggaccgtttaaaatactcacgatcattataatccgttccgtcagcggcacagataccattacttccgatcagcttccccctgaccattccataagcttccacgcgctgattaatatactcctgcttctgtgccggtgtaaatacagccgcggaaagctgatagctgcatcccagctcagatacgatcgtctccgataccgttaattcctgacggatccgatccgctgacagctttgcgatctcctgcatatcagccttcagtctgctcagggtacctgacagattcatgatcatagacacaatgaccaatgatacgatcgatagcaataccagccgccggattgccttctgcagccgctcgcggatcgtggtcttaccattggtctgacgcttttgtcccttctgtgtagtttttgcactcataatgtacctcttttctccggcgagatgtctctccaccttctcaagccggcatttttctgcaatgctgctgacactactgctgtatcaccattataacattttccgaacctttttgctaccttatgagtgcaaagaaagagttaatatttcaaaaaatatcaactctttccctgttttgtctgtttatttatatttttctgtcccattaggcagaaactttttgggatcaataaccaaattcttgtgcaaaatacagttttccacctgtctcatagacagcaatgctgcaggtcgtaaaatcgcctgccaggatattcgctgcatgggtgggagaagccatccaggcatctaccacgctctgtgcggaatcatatcccttcgccaggttctcaccccacatcagttcactgttcacggtataccagtctctgccgttcggtctggtatgagagaatttggaagcagcttcctgtgctcttaccatagcgcaggactccagtccgttgctccaggtaagctccgcaagtccattctctgctctcttcgcattcaccagtgccagtgcatcggttgccatggtgcgaagttcattggcccgagcaatctctgcttcgctcatgccggctctctgtacagatcctgccagtgccaccgcctcttcatcgaaccatacggttccgtcactgtccgccggatcacgactgacagaggacagatctgcattcctgccgcagcctgccaggctaagcatcatgattactgtcagaatcagactcatccatctttttttcatttgtttaccctctttcatgaattttatggtaaatatatgtcattactgttcttattgcttcttcttaaggataagccatgctcccagacctgtcaaggataaggcgaaaccaagattccatgcatcggaagcgtcgccggtctgcggccgtctcgatgctccgaggactgctctgtctgccaaaggtgtcggatcatcctcgatcgtcaccattctgcggcgtctcgcaccaagtacttgcggtgtctcgggtgttacaggatccgcaggggtacctggatcgtcaggggtgccgggatcatccggggttggcgtcgtatccggagcgcccggagtcggagtaggtgtcgggttgttgtcaggagttgtcgacggtgttgccgtaggcgttgccgttggtgttgccgttggtgttgccgttggtgttgccgtaggcgttgccgtaggcgttgccgttggtgttgccgtaggcgttgccgttggtgttgccgtaggcgttgccgtaggcgttgccgtaggtgttgccgttggcgttgccgtaggtgttgccgtaggcgttgccgttggtgttgccgttggcgttgccgtaggtgttgccgtaggcgttgccgttggtgttgcagttggcgttgccgttggtgttgccgtaggcgttgccgttggtgttgccgtaggtgttgccgttggcgttgccgttggtgttgccgttggtgttgccgttggcgttgccgttggtgttgccgttggtgttgccgttggtgttgccgtaggtgtcacggtcggcgtaggtgtcggtgtcacggtcggcgtaggctcttcactgggatgccactcatttccactaaagtgacactctgcttgcgtttgcaaatttgcagctacaattctacctgaattatttcctgcttcgagaatcaccttagcacatggtgcaagaatcgttcctcttgtagtagataaagtaatagttccatcatatgttccaaaattatacactaacaaatttgcattatctgcttccgggtaattatcaatgccagatgtgctctgtcctaccaacttaaaattattaccatcaggtgttatattaaatacaaccgttttaccgttttccacagctactttaggttcaaaatccgaaattccatttacgcgaaaaatattctgtccatcattcaaggaaatctcattagaactcaattccgttcccattgcatgcaagttttcagcatttgtacgaatagctgtaaatgctcctgccagatcgaactgacctctttcaatttttccaatctgctcagtggttcctacataaactccatttacaaaccattgattacctctttgctcaaaagaagctgattttagaatcagattagaacatctaatattggagcctgaacctgtatattcaccatctacataaatagtaccttttcctgtatagccaatgttattataatatttcaaactgcctgtgcagatattagcttcactgtcaccgctctgctccgtaattccctctacaaaaattccatagccattggcagctcctaaaactccagcaatatccacagtcaccgcatttactgtctcatttgcttccgcacataaattcattgtcagcggcatgataagacctgcacctgctgcctcttccggtgtaaccatcgtcgttgcttccggtgttacctccggatcagctactacattttctttcacaacagcgtcaccaccggatacagactcttcccctactactgtagccgcttcctctgcctgtaccgtaagtgttccgttccccgcaacagttcccactaccagcgctgccaccagaacctttacgattttttcttttacatacttactaagtctgctcatctgatttctccctttatgaaaccccatgtgttactcccaacgcacttaaacgttttcgttcttctttacatctattaagactatggatctcataaaaaaggttcagattttttattaaatttgtgatttattgcttatttttgttctctggttgtccatttgtggtaccaatgtcctaataagcggccgtttctgtcagtactccatggagcagtgctcttcgtttcgtgcctgcggaaccatagcaggtagacagcgacacaatgttccccctgtcgcttaagtccgcatccgaggcatacagggaatgttccgtcgcccactgcacgtaatcatcgtaggaagcatccgaggtaaaggttgcgaagcggtcgctggtgcttctggtctcgtaataagcaaagatttcataaatatagaccttatcttccgtatagatataaaaatacggatcctccttacagcttaccgtccccttcaacagatttttaaaactaccgaacatgctctcatcccgcatattatgtccgaagacgaaggtgttccggtccgaccagtccgccgaagcctcacaatccatgaaaatacatccggcatttacactttctccctcaaaagagtgcttcagataataattgttgtcctcgccctgtaccaccggatagctgatatccagcgccggaaaataaagccatccccggaaatccggattggtcttcttgagatttgcaaaatcaatctgcagatctgggtagtttttcacctgtacttcttccgtctcttccacccgagggtcctccaccactgcctcctgtcttatggcatcatattcgtttttcgccttttgctccgacagataggaatacagactcatccctccggtgatcagaactgccgccgccagtattgctgtgatgatattttccactttcttattcttcatgtttgtcccctttttgcatctgtctgaatttactaatgattataacttatttttaagtattcgtctttacgaaagactcattttttgatatttttaagttgtgatcataaaaatattggggggaattatatcttatgatacatttttttgctatcctttcactgcttctgtgcggtgtctgctataccggtttccgaaaagaggaagacaaatgtaaattccaaaacattacccggttcgtctggatcattttcggggctgccctgctgcttcgtctgatccttgcttataccacccacggtttcggcaatgatattgcctgttttgctgcgtgggctgaccggatcttctccgtaggtcctggggcattctattccgcggagacttttaccgattatccgcctggattcatgtatgtcctgtatctcatcggagcgctgcgttccctgcttgggatcccttattattccagcctgcatatcatgctgttaaagctgcctgctattctgtgcgacatggcctgcggctgtctgctcttcagagaggcgtcaaaaagactgcatttttccgaaatgcaatctgtatgtgtagcttgtgcttatctgttccagccggcaatcatcctgaattcttcctgctgggggcaggtggattccgttcacacccttgtggtgatcctgatgtgcctgtttcttatggacggcaaaatgctcccggcttatgcaatctacggtattggagttctgttaaagccgcagacactgatcttcactcccgtccttctggtcggcattttggatcatgtatttttgcaggatttttcctggaggaaattttcttataatctgtgcggcggtctggctgtgatctgcggcatgcttctgttgtgcgttcccttcggtctggatgccgccacctcgcagtatacttccacgctgggttcctatgaatatgcggcggttaatgcctataatttctgggggctgttaggcatgaactgggtggaccagaacacgatctttctgttccttccctgccgaacctggggatccattgccattgtgctaatcgttctttttacttttctgattgccttgcgttgccgaaaagaaccttcacgctatttttgcctcggtgcttttatcattctgactatgttcctgttttctgtcagaatgcacgaacgctatatgtatccgggacttgcactgctgctgttctgctgtctgtataaacccgccggctccctgtggaaatgttatgccggtttcgccgcgctgcatctctacaacactgccaacgtgctgtaccattacgatccgcagaactatgaccgcaaggctcccataattctactggtatccgcaggcatgttatattgtctgtatgatttctacaaaatcatctggaaatattatattcatggggaaacggtgactattgtcaatggcgtaaaaaggcatgccggagcaagccgcagttcttctacagtctccggtgccggactatggcagctgttccgggaacattttctctcccccttagcgcccacaccttctaaggagcaggtgcgcttcacgagagtagacctgtgtctgttgctgacaatctgtgctctctacagcttttttgcactctatgacctgggcgaccgcaaggctcccgagacaacctacgatatgacacagaatcaggtcattgaactggaatttccggaaaatacagctcccgttactctggcaagttacatcgcgccctggcatcagcggcattttacggctgaagtccgtagctcaaaggccgaggactggacgtatctgggcgagatcattctgaataatgtcttcacctggcaggatgtgtctttggaagatctgacccggcaggcaggcgtaaccgacgcccgctgcctacgtctcacactgaccgatacggatgcgtctctgatcgagctggtcttcacggatgcggacggtgaaatcctgcgccctgtgaatgcctctgcttacgagactttgttcgatgagagcgattgctacccggaacgctattctttccgtaacagtatgtatttcgatgagatctatcatgcccgtacggcttatgaatttctccacggactgcccacttatgaaaatacgcatccgcccctgggcaaaattctgatttctgtgggtatcgctattttcggaatgaatcccttcggctggcggatcattggtactttatttggcatcgccatgctgcccttcctctatctgctggggaagaaaatgaccggcaatacccctgcagcggctctcgcctgcttcctgtttgcctttgattttatgcattttacacagacgagaattgcaacgatcgatgtctatatcacgttcttcgtgattgccatgtactattttatgtacagttattgctccatgagtttttatgacacgccaccacataagaccttcctaccattaggattgtgcggtgtctgcatggggtttggcattgcctgcaaatggaccggtgtctatgccggatgtggtctggcactgctgtttttcgcgcatttgttgcgtcgctaccgagaatacctttatgccaaagcacatcccggcaaaagcacaaacggtatcgatcataaatatatagtgaagaatttccctgactatacgatcaagaccatcgatttctgtctgacctttttcgtattgatcccggtagtgatttatctgctgtcctacctgccgtttgtgaatactactcatcccggcctgcttgaccgtatgctggcgaaccagacttccatgttcaattaccacagtggcctggaggcgacacatccctactcttcctcctggtatgagtggccgaccatggtacgtccgatctggtattattcgggatatgtgaccgatgcaatcaaagaggggatcagcgctttcggcaatcctgctgtatggtggatcggtattccggcatttatttacatcctgtacctgttaattcgcaataatgcgtttctctgttctctgacaggacacacaaaaacagagagctccacagatactgcaattaccctgtcccacagagaatatgcaacagctgcttttctggcagtcggctacctggcacagtacctgccctggttcttcgtcaccaggatcactttcatctaccactatttccccagtgttccttttgtagtgctgatgatcgtgtacagcctgatgcagttgaagaagcatatgtctgaccgtaccttcaccatcgtctgctgcgcttacgccgcggtaacattggccctgttcctgctgttctatccggtattgtccggacagccggtggatgtggatcttgttataaaatacttacgttggaaaccgacctgggtattgatctcgggttaaatgaaaggcaagagactattatgaccattcttctgaataccatcttcattttatttataggaatatggtttgttcgcttttttgttgaaatggatgttccggaaaaatacagagtttctcgattttttcaaaatacaacagactataaaggagaaggtctgacgaaaaaagacgttctccggattctgtttttggcttttctgatccgtgtactgatatattttgcaagtgtgcttatctatttggtgcaatcagattttttatcacatgcagctgcattttcctggaatgattttttcaatctgtggaataaatctgatgcccagcattatcttgatctcgcggaaaaaggatatgtcaattgcacagaagtaacggaatggtctggcagagaagagcatctatttctcgtcttcttcccgttatatccctggttcatccgcttctttcacttttttgtgaacagttatgcggtggctgcatttgctgtttccatcatttctttttgtgtgggctgtgtctttttctatggtgctgtaaaggaggaatacggagcttccattgccgagaaatcattgactttgttattgttatacccgttttcttttttcttcggaggaatcatgacagagagcttgtttttctgtctgatttctgcgggttttttctatatccgcaggcataaatggctgattgtggggctgattgggcttttagcatccctctgtcgtattcagggtgttatccttttaggcgtcggtatagttgaatttctaatatcttctcaactaattcggatgattcaggaggggcagttcaagggctttctgaaatacttttttacagaggccgtctggctgtttctgattcccatcgggaaccttgtgtacttagggcttaattatcagatcaccggcaatgcttttcagttcactgtttatcagaagaatcactggtatcacaccactacctggttcacaaattgtgtagcggaaattatgcgttatatttccggtcaggtctctgataccacgcttctcatatggtatcctgaactgatcctgttcgttgtggctgctgcactgcttctctattctctccggacccagccgctgaaatacagtgcctatctcctggtctataccctgatcaattactctgtcacatttctgatcagtggtgggcggtatatgctgaatgcacttcctctttttttctttaccgccgcattacttaataaacacaaactgttgtatcaattgctgtgttttgcatcagctttattatatgggatttgctttaccgcttttctcacgggtggtgcgatttattgattttgtccctatttacatttgtgtgtctgatttatcaacagtataattatacatttcacgaattgcgtatgcaattagaaaatcaagtagtccaaatttaaatacaataccataaggctttccagataatctgggaaacagtagtaatgattagtggcatttcgtaccagtatcaaaagcctttgaccatatatttacagaccaagagctttacgaagaatacaaccttactgatgaagaaataaatatcatagaatcagtcatcaaagaacgaaaataacaataccctttgtcatgtggtaaaataaggaaaaacctattatgaaacctaatggaggattggacatgaaaattttgaaaagtattcttaattatattccattagccacgtttatcatatttgtggttactgatggaattatttctttaacatcggcattaatttttgttatttccacgattggtctactgattaattggaaaagaaaaaaaccagcgatgaagaattaagaaaattccaatttatcaattacaggtgacattgaaagagtcagcccattcaaggtgctggctctttcaaaattccattctaataaattgcacgacaacttataaaaaaatatgctccacattatggaaaaatgtatataaatgtataaaagtatcaaaatcgaataattataaggacttatgcatcagacacacttttgtaaaaagggagttgattttctcacagaaaatattgctgtatcatattttctacgatgttagattttagaggagcctcttccgattcataggtggccagtagtgtatccgacagcataattccatttatgttatagagctgcattttccgaaaagcaacctgcgcataattttcattatccatcataccaaagtgctcccagtaatagatttgtcctgttaccgggtgccttatggtaaaatccggataaatcaccctttttccaaggtgcaatgcctcttcataatgaaaaggaattttgttcacatgcaacatggttgcaatgattgcctctgatttggaacgcaccttctgaccattgaaaataggatgaatcagttgttccggatatttagggcatctctcataatcctgcttttcccattcagcaatttctgtatttaccgaagtaaatacttttttcaaaagttctgcatataccgcagtctcaagcagctgttcttctccggtttgctctttgttacacaagtccaaataactttgtattgctcgtttttcttggactatatcctgaagcattacttcataatatttcttttccgccatagagacagcggtatttttttgattgctgggaatataaattttctctccatcacaagatatataccatttcttatgcttaccgttttgagaatagatcagtttacctgccggatatgtctgcagtcgttccaaaatgtttttttcccgttggtccagcacttctttttctcttagcatctggtgatatagcatgacttcgcctttctcttattttattgtgatttgatcagttactttttgttgaaattctgctgaaaccagctggattttcacaagagttgtaaatagagtttcatggtcagatgaaatgtactaatattacatcatatttctatctaaatgtaaacattcatttttcataggcacagcgtaagctcctggcggcgtctgtgccctccttgttccatttcgtgggaacatcatgagcttgcgacggtggctgtgccctccttgctccatttcgtgggcacagcataggcttgcgacagtggctgtgccctccttgttccatttcgtgggcacagtgtgagcttgccgcggtggctgtgccctcctggttccatttcatgggcacagcacaggcttgcggcggtggctgtgccctcctggttccatttcatgggcacagcacaggcttgcggcggtggctgtgcccacgtccggctccggcagacacaaacagcacatatccataaaaaaacagtgtccggatcacatcttccctgatccggacactgttctctataatcttttgaatttccttacccctcggcgatggcattaccggtatacaactggtaatatctgcccttctgggagatgagttcatcatggttgccgcgctcgatgatgcgaccctgttccaggaccatgatgcagtcactgtttttgacagtggacagtctgtgggcgatgacaaaggtggttctgcccttcatcagcttatccatgccgtcctgtacgattttctcagtgcgggtatcgatggagctggtagcctcatccaggatcagtaccggaggatccgctactgcggctctggcgatggacagaagctgtctctgtccctggcttaagttcgcaccgtcaccggtgaggactgtgttgtagccatctggaagctgacggataaaggtatccgcatttgctaacttcgctgcggcaatgacttcgtcatccgtagcatccagcttaccaaaacggatattttccataacggtagcggtgaacagatgggtatcctgcagtacgatacctaaggattttctcagatccgctttcttgatcttgttaatattgatgccgtcgtaacggatcttaccatcctgaatatcataaaaacggttgatcaggttcgtgattgtggtcttaccggcgccggtggagcctacgaatgcaatcttctgaccgggttttgcatacatctcgatgttatgcaacacgatcttgtcatcattgtagccgaagtccacatcgtcaaatactacttcaccctgtaactcaatataatctacagaaccatccgcctgatgcacatgcttccatgcccacataccggttctctcgggacactctacgatcttgccgtctacctttttcgcacgtaccagagttacatagccttcgtcggtctctactttttcatccagcagatcaaaaactctcttagcgcctgcctgcgccatgacgatactgttcaactgctgactgacctggctgatgggcatgttgaagctcttgttaaaggttaagaagctggccagcttacctaaggtcaatcctgcaaagccgcccagtgccatagcaccgccgacgatagcacataccacgtagcttaagttacccaactgtgcattgataggtcccatcaggttggcaaacttatttgcattataagcactttcgcacaactcgtcgttcaactttttgaactcttccaggctcttgtcttcgtgacaaaataccttgactaccttctgaccttccatcatttcttcgatatagccattcacggtaccgatattcttctgctgctttacgaaatattttccgcttaagcctgcaaccttaccggtgacaaacatcatcaatgccaccatgatcagactgactgctgtcagcgggatactcagtaccagcatacttcccagcgtacccactacggtaataaaactggaaaatacctgcggtatactctggctgatcatctgacgcagagtatcaatatcattggtgtagatggacatgatatccccgtgggaatgggtatcaaaatacttgatcggcaacttctccatgtgttcaaacagatcatcacggagactcttcaaggttccctgcgttatcgtgaccatgatacggttgtaagcatacgtagccgctacacccaccaggtaaaagcctgccacacggacaatttcccggaacagattgccaaagtccggagtctcctgtccgatcatgggcaggatgtagtcatcgatcagcctctgcatgaacagagtaccctgaatgcttgccacaacgctcagtacgatacagatcaacacaaaaatgaagtgaatggcatagtttttgaaaatatatgccatcagtcgtttaaatacttttcccggattctcaatacgtttaccaccctgcattcttctgccgggtccacgcattccgccgcccataggtcctggcattatgactcacctccattctcatcaaagtcgccgccacccgtctgggtctgggcttcatatacttctttataaatgttattggtacgaagcagttcttcgtgaggtgcgaatgcatcgatcctgccgttatccattacgatgatgcggtccgcgtcctgaatactggagatacgctgcgcgatgatgatcttcgtcgtaccggggatctccgtggcaaatgccttgcggatcttcgcgtcagtagcggtatccacggcgctggtggaatcatccaggatcagtaccttcggctttttcagcagtgctctggcaatacacagtctctgcttctgtccgccggatacattgcttccgccctgctcaatataggtattgtattttccaggcatcttttcaataaattcatcggcgcatgccagacgacaggcacggatacactcctcttcggtagcgttctcgtcgccccagcggaggttctccaagatcgtaccggagaacagcacgtttttctgcaataccacagatacctcattacgtaaggtttccagatcatagtttctgacgtccttgccaccgacataaacggtaccctcattgacatcatacagacggctgatgaggttcaccagactggtcttggagcttccggtaccacccaggataccgatggtctcaccggctttgatctcgaaattcaggtcatctaacaccggcttttcactctgtttattataacggaaggttacatgatcaaaacggatgctgccgtccgtcacatcataatcaggctgttcgggattcgtgatgtctgccttctcttccagtacttccgcaatacgtttggcactggcagcactcatggtcatcataacgaagatcatggctaacatcatcagattcatcaggatcgtcatacaataggtcagcagactcatcagttcaccggtggtcatctgactggcaacgatcatgtgcgcacccagccagctgatgcccaaaatacagccatatacggtaaactgcatgacgggccagatggtgaccatcgtacactctgcctttttgaacatcttgtagatgttgtagctggccttgtggaacttgtcgatctcgtagtcctcacgcacataagcctttaccacacgctgcgccgctacgttttcctgtacgctggcatttaagtcatcgtattttttgaatacttcactaaagtatttcgatacttttttcataataaaaatcatgatgattcccaaaaataccacggctaccagatagatgcttgccactttcgcgttgatcagaaacgccatcaacatggcgcagatcaggctgaccggtgcacggaagcacatacgtaagagcatctggtaagcgttctggatattggtaacatccgtagtcatacgagtgaccagtcctgcggtggagaacttatcaatgttagagaaagagaaggtctgaatgttctcatacatggcttctcttaagtttctggcaaatccggtggatgctttcgcaccgtatttaccacccatgacaccggcgaacaatccgacaatagctgccaggaccatataacaaccgatgacaaaaatatgtttcatatctcccgcctgcacaccgtcatcaatgatcgatgccatcaggagcggaatcaccatttccatggctacttccaggatcatgaatatgggtgtgacaagggatgcacgcttatattccttgatctgtctggctaatgttttaatcatagctgatttcctttctgcttatttgttttctctgcgcacttaacagtctctgcgcaaatgctcgttcttcctttgtccattccgagattatccatcatcttatctaagatattcagaaatgtctgcttttcttcctctgtcagcccggcttccagttcccgattgaaattcaggatctgttcctcaatgacatgatgatgttcgattgctttttccgtcagcagaattctcttcaatctgccgtcttccgtggaagccacacggactacatagcccttttgctccatgctctgcagcattaccgttgcggtggatctccggattctgaattccttctccacatccttctgatacacatcgccgtgtctgctcttatgatacagatagcctaaaagcggtctctgcatgccgataagttcactgccgtcctgctgggcaaatatggagtccatcttcctgcggatcatattgttggcggccttcagttcgaatccgatctgacgagtcgaaagcacttttgcctcctcgtccattttacctcctttgatttataacaaaataatgttagtaagctaactatttttgttagccaactaacattatatcgcaatacttcttctttgcaagaaaaaaagtataaactttatataaaatacaatcaggcaaatttttgacctttacacgcttgcatttatctggtttaatttaatcatattttctatttgtttcattctttttgctattttcacatcattctattttcaaggaggttcccctatgtttcaacttttcacagatcttacaaaaaaatcccctgcaatcgatcaaaaaatcaatgaaattcagaatcaattaaaatgtttgcccgaagggaaactaacaatcgcgcataacggaaaaaacaccaaatggtatcagtctgacggtcaaaacagaaaatatattccaaaatccaatcgtaccttggcggagcaattagccttacgtaaatatttatctctcgtgctggaagaattgcttcaagaaaaaacagcgatttctttttataacagacatcgttccatcgaatccaaaagtgccttattattacaagactcttctctcggatacagcgaattactgtcgccttattttcaagtgccgccttctcatactgcctggcttcaggagaattatgatcgcagttccaggaatccggaaaatctcatctacaaaaccgtaaacggaattcttgtacgctcaaaatcggaggctttgattgcaatgttactctatacaaataaaataccgtttcgttatgaatgcgcactgactctcggggacatcaaattttatcctgactttaccatccttcatcccaaaacagaccggatattttattgggaacatttcggtttgatggattctcccggataccggcaaaacattttctccaagcaacaagtctatgcaacacacggtatccttcccactattcaattactcacaacttacgagagccagatgcatccattaaataccgaattagtcgaaaaaatgattcaatattatttcttgcaatgatagtcggaagcttcttatttcctctcttctttttatttgcaacttgattgctttttatgaaccgaattttcatttttgtattttcatgtaatccaagaaacgctggatatcatagtcacttaataacacatgggtctatacaaatattttctttcattttgttccacttttttccttcttttgctacctattttaccacacatgggtctatacagaaaaatttcattcccagatactcatttatccaaaaatgagtatctcagacgacaatttttccatatagacccacggtacttgtttttccacttgatattcgctattttgagtatctctgagcaaatttttttcgtatagacccacggctcttggtttttcacttgatattcaccatttcaagtatcacagagcaatcagcaccgtatgaatatcacccacgccatcattcggattttccagcaaattgtcaatcctccagtacccgattcagtacttcatcctccagcaccagctttttcgcggcttcgcggtacttttcctcatggagataggtatggcggtgcggtttgatggagggtgccatgtcgatggctttgaggaaatcggatctcttcatatgtaaagttgccacatagtcccagaagccggtatcctgaagcactgtgctgacacggatatagcggtgatcctgtacctttgccataatgtaggtggcaatgcctacctggataccatgtaactgcggtacttccagaatcttatccagtgcatgggagatcagatgctcactgccgctggtgggagcactgctgccggcgatctcattggcaataccgctcatggccagagaatccagtagttccttcaggaacagctcatccttgatgctctcgtaaggggtacggacaaagctgttcaccgctttcttcgcaatcatgaccgcaaaatcattcacttcgccgcagcctgccttctcttcaaagatccagtcgtagagcgctgtgatcttggagatcatatcgccgatgccggagtaaatgaacttctccggagcggtacggatcacctgcgtatccacgatgataccatatgccagtctcgcaggaacagatgtcctcttcccctgtaccaaaagagaggcactggcactggaaaatccgtcactggagctggaagtcggcacactgataaaaggaagattccgcagaaaagccgcatattttccggcatcgatgaccttacctccgccgatggagatcacagcctttgccttattgggaatggcaaaagccagcgtaataatatcatcaatatctactgtgtccagttcattatattccaggacattcacttctgcttccttcagggaattcatcaccagttccccaaacatgtcaatcagtccgttgccgaaaaataacacgacctggtctagattctccgccttcaaataaccgccgattttgcctaatgcaccgtttccgatcttcaaaatggacggaatcgccatctcttttcctatctgcatggtaacctctcctttatcttttcccgtaccgacccgtttctgcccgaaaccgtgcccggacaaaattattttacactgttttctcttctttttcaaccggtcaaccactgtgcacgttcccgccggaatctatccgcgccttttagactaccccacacggattccaaacatctgcaacacccaaaggatcaaccccaacccccagctggaaaaaatcccatacaatatcaccggccccgcaatggtaaatatcttgcagccgatgccgaatacctgaccttccttttggtattccaccgccggagccgtcacggaattggcgaatccggtgatcggcaccaatgcaccggcgcctccccattttgcaatcttggggtaaatatgaaacgccgtgagtactacagacaaaaataccagaagcagggaacaccagcttccggaagtctgcggatccatccccagcacatttccggtataattcagaattccctgtccgatacaacagatgattcctccggtcagaaatgctttccccatctgcgtccacagattgtgtgtcggtgtgaccgactttacatactgttggtattcctgtttctgctgcgcatccggctgtatcgaatctgccggcatatgaggaatttccttctgttccatatccatcctcccatccttgctctgtcggaacaattacttggtttctatgatcacagaatgcccggatcatttcatttttatgctgtttttttgaaaaagtcttccttagtatttttttcgtttttcggctgtaagcgattatagtgtttgacggtcctcttttttcatgtaataataaattttgtaagttcaattatgaggaggttcttatgaaggaaaaaacaaagagaaagctacggacttttgtgtgtctgctgatgatccccgtctttttgacaggatgccggatcaagacgacgccactcggtgtcttcgcccagattctggaatacgccagtgcttccggaagcagctcgtcacaatcgtctcaccacggcacttatcattcggaaccggcttccacaccacagccgcagatagattatgattctctcggagacattggcaccgtgcagacgatcatgatctacatggtaggatccgatctggaatcctcttacggaaatgccagcctggatatggacgaaatggaagcggccggcgtcgataccgctcataataatgtcattgtatatgccggaggtgcttcgcaatggcaggatcgcggtctggatggcgatgcctgtaccacactgctcctgaccgaagacggttttgttccgctggatacttatcctgcggaaaatatgggagatcccctgactttaagcagctttatgaattactgctttgactttttccctgcagattcctacagtctgcttctgtgggatcacggcggcggacccgtactgggatatggtgtggatgaaaattacagagatctgctgactttggacgaactgtccgaagcacttgcagattctgtgggagcccacatgacgaaattagaatggatcggcttcgacgcctgccttatgagttctctggaagtggcttccgtgctggctccctatgcagattatatgattgcatcccaggagaccgaacccggctggggatggaattacgcttttctctccgtcctgtcggacagagcgattcccggagacgagatgggtgaatacattgtagattcttatatggattacggtgaatatgtctttgactattatccgaatctgtattccgatctgacgctgtcatgtattgacctgaacgcttacgcagaagcggaagacgctctgaatacctattttgcggaactggatacctctctggatgtgcaaaactatccgaaactggttcgtaatcgtgccaaagtcagagacttcggaagctattcctccgatatgaattacggcatggtcgatgtactacatatgctggaactgttgggagataattcggacactgccaaagctgccacccgggcagtggaaagctgtattgcatattccgataccaatatggaaaatgccggtggtatctccatctgttatccttatcagacagacgaagactaccgggatgcctgtattgaaatgcaggagtatcttggatttgctccgaattacacccgttttttacaggatttctatgcaattcaaaacggtgataccctgttggcagatcgtgagatttccaatgcgcacacttctgtcaccacagaaaacgacggcacctatgatgaaagcgacatcacgctgcagctcactcccgaacagcaggctaattttgcttccggtggctattacattctctgcaaggccaaagaagaaggttacattacttccgaggaagatcccagagctgatgagatgtatctgttcattcagggaagcaaacgcgtaacactggatgaaaatggggtactgcatgcggcatataaaaacaatgcgctgtatatggaggatgatgatggggtatccgatattcctatgatcctgacggaatcggatatcagtgacgtggagaatcgttatctgtcatttgtagtactgatgaatttcgataattgggaatcccaggctgcgaagctgcagattgcggtaaatgaagattatccggatggtatcatccgaaatgcgattcctttaagcgatgataacgatgtgcaaagcgccagcaagcagctgatccgtctggatgattatgcgaatatgtccgtggcagcacgttgtagttacgtgacccgggatgagaatggggatctgttggatttctttgactgggagacatcgaaatggatgatggggtttgaggtggatctgacctccgactatcggaccgtggtgcagccactggatcatccggagaattacgtgtgcatcttcttcatgaaggattcccaggggaatgtgtcctattcggatatgattccgttgaagtaaattgaaagttacgagccatgcaaagtcaaaacagaaacagcgatctgggagcttgctcacaagtcgctgtttttgtttttgactttatacggcgacagccgtcaatgaaataaatgtggagcgccttttgcgacacatttatgaattgggggcatggctcgtaacgtaggggcc

SEQ ID NO: 11332 - DNA, 1226 bp, Unknown
  gut microbiota DNA sequence
aacgtaggtgatggggaagctcaatttatacaagtttattttcttgaaaaagaatgtgtcagaataagaatcagcagtaatgaaacatttgcacatacctcgagaggcatatattccggaaatacttattctcaaatggtcgaacaatatggagattcttatgaaaaacatacttatataggcaaagagagatataccatttatcgttatgctttaggagaatgtttccatgaattcggcataccgggggaagcaaccggtgaaatctataatgttgatgtttatgtttccggtcagatgcctatctatgattatggagaagagattgtagaggattagaaattttttgaaaatatgtaaggcgatgagacggagtatatggaatggctgaatgcaaacggaggtaatggtgaagagctggagattccatatttttgatttacagaagaaaatattgtgagagaagaaaaaagaaggtaattgtgggaggaacaaaaaatgaccaaaaagcagaaagtagtatttgcggttgtggcagcagttgtggcagcagtgcttgtgccggggataattttgtcttacgtatgctatcattttatttatggaacaagaatcacttcccgggagggagaagcataccacaaattagagggaaagggagtatacagtccgttagcggtgttcccttccgcagatatggataccgtttcacaagatttttattatcagacccgtgatgaaatttttgcggcaacctgccagatctatttggaaaatcaatataccagggaacagtatgaggcagaaacagaacgtctgcgtaatttggaattttcttatcaggatcagacgaatatgctctatcaggatgaagaaaattattgcagcgttgcgtatgtggcaatggcaaattggatcgaccgatatgaatatgccatcacgttagacgacagtaataccattatttatgtttatctgcagaacatggatgcaaaggacatacatatacaggctgattaccttccgaaatattttcaggataataatgccggaaagcatcaggatacagaccctatgacctcggattacagaagtttctatgcgttccggataggagatcattatatagactgcatggacttggcagatcagattgaaatcgccgataccgagccggagactgagggagaggatgtaacataggaagttgaatctaattaatttct

SEQ ID NO: 11333 - DNA, 1577 bp, Unknown
  gut microbiota DNA sequence
atatctctgtcggatccgtgacagagatatttttcaatagtgtaaataaaatttgacaaaatagacataaacgtttaataatatttacataaggagatgggattatgccgaaaaaaacaatagtgttgttgcctgaaacagaaaaaatactggagcaaatgggactacagataaagtatgcaaggctgcgcagaaaattgacgtcggaattggttgcggaaagagcaggaatcagcagagctactttagtatccatagaaaaaggctcaccttctgtggcaatggggtgctatgcggctgtgcttcatgcattgaattatatggataaggatttactgcttgttgctaaagatgatgaattgggtcggaaattacaggatcttgatttgcctgtaagaaagcgcgcacccaggaggggataaatacttcggaggcaaacttttatttgccaatagaggcagtgccatactatgagatatcaacagaacaggcgaagaaaaatgtcacagatatattttaaacgcacgataaacgcacgcgtgcgtttataagatagccttttgcaatcaaattaaataagtgaaacagtgtttcgtctttttgaaaactctttcaccggttcagccaccacatccccagattcagataccccgcgaacgcaacccacaccagataaggcagcatcacccatgcggcaggcttcgagatgcggtaaaaggcaacggtagtggcgaggatcaggatccacagagcgaccagccacaaaaaggcgaaaagataccatcccaggttgaagaaccagatggaccagaaaaaattaaagataagctgtacagcatacagggtgagggctttcgtgtcctcacctttttgcaggacaacgagataagaggcgattcccatgaggacgaacaggatgctccacaccaccgggaagagccacatgggcggcgtcagtggaggctgactcactgcttcaaaggctttcatgccgtctttggtgatccaggcggatagtccgcctaccgccagagggatggcaacggcagtgatgaggtttttccagtgaatattgtgaaatttgtcggagaattgcatgggagcctcctttgaaaatacgattttgcatgtgtcaatatccgtgtatttctgattagtattgtatgaaaatgagataaaaattatgtgtctggctataaaaagaggacaaaaatttgggactatcggcaaacggaggttttggtgtatgattaagagtgtaataaagcattatgactatcagaaacaggaaatattcaagaaaaggtaataggtaacatagatatgggcacagaacaaacacagggttccctgacaaaagaagcgatccggctggcgtggccggcggtctgcgaatccttttttatcgcactggcgggtatggtggatacttttatggtgagtacgctcggagccaatgcggtggcagcggtagggctgaccacacagccgaagttcctggggctggcactgttcattgcagcgaatgtagcaatctccgccctggtggcttctacgatcagcgttactttgatccg

SEQ ID NO: 11334 - DNA, 10918 bp, Unknown
  gut microbiota DNA sequence
acagttttcataataatcctcctattcctctaaaaatatgcgtcattttacacaattattataatatattcacaatattgtgtcaataatgcttttgaaaatcatcattttgctcaacaaatcttatgtgtaattaaagtacctttataaaataataagggtcactgtttcttaaatcctcaatccagcattcaagaaatttttctcgtttacatcctgtcaccagcatatgggcagcgtcaaagaacacaaggcgaataacaatctggtaataggtatcatgggtatagtggatatgtttttgattggcttcatgtttgtccagtcatggaaataccttccttctttgttccttggaaagggtggtcacactctcttcaattgttgttgatattcttggctattttcctaaaatacaatccgtggttaaataaaggaatagtggtctgctgtctaaaaatcatatgtttctttaccgcacatgagcattgtcatacgggatgtagcagactgggtgagaacaatgtcaatcccaaagttatgcggtatatcatggaccattcggatacacaggtcacaatgaatgtctataatcatattgcagagaagtctcatgtggagaacgagatgtctaaaatgaacctgcaagaaaccgtacctgctgtggtataaaccagaagtcgttgtcgtaaaatgtggtaagaaaatcgagtgcgaaagcaagtgaaaaatccctgtgaagcccgtaaaattaaggattcataaattcttcacaaaataattagcactcaccggttgacagccatagaaaactttgctaaactcatggaaatgttataagcacagcaaatatttattataagcatagcttatattaccaaaacaaatcattcacaaatcttatcaaatgaacacaggaggagagaaaatgggacagattattggtgaaggcattacctttgacgacgtacttctggtaccgtcttattctcaggtagtccccaatcaggtggatttgaccacatggctgacaaaaaagatcaagctgaacattcctatgatgagcgcaggaatggacaccgttaccgagcaccgcatggcgatcgccatggcaagacagggtggtatcggtatcatccataagaacatgtctatcgaggcacaggcagaagaggtagataaggtaaagcgttccgagaatggtgtcatcaccgatccgttttccctgtctcccgagcacactctggcagacgcagatgcattgatggcgaaattcaggatctccggtgtgcctatcaccgagggcagaaaattagtcggcatcatcaccaaccgtgatctgaagtttgagactgattttaccaagaagatcaaggagtccatgaccagcgaaggcctgatcaccgctcccgaaggtattactctggaagaagcgaagaagatcctggcaaaagcaagaaaggaaaaacttcctattgtagataaggacttcaacctcaagggtctgatcaccatcaaagatattgagaagaccatcaaatatcctctggcagccaaggattcccagggcagactgctctgcggtgccggcgtaggtatcaccgcaaatgtactggatcgtgtggcagctttagtagcagccaaggttgatgtcatcgtactggattccgcacacggtcattcccagaacgtactgaactgtctgaagatgatcaaggaaaaataccccaatctgcaggtgatcgcaggtaacgtagctaccggcgacgcaacccgtgcactgatcgaggcaggtgcagatgccgttaaggtaggtatcggacctggttccatctgtactacccgtgtggttgcaggtatcggtgttccccaggtatccgctatcatggactgctatagcgtggcaaaagaatacggtattcccatcattgctgatggcggtatcaagtattccggagatattaccaaggcaatcgcagccggcggtaacgtatgtatgatgggttccatgttcgcaggatgcgaggagagcccgggagaatacgaactgttccagggcagaaaatacaaggtataccgtggcatgggctccatcgcggctatggagaacggcagtaaggatcgttatttccaggagaatgcaaagaaactggtacccgaaggtgtcgagggccgtgtggcttacaagggcagcgtagaagataccgtattccagttactcggcggtcttcgttccggtatgggttactgcggggcacaggatatcgaaaccctgaaagagaccggcagattcgtgaagatctccgcagcatctctgaaagagagccatcctcatgatatccacatcaccaaggaagctccgaactacagcgtggatgataaataagttttaccaaaaagagatgagaaaggtgatcgtaggtcagacttacgatcgcctttttctgcatgcaaagtatttgcaataattgacaaaatgatccgaattttttaagcaatttaataaatataacgaaaaatgtaaaataatagcttgtatcaattttgggatacatggtagaatataaatattcgggaaggaatttctgaatattttacagagaaacaggggagcaaaaaagtggctgagtttgcattacgtgaattgatagacgaaaagcgcctgcagcatctgcagaacgagttctgcaaggtgacgggagtcacagcggtttgtgtggacaaggaaggcagagccataacagagccgtacatcgataagtccctgataagaccggatggggaagatccgatcttaggagaatatcggaagaaagcagcgcaggcattagacagagtacaggaaggatccctggaggaacaggtggtggaagagctgccggatggcggacatgtggcagcagttgccgtcagtgtggagaatcagatcattctgtactggcaggtatatgatctgaagaagctcgataccatatctttttaccagattctggatctgttgcgggataccagtgcagatatctacagagaccgtatgtcctgtttcagtgcggaagccgagagcagaaggagcagatatgcggaggaagagatgagccgcaatctccatacgatagaggctactacggagatcgtccagcttctggacagcgatgaacagatcgaactggccatgaaccgatggctgaagattttggcacagcacattcaggtagacagcgcagagatttttcagctgcaggcaggcacggatacgatgaatgtcgtctgtgaatggctggcaccgggactgatctcttattttgacaagactagcgggattcccgagaaatcttttctccatacagagaagccactggtggtatctacggacagtgtgggtaagcctgactctgaggaaattgaaaagataggcatgaaagccgtgatgatatttcctatcctgaaacaggagagcggcaatatggtgctgtctctgaaccacagaagacaggggcatgtctggagcatggcggagatcaagttcacttctgacgcggtgaagatcttacagagtatcctgaccagacggatccagaaaaattccctggcaggttcttacgccgcactggaggagatcctggacaatgtgggatgtgccatctacgtaacggatcagaatactggcagaatgctgttcgccaaccagatattgaagaatacctttgccaaggaactgatggatcataattttgatgccctgctgcagtccagtatccacaaggacaaaaccagaactgtcagcgtggtatatcatgcggagaaggagacctggtacgatctgttgtgcaaggagatcgcctgggtggatggcaaaaaagccaatctgtactctctgtatgacattacagataaaaagctgtaccagcgccggatcgagcagcaggcatacacagattttctgacgggactgtataaccgcatgtgctgtgagagggatctggcgagacagatcgatcaggcgaagaagatcggaggaaaaggagcgttattgtatctggatctggatgatttcaagcatatcaatgacggactgggacaccagtacggtgatgtgctgttaaaatccatctcccatgcattgaaacggatcaatggcatcgagaatacctgttaccgtatgggtggagacgaattcgtcattatcattccgccggacagctatccccggtttggaaatattgtggaagatattaagaagatcttcagcaaaccctggtttttgaaggatgcagattattactgtaccatgagtatgggcatcgtcactttcccggatgcaggagattctgtgacagatctgatcaaaaaagcggatattgccatgtatgaggcgaaaaagactggtaaaaaccgtgtggaaacgtatcgggaaggcaatgattccgtatcgggacgccgtctggatatggagaagaacatgcgtgatgccacggtggaaggctaccgggagttcgaggtctattaccagcctatcatcgatattcagggcggcaaggatgtctgtgccggagccgaggcactgatccgctggaacagtgcaaagctgggatttatctcaccggcggaattcattcccctggcggagtatctgggactgatcaatcccatcggcaattatgtactgacggaggcctgtacccgctgtaagcactggaacgataccggatatccggattataaggtaaatgtcaacctttccgtggttcagctccttcagccggacatcgtggagacggtggaaaaggcgcttgcggacaccggcttatcgccgaagaatctgacactggaggtgacagagagtcttgcgatcaacgatatggatcgtatgaaggagatcctgaaccggatcaaggcactgggtgtctcactggcactggatgatttcggaaccggttattcttccctaaaccatatccgggagatccccattgatgtcatcaaggtggatcagagcttcgtcaaggatctggcgggggatgcctattcccagtcctttatcaagatggtggcagagctggcacagaccattggcgtcagtgtctgcgtggaaggtatcgagactccggaacagttcaaagtgctgcagggcatgaaggtcaaatatattcagggatactattttgaccgtcctatggagaggcatgcgttcgaggcaaaatatgtgaagtaacagttcagccatagaatagcaaatgcgacgatcgggtgcttgcacacggagcggcacttttgctattctatgagcggagcgcccaaaacatgaataaaagatgagctgcatagcagcgacggctgcgcagcagacgcttttatgaaggctttggggcagaactgttacggaagcaacaaaatcatcaaaacacccttgccaaaataaggggaaccatgctactattgatatagctacacgactggcggaacgcagcctgctgcagtggagattacccacagggagtgtagaatagtgaaagccgaccgcctgggcaccgtctatttttggtgcttaggcggatttttattttaaaggataaacggaggaaaaactatgttacaactggaacaggaactgaaaagcaatgcttatcccggcagaggtatcgtgatcggacgctctgcaaacggtaaatatgctgtaaccgcttattttatcatgggaagaagcgccaacagccgcaatcgtgtgtttgtgacagaaggagagggcatccgcacccaggctttcgacccttccaaactggaagatcccagtctgatcatctatgcgccggtacgtgtcctgggcaacaagaccatcgtgaccaacggtgaccagacagacactatttacgagggaatggacaaacagctgacctttgaacagtccctgcgcaccagagaattcgagccggacggaccgaattatacaccgagaatctccggtatcatgcatatcgagaacggcaagtataattacgccatgtccattttgaagagtgacaacggcaaccctgattcctgcctgcgttttacctatgcttacgagaatccccttcccggagagggacgtttcattcatacttacatgcacgatggcaatcccctgcccagtttccagggtgagcctaaactggtagagatctccgatgatatggatgcatttaccgacatgctgtggaacagcttaaatgaggacaacaaagtctccctgttcgttcgtttcatcgacatcgagaccggcaaatacgagactaagatcgtgaacaagaatgtgtaatgagcgcaaaaaggaaacctcaaagaggcgttttgcgaatgcaggttctgaatagtgaatatcgtagaataggagaaaaaataagatgaacgagattcagttaaaatacggatgtaacccgaaccagaagccttccaggatcttcatggaagacggcagtgacctgcctgttaccgtcctgaacggcaagcccggatatatcaatttcctggatgctttcaatggctggcagctggtcaaggagctgaaggaagctacgggacttcccgcagccacttcttttaagcatgtatctcccgccggtgctgcggtaggactgcccttaaatgacaccctggcgaagatctactgggtggatgatctgggagagctgtctcccctggcatgtgcttatgcaagagcacgtggcgcagatagaatgtcctccttcggtgatttcatcgcattatccgatgtctgcgacgcagataccgcacgcctgatcaagagagaggtatccgacggtgtcatcgcacccggatataccgacgaggcactggagctgttaaagcagaagaaaaagggtgcttacaatatcatccagatcgatccttcctaccggcccgctcccatcgagcacaagcaggtatatggtatcacttttgagcagggtcgtaacgaactggacatcaatggtgacctgctgtccaatatcgtgactgtgaacaaggagatcccggagagtgccctgatcgatatgaagatcgcactgatcaccctgaagtatacccagtccaattccgtatgctatgtcaaggacggtcaggctatcggcatcggtgccggacagcagtcccgtatccactgcaccagactggccggcagcaaggcggacaactggttcttacgtcagtctccccaggtgctgggtctgcagttcgtagacagcttaggcagagccaaccgtgacaatgccattgatgtctacatgggcgatgagtacatggatgtgctggctgacggtacctgggaaggtatcttcaaggtaaaaccccctgtatttaccagagaggaaaagagagcatggcttgacaaaatgcaggatgtgactctgggaagcgatgcattcttccccttctccgataatatcgagagagctcataagagtggtgtaaaatacatcgcacagcccggtggatccgtgcgtgatgcagatgttattgcatgctgcgataaatataacatggtgatggcgtttacaggcatccgtctgttccaccattaagacagatatttgcgggcaggactgtaacaggacctgcctgtaactattcagagccatgtaaatctgtaataagctgaccatttatggtcaggcttttagagatttatatggcgaggtaaccacatgagcaaaaggtgagccttgaaaaggcgattttgcgaatggggttctgaatagtttttataaggaagatgaggaaagcgtagttatggacagacgaggggcagagaaaagcagagaaatgatgctggaggaattgctgggatatgaccggatcacgatccagtgccatgacaatccggatgcggatgcgatagcgtccgggtttggattgtattgttttttccgtgatcagggaaaagatgtgagactgctgtatgccgggaaaaacaaagtgagaaaggcaaacctgacgctgatggtggaaaagcttggaattccgctgaaatatctggcgcatcccggagaggagccggtggacggacttctgatcacagtggactgtcaatacggtgccggcaatgtgaccgtaatcccggcagaggagatcgcagtgatcgatcatcatcctctggaagtgatctgtacggagaaaatgcgattacaacctaatcttggcagctgtgcgactctggtatggaccatgcttcaggagatgcattatccggtggagaaaaataaagatctggggaccgctttgtattatgggctgttcatggataccaatcagttctcggagctgtccaatccggtggatatggatatgcgcgagagcctgaactttgacaagaatctggtatccctgttccgcaattccaatatttccctgaaggagctggagatcgccggggtggcactgttacgttgtaattacaatgacgattaccagttcgctgtgatccattcccagccctgtgaccccaatgtgctgggactgatcagtgatttcctgcttcaggtggcgggggttaacacttgtgtagtctataacgaggacagcggcggatataaattctccgtcagaagctgtatccgggaggttaatgccagtgaattgtcggattatctctcggaggggatcggttccggcggcggccatgtggaaaaggccggaggctacatcagtatgaagctgtatgaggaaaaatatccaaccctgcattctgaggcttatttcaataaccggatgacgcagtattttgacaattttgagatcgtatatgcgaaagaacgcaaattccctgtaaaagagggtaaaaaataccgcaggcggaaagagacgatcgcctgccttaaggcagcggatctggcagagcttggaaacgtggtatctatacgtaccgaggacggcacgatggatatcgacaccagacaggatatgtatttcaccctggagcgtaccggggagctgcatccggtcccggccgggagatttcaccggatcctggaactgtgtgatctgcccctgccggaggaatattgcagctctatgggatatatcccgagggtcaaggacggcagggatggcagtaatcatctgctgacggaatatgtccgtatgggtatgcctgcggatgctttctgtatctatgccctcgagctgaagcggggagtaaaggtattccccatctgggatgaggatacttatatgacgggcagagccggagattatctggtggccagtgaggatgatctgcacaatatgttcatagagcctgcgcagaatcttctgaataattttgaagagatgacataagaatcgcaaaaaaaggtttataaaattttccttgtgtggtaagattaaggttacgaaaacagtattaagtaaacgaaaggcaaggatattaccatgagcgaactggaaaaagaaatcgtagattccgcagaagtgaaggaatctaagaattttatagagcagatcatcgacaaggatctggcggagggtgtatacgataccgtacatacccgtttccctccggaacccaacggatatcttcacatcggacatgccaagagtattctgctgaactatggtctggctcagaaatacaacggcaaattcaacctgcgttttgatgataccaaccccaccaaggaaaagtctgaattcgtggagtccatcaaggcagatgtaaagtggctgggcgcggactgggaggatcgcctcttcttcgcatccaactattttgaccagatgtatgaagcagccgtaaagctgatcaaaaagggcaaggcgtatgtctccgatttaagtgcagagcagatccgtgagtacagaggaagcctgaccgagcccggcaaggaggatcccggcagcgtaagaagcgtagaagagaatctggcactgttcgaggatatgaaggcaggcagatacgaggacggctccaaggtactgcgtgcccgcatcgatatggcatctcccaatatcaacatgcgagatcccgttatctaccgtgtggcacatatgtcgcaccagaataccggagacaagtggtgtatctatccgatgtacgattttgcacatcccatcgaggatgccattgaaggcgtgacccactctatctgtactttggagttcgaggatcacagacccttatatgactgggtggtaagagagctggaatacccgcatcctcccaagcagatcgagttcgccaagctgtacctgaccaacgtggtgaccggtaagcgttatatcaagaagctggtagagcagggtatcgtggacggctgggatgatcccagactggtatccatcgcagcactgcgcagaagaggcttcacaccggaatctatcaagaagttcgtagagctgtgtggtatctccaaggcacagtcttccgcagattatgcgatgttagagtactgtatccgtgaggatctgaagacaaaggcgccccgtatgatggcgatcctggatcccgtaaaactggtcattgacaattatcccgaaggacagaccgagatgctgcctgtagtcaacaatccggagaatgaagaactgggaagccgtgaggttcctttcggtaaggagttatatatcgagagagacgatttcatggaagagcctcccaagaagtatttccgtatgtttccgggcaacgaagtgcgcctgatgaacgcttatttcgtaaagtgcaccggctgtgtcaaggatgaaaacggtaaggttgtggaagtacatggtacctacgatccggagagccgcggcggcaacagcccggacggccgtaaggttaagggaacgatccactgggtaagtgcagctgaatctgtgaaagcacaggtacgtctgtatgagaatattattgatgaggagaagggggtatacaacgaggacggaagtctgaatctgaacc

SEQ ID NO: 11335 - DNA, 6077 bp, Unknown
  gut microbiota DNA sequence
ctcctgcatctctcttatcaccgcatccacgatggattcccccggctcgatatgacctcccggaagtgtatatcccttccagtcattttttattctgtcctgtaacaagtatctgccatttttatgtattaagcataaaacggtaagttcgacgctttctgttctcatttactttctcctgcaatgttttcgacaatttgggaatttccactcttcctacaaagaatttccacgctgccataccattacatagtctttttccccggtaacttcatccaatccttctcgttggatttcaaaaccttctcgttgataaaagtgaattgcacgtgtattcttttggtaaacatttaagtataatttcgtctttttttcttttacaaaattcaacaggagcttacctataccctgcgactgcatttcatcacggacaaaaatgccttccatatattcatcatttaaccctataaagccttctatctggcagtcattctcatacacatagacctctgcctgtggcaacatttctttcactaaatcaatattatctttccaatattgccccggaataaaataatgtgcttttaagttggtatctaaccatatatcaacaactcgttcgatatctgctttttgtaatactttgatcatacttcttcaaacaccctgttctgctacaatttacaaaaccacctcgaagatcgtccctccggatggattagacttcaccgtaatactgccatcatgcactcttacaatttcacggaccagggcaagtcccagtcctactccaccaagctcccggcttctggatttatccacccggaaaaacggttcaaacacgcgctccttaagttcctcaggaattccggttcccgtatccttcactgacagatatacatgtttttccttccggtctgcggttactgtgacctgcccgcccgaatgattatattttatggcattctcaacaagattgtataccagccggtaaataaggatgtcacttccgaccatcgttatatccttacactttccgatcagtcttatattttttccctctgcgagcggttccagatcctccaacacctcatccaccagagcgtctaagataatttcatcatcccgtcctaccgtctgaagctcactcatgtcgagaagtgtctttaccattttgttgagtctgtcgttctgttcggtaaccatctttatcatctgtaccgtgtctgcatcattgtccggatgtccgttggaatgatacagatcaagctgtacctgcatcagggctaatggagtacgaagctcatgggctgcatttgcagtaaattgtctctgtatctcaaatgcatccgagagacgttccagcatccggttatacgaaacgctaagctggttcagttccttcacctggttttcttctatccgtgaatctgccagattttgcgcctgcaccttttcgatcttatcagaaaactctctgagcggtctgagtgcatgcccacttataaaataggtagccactccacccagaagagccaatactgctgtaatgatcaagctgtttttcctgtagtccgccttattattatagacctggacagaaaagtcattggcgaactcatcccacttgtcctccggaatgctgatatatatttcctccgcatcgtccggctgatcatctccccgtgtatccacagcctcttgcagggaatccatataatacacgccgtttctatagacaagcatcgtcacgcatccacatatcaccgctatatataatgtaatgatgcaggtaagtctccactgcagcgacatttttttcatctatcggactcctctcgtattttatacccttctcccaccttgttcagaatcggatcatatcccagcacagccttaagcttttttctaagggaagacatgtgtactctgatcgctccgctaaagctatccacagatgcatcccagacatgctccatcaattcctcctgacttaccggtctgcccatgttcagaagcagatattccagaataccattttcttttcttgtcagggataccatttctccttttgcataagcctcacgccttacggtatcgaactttatctcaccgctttccagacatacatccttctgtacaaacttccttctggtcaggcttctgatacgtgcctcaagctcctgtagatggaatggtttttccatataatcatttgcccctgcatccagcgcctcaaccttatccgctatctgccctcttgcagataatataaggaccttcgtctcctcgttttcctgcctgagttccttcaggatctccattccatccatgcctggcagattcagatcaagaacgaccagatcatagttctccgtcaggatacctgcaagagcttcttccccatcataacaggtatccacctcatatcctgcgtcatacagacttttcgcaactgtatcacatatttctttttcatcctcaacaatgaataatctcaaaattccttccccgccttaacaaagattttacaacaattattgtataatagcgaagtcaactggtcaataaataccacgatcgaaaggagtaacaataacttgaagtgcagaaaaatatcgcagatcgttctgctcgtcaccgggatcactatgatcggctacggtgcagtcagcggcgaagctgctgtcgtgcttggtaaagcaataaaattatgtctggagtgtgtcggaattggataagagaaaaaaatcattgtcagggcaggtagccgggatacgcggatggatacaggctgctgccacactgcttactaatattcacatccctaatttttttaagggcaaaatatatcagggaaacgctaagaccgtatgtgtaccgggattaaactgttattcctgtcctgctgccacgggagcgtgccccattggcgcatttcaggcggtgatcggatcctcccgatttaaattttcatattatgtcacggggttttttattttactgggtgtgacacttggaagatttatatgcgggtttttgtgtccgtttggatggtttcaggatttacttcataaaatcccggggaaaaaattttccacagcaggactgaagccgctaagatatctgaaatatatgattcttatcgttttcgttatccttctgccgctgctcgtaacgaactctataggaatgggcgaccctttcttctgtaaatatatttgtccacagggcgttctggagggagctatcccgctttctctgggcaatgcagccatacggtccgcacttggaaaactcttttcttggaaatgctttattttgatcacggttgtcgtgttaagtattttattttacagacccttctgcaaatggatctgtcctcttggcgcgatctactcactgtttaataaggtcagtcttcttaatattaaggtggaggacagcaaatgtatcggttgtggtcaatgttcaaaggtatgtaaaatggatgtggatgtgtgcaagcatccagaccatccggaatgcatacggtgcggagcctgcatcaaggcttgtcccaaggatgcgatccactaccggtttatgggaaaataatcttattacgattactcaaaggagaatttaatcatgaaaacaaacaaaaaattccttactattttaacactctgcatagctttattgcttacggcctgcggcacaacagatgctgccggcacggacaaaaccaatgagtctctgacggaaaccggcacagtatccacagacagctccaacactgcactaaatgatctgtatcagcaggagaaccagatttttgcagatcatgaggctgtatggaacaaggtattcggcatgatgagcaaaagtaatgctgatcccagcgcaaattatgctgattatctggctgataccgtcgaagcaaacaaggactcctttacagaggatgaattgaaaacacttacggaagatatggaaaccatacggaagatcgaagaacagatcgcagaactggaacagggaactaccacagccgatcatactgctccggaaaacaattccgaagctgcctctcccttccggaatttctccggtcaggattttgatgggaattctgtcgatgaaagcctgttttccggaaatgcagtaaccgttgtcaatttctggtttaccggctgtaagccctgtgttgctgagttgtctaagctggacgaattaaacaatacgctcaaaacaatgggcggcgaagtcatcggcatcaataccgaaaccttcgacaacaatgaagctgccatgaaagaagctgccgccgttcttgaaagccagggtgcaaaataccgcaatatttccattgactctgcttccgatgcgggtaaatatgcctctgacattatggcatttcctacaaccatacttgtcgatagaaatggaaatattgtaggggatccgatccttgggggaattgataaccaggataactatgactctctgatgcagcagattcaatcggtaattgacgcagacagtgcaaaccaataaagcagaacaccccctaagatttcttcattcacctgttgacaccggcaattctttttgatattatttatcaagaattgaatattccatgagggagtagttagcacgaaggtgtgatttgtcaacattctgattataattttagagtataatctggcaaatcttaaataatgagactcatgtatatctattaatggtctgtgtataatacacactggctgataattgatatacatgagtcttttttatctctgtcgatacttatcatcgcacagctttcggctgacaacactgtaatggatcacgcaaaggagaaaaacatggagaaacttattaacaacgccccgtttgctcttgttcttgtattccttgtaatcggttttgtactgcttattaagggtgcggactttttcgtagaaggaagctccagtgtagcgaagagactgcatgttccgtctatcattatcggacttaccatcgtagcaatgggaacctctcttcctgagacagcggtcagtgtatcagcttccctcgcaggcaacaatgaacttgcggtcagtaatgtcgtcggttccaatatctttaatctgatggtcgtgatcggcgtatgtgcaatgatcgccaccgtagaggttgctcgggaaactattaggagagatatccccctttccctggtctgtgccggtcttttactgcttttgggaagcatcgggcttggtgatcagaccaaaatgacactgggacatttcgatggtgtgatattcataggtctgtttgccggatatatcttctacatgatcagaattgccttaaaagcaaataaagaggggaaaaaagtagaaattgagggcggttccaatgaagagatcaagctgatctccgtgccgcttagcattattttcatcatcggcggtgctgctgcgatcgccttcggcggagatctcaccgtcgatgctgcatccagaattgcaagcgacctgggaatgacgcagacgctgatcggacttaccatcgtttccatcggtacatctcttccggagcttgtgacttccatcgttgcagccagaaaaaatgaagtcgatatggcactgggtaatgccatcggttccaacgtatttaacatcctgatggttctgggtatcgcttccgccatcagtcccatcagcatcattacggaaaacatcattgatctgtgtgtactgatcgcatttactgtgtgtgtatggatcttcgcaggaagcaaaaagaaaatcggaagagtcgaaggcttctgtatggtggctctttacgcagcatatgcggtttatatcataatccgataaatgagggccgtacaaatgatattgttttttaaggtatttctcacggaattcatcgcagagatgggcgacaagacacagcttatgctgatcgcccttacttcgaaatacaaattaagagatattatattaggaaccgctgccgcaatcctggtgctgaacggtctggccgttctcgccggcgggctcgtcagcgaattcatccctgcctggcttatcaag

SEQ ID NO: 11336 - DNA, 229 bp, Unknown
  gut microbiota DNA sequence
caatcttatgaatagcgtggctcattgcggatgccatctgccacccggggagatctgtttgtattaaaaacaccattttctgctaaaaaaatacaaaaacatgagattttgccatgtaaaaagctgttattttcgctgagcgtgcaaaatgaagaaattccgtacaaaaattcctgatttagaagtttttttgtacggattttgctattttgatgcgattttcaccaaa

SEQ ID NO: 11337 - DNA, 24730 bp, Unknown
  gut microbiota DNA sequence
gctgaaagacagggggaaagcggacacgatgtccgcgtcagccgattgtcgacatggatgtcgactgtaggcggccccgtcatgttgagaaccactcatcacttttcgtagaaaattcacatccggagaccttacatcgagacatgtgtatcgcatgttccgggagttcgtggattttatggcaaccctacgttacgagccatgcactcaattcataaatgtgtcgcaaagggcgctccacatttattggctgttctccgcaatgagccacgccattcataagattgtcagcaaaaaaagctgccaatcttatttcatatcgcggccttcgccgcatcacggcataagtaaagacagcgatttgtgcgcaagcgcccatcgctgtcctcactatgcctatgcgcggctcattgctcgcgtaaactctcaatttactctacagaaacagtatagtaataaataggttgtccaccatactgtaattcaatatcgcaggcgggataagcctcctccagatcggcgcgcagtgcttccgcagcatcctctgccacgtcacagccgtagtatatgctgatcagttcggaatcttcatccacaagttcagcgatcatatcacgagttacttttaccatgtcggtaccgacggctacgatgccctggtcagcgatgcccatgaagtcgtctttcttgatctctttgtcatcgatcacggtatcacgcactgcataagtcacctgaccggtcttgacatttttgatctcgcggagcatggtctcttcgttctcttctacggacagttcgggtacgaagttgatcacagcagtgataccctgaggaatggtcttggtaggaatcactaaaagctccttatcggtcatcagttccgctgcctggtttgctgccagaatgatgtttttattattcggaaggacaaaaatggtctttgcatttaccttgtccactgcgtctaaaatatcagccgtactggggttcatggtctgtccgccttcgataatataatctacacctaggctcttgaacagttcgctcaaaccgtcacctacggaaactgccagaaatcctacctccttggcaggctgtgcagccttctcttcttccgcttttttctgtgcagcttctttctcggagagcttgaacagcttttcctgatgctccaaacgcatgttgtcgatcttcatattggataatgcaccatacttcaatgccttctggattgccagaccgggatcattggtatgtacatgtactttgacaacatcttcatccgcaacacatacaatagaatcacctatggactctaagaatgccttgaaatccatctctgcttttacattgaagggcttattcaacagaataatgaattcggtgcaatagccgaacttgatctctgcttctgcctgtacttccagagaactcttggtgtcttctgctttcgcagcagcgggagctacggtcagatcaatctccttacctaaaaaggcatcataagcaccgcttaatacttctaccagaccctgtccgccggaatctacaacgccggcctgctttaataccggcaacatttcgggagtctgactgagcacataacgtgcgtgttcaatgacagtacctaaaaactgctccagatcatccgcaccgtcctcacaaagttcctttgccttatcggaagcaccttttgctacagtcagaatcgtgccctctttcggcttcataacagccttgtatgcagtttctaccgctttttcgaatgcatgggtcagaacaggaatatccagaacctgctcttccttaatacttttggtaaatccacggaacaactgagataaaataacaccggaattacctctcgccccgcgaagggaaccgctggagattgccttacataaagcagccatatcggcatcgtctcccagtgcggaaacttctcttgccgcagacatgatcgtcatagtcatattggtaccggtatctccgtcgggtacgggaaatacgtttaactcgttaatccattctttcttgttctctaaattcttggcgccggctaagaacatcttggaaagcatcttagcgtcgatttgctgtaaagccacaattacttcctccttaatcaatcactcttacaccttcaacatagatgttgatctttttgatctcaataccggtaaactcttccaccttatactttacgttgctgatcagattgtcggtgacagccaggatgctgacgccgtaagctacgatcacatggaagtccagaaccagtttattgttgtctagggacacgttgatacctctggtgatgctgtcctttttcagcagctttaccagaccatctttcatgctgactccggccatacctacgataccaaagcactctaccgccacactgccggcatactgtgcaatgacttcattatcaatgacaatatttcccatatgggtattcatagaagaacctttcatacagaacctcctttatattcggatcaattgtttcttccgatatctccggccggattttcccggactcagacatatataaatgtattttaacagctttgccatgaaaaagaaacataaaaataaaaaaaataaatattttttgcttgcttttattttgtttttctgttaatatatcaatgttgtgagcatttcacatatgttttattaaaaattttgattaaaagtaagcgtaagatgcgcgttagatcgaggaggtgtcaagatggctaaatgtgatatttgcggtaagggcgttcatttcggtaacaacgtaagccattctcatagaagaagcaacgcaatttggaactctaatgttaagagcgttaagtgcaaggttaacggcggagctagaagaatgcatgtctgcaccagctgcttaaaatctggtaaagttgaaagagcttaatcttctacgataatattggattttagaaagccagaaatgataaatttcatttctggcttatttttttaccaaaatcgctcttcctgtttcctttttaaatactctttgttgatttgtccagccagctctccgtcaccaaaaaggttgtccgggtgaaagattttgatcagatcccgatatctcttccgtaatgccaatggattattgacaccgcgaaataaaagctgtactacggtaagggtattctcagtgccgtcttcgtcagaagcttttggactgaccgcttcttcccggagaagtcgtctctctttttccagctttttccgatcctcttccaactggcggaagccgtcctgcagaattgccatttttttctcaaaaaacagactttcttctttcagacgttttcgttccataaccgtacggcggttcaaagcatccagttcatcccggagtgttacacgttcctcgaggaatttgtcctttgcctgttctaattcggtacgctcctgctgcaaacgcatattctcctgaaacagccagagcttggcttctttcagttcctctgtactttctgtcctgatgatttcttcccaatcaatcatgctcaaccctcttactcacaactgctgaaaagataataccctgcaaacaacagaagtgccaatatgatcaatccgatgagccgattgtggatcaccatcatcaacaacatgccgatagctacaaaaaatagaatcaggccaatgatttttttcataaaagacccgctattcatattctcatcttattatatgcagagtataaaaattattacttatcttcggaaggcttttctccgtcttcggggaatgcaatatcgacaacttcggcatccgacattccttctttttctttcggctgggtaaatttatctacaatatcgggaatcatatccagaatcttggtaacagtatcctgatttttgatattgaccagcttggtggaaccgtttttgatcaccagtacggcactgggagtcattttaccgcccagaccaccggctccggatgcggatcttttctcggaattattccccgcaccggctccgacaccgaaagtaacatctactaacggtaatataatggtatctccgatcttggtagcttcgcctactaccgtctttgtggagagcacggtatccattccttttaaaagagattccacaaccccctgaaactgattatctttttctgccatattaaacctcctgtttttaatctgttattctttttctttattttgaaattgtctgattttatgctgcaatagcttaagccgcttatccataagcaggcaaatggtatgaaacaatacacacgctaaggtaaaatggccggatgttttaaaattaccctctaaaattgcctgttcaaaatccggagtgatacagatgtcttttcccaattgaggaagtatcataccgtagattccgtacaggtagcctgtggtatccggtgatccggtgccgatgcgggccgtaagttccagctttcgcggacgtaatgatttcagaatatgaccgatgcggtttccggcatgccggagtaatcctctggtctccggatcattccataaatctttataaaaagtaatgttattcagaatatgtttgattttatcacatattttaccgactgtgtaccggattttattaaaaaagcctctttctttcgtgcttttttgctccggaatcggttctttcacagatggctgcggatcggaagcgggaggcacagcttcctgtggtatttccgttgtgggaggaaccactgctttttttgaggacttcccggtggaaacgtgctttttctcttttctctcgtccgaggaatcatatacggtaaaaaaaaggatctttgccagaagctttcccggctgcggataattgtaaaagattcgcaccagaccgaataaccatcggacttttacggaaaaacgcatttcatcggcactcttctgtccggatgccttataacaaagagggaaaaacaataccaaaagtattaccgtaagtgcaatccccagaagtaccagcaacagaattcctaaaatgcccaatattttaaaaagaatcgttaacatagtaaatactcccgaagattacagtcgcctctggcgtccagacattctcctgtgatctgttcgatcagctgcaatgcctcctcatatcccgctgcaataccaagaatcagaaattcttcttttttgtaatgaggctgtatgagttgcctggcatcaaaaatatctagctgatcggccgggttcttcgccggagtaatgagatagacatttgccaaaagaggttttttttccagtctcttttttagtttatccagtttttcagatgcaatgctttctcccagatagagattgagagcaaacgtaagctttcctgccataaataaattcctttttgttaacctgccctgcagcataggttattactgccaagatgagcttattatagcatagattcttctatattacaatttttgtcgcttgacttttccggatgatattttatactgtaatcagtactaatgaggaggaaaaaccattgaaagttataacgaagatggagcttcagtcggatatggttcttggagaagacattcaggatcagaatcatgtcatttatcctgccggtaccacagtaactccgcagatcatagaaaaattaaagcgatacaatctggtatgcgttacgattatggaggatattgatttcgccacgacccattatgagaaaattcgctttgattccaattttaaggcatttgaacgtgcttatccgatttttctggctgagtataaactggccatgaaacaattattggtcatgggaagaaagccggcggatatttttctacttaccatatatcaagaattatactattatattacttccggatccgtattgctggattatctgtataaccttatgccaagtgaggatgaactgacgtatacgcagggcctgaatgctgcactgctggcaggtacgttcgccgactggctctctatgtcagaagaagaaaaaaacactttgattctttgcggattctattatgatatcggaaagctgcagcttccttatgaattgttgtggaagccgggaaaactcacagaggaagaattcaagatcatcaaaacgcatccggtggtaggctatacttccgtacgtaaccaggatttaaacgaacatgttaaaaatgcagtgatcatgcatcacgaacgtctggatggcagcggttatccttatcatatgtcggggcagaaaattgatgtctatgccagatatatggcgatcattgacgcttatattgcaatggcatcgccgagaacttaccgcaacgcacttacaccgttacagattttggggaatttcgaaaagagtctggacaagtatgatgtggaattgttaatgccgatcatgaaacggatcgcagacgcacaaatcggtaccaatgtgcagttgaatgacggaagtgtctgggaagtcctgatcattcatcccaataagttctcccgcccgattctgaaaaatgaaaaaaatgaatttgtggatcttttgcagagaaccgatctggaaatcgttaaaaacgtataaatataataaataaaaataagaagcgggaataatcaattcatccattgattattcctttttctttcctggtattccgcataagctttttccaaaatctgtttttcgttggcaaacttcagtaaatgatatgcttcatgatatttataaaaaccggaatccgcaaaatattcttctctctgcggcttactgtaataactgtcggtactcataagataccagtgaacctcttttgctaccacatcctccggtacggtaaatgaatattcacttctaccgacgtagtccacgataaatgcccgggaaccgctctcttccaatacttctctcaatgcggtctcttcatgggtctcaccgggttccaccgttcctttcggaagaacccagccttcgtatttgtttttgatattcttatagagcagtaaaatctttccgcgaaatattacgactccgccgcagctgatagcctcaatcatgttccttaacctccgattactgtttttcgctgaagtacgcgtcaaaaatacgtcttgcaatgggcacggcgtaatctccgccgctgccggcaccttccacaataatggttacacacacttccggatcttctgcaggagcaaatccggtaaaccatgcatgactgtcacctttaatattattatattccgcggaacctgtttttccggctgcggtatattcaagtccttttaacttggacgcggtaccctcctggaccacatcagtcatcagttgtctgagaatcgcagactcttcttctgacatcagactgccgtattcgctgggtttgaaacttttaatgacagttccttcatcattctccacgtgatcgatcgcgtacggtttcatgaggactccattgttggctatggcacaggtgatcatgttcagatgcataggagtaatctgtgtcttaccctgaccgatggaggtctgcatcatttccgccggaggagtatcatcggataccagcgctgaacttctggcataattcagtgtcaatggcagctctttgttaaacagaagatcatttaatgtctcctgaaaagcagtccggtccaggctcattccgatattagcgaaggacgaattacaggattttgcaaaagatctggtaaaatccaccgtcccatgactggagccgtgataacagctgatcttgctattgcccaggcgaaaagctccgttgcaggtataagaataattttggtaggtattcggattttcccgaatatattccaatgccgtcacaattttaaaggtagaacccggaggatacaatccctgtgtagcccggttgaccagtacggtactggaatcgttatctaccagatcctcccatatttctccgatggaattgggatcaaaatccggatgggataccatggcaagaatcttcccggtagacacttcggttacaataatggcaccgcgatagatatccagctgatcatttgccacctgttgaattttaacatccagtgtagtgtaaacattatccccgggattcttttttccggcagtatcgtttttcaccttgttactcaaggaagtatttgtattgatcaaataataattggccagcgcttcaacacccattctgccctgtgtggaatagccaacaatgtgagaaaacagatttttgtaagggtagttacggctctcttcttcctcatcattcaagattgtctccgcaagtacctctccatctctggaatagatggatccccgataatttctcgacaacagtatctgctgtcttgaattatagctgttgttgatcatgtcctgttcactcgtggccacaaaatgtcccagatagagaaacagacacagaaacagcacaccgactgcacctgcagagatccagatctcccgctggtttcccatacgtttgtgattttgcgtttttttattttctgccacttctgcgctcaccttccttttgaagccggatgtaaattccctgtataatgaaaaacatgatcatcgtagtcataacggaacttccgccgtaactgataaacggcaacgttacacctgtcagagggataaacttggttcctccgccaaccgtcagaaaaatctgaaaaatatacataataccgatgccatatacgatcagctgataaaagcggtcgtgaatttgtaccgaaatccgcatcatttccaaaaaactgctgatacagatcagaatcaggcacattccaaagataactcccagttcctcacaaatggatgaaaaaatgaaatccgcttccacatacggaatcgcggtaggattaccttttaataatcccatgccgaaccagcttccgcttccgatggcaaacagcgactgtgtgatctgatatcctttactgtcgatgtatttccaaggatcctgccatgccagaactctgacccgtacatgatcaaacaacagatatgccagataagaggctgcgcctccgccgatcattccggccgccagatagagataatttttcgttgcggcaaaaacaacgaatacaaaaccaatgaaaaagatcagcgcacttcccagatcctttgatacgaccaggacaactacatgagctcctgcaatcacagcagtcagtaacacccgctgaaaggacacattttcccacaatgcacccgccaggaagaaaaggaacaggatcttcacaaattccgaaggctgaaatgtaattcctcccatggtaaaagatattttggacccatgggttacctctccgagaatcaataccgtactgagcagaccaattcccagtgttgcgtataaccaggtgatttttttgaaaaagtgaattctgccaagtaaaaaaggtataaaaagcgacatgatcagtgataccagaacaatcacatactgtcggatcgctttatcaaaagaaagtctggataccatacataagccaatgcccaaaagcatgcacatgttattgagcaaaagcctattgatattctcgtagatcagagaaaccatagtaatcgttgcgaacagaaaaatcagtataaatgcaaagaaaaataaatactgaagatctcggccggtaagagacagatccaaaaaacaaaggacctgtaccagaaacattaaaatattctgcaatataaagattcctttggaatattcgccaaccgggtagcggaaagtataaaaacagctgccggtatagagcaccataaaaagggctatgaaatatttagataattctattacatattcctgcatgaattagggatccctttctctattctacgccacgtttttcatgaccggtggtatattccgtataaggcagatccgttctgcttccgtaaaaatactccagtacattccaagtctcattttccgattctgttgtaaattccaaacgacaacaaaaactgtccttccattttgcaactgttttatgcagggagaaaggaacactgttatagataatattatagcaatgcgtacagtttcgcattaccggaaacactttatggtaacgatctgtcagttctgtgattccgaaaccttcctcgcgtcgacaatgatcggtagtcttcgtcacacagttagccgtcaccatcataggaatccgaccgtacaaaaatttctcagcaggaagaatcccattcacgatctgcctctgctccgcataattcagttctaacggcaggcagaatccgtccagataatccgtccagaattctatactgcggcaattccaaagatacagaccatgatctccgtacctcttttttgactgtaaaaaatcccactgttgcagaaggccaacgtgttccagggaacttatcaaaaatccgtcaacagcttctaaattgtcacgaatgcttttctccaacaatttcagataccgactgtcgcgtaagcgaatgattttaggcagagcgagcactgtctctgctgaaattttttttaatatttgtaagtgctctgcgatagtatccccccaggtgaggaacagatcactgtcaacataaattcgtaacgaagtatgttctttcggttttttaagaaaagacgatctcagaaacccgttccactgctctgcggttcggagatataacgaaaatccactttgtttctgcatatgtccgttatgtgctccggtaatgtcaaaaggtttctgtacctctctggtataagggaagccgtttgctgtaatcagtttctgctctaacagcgacagcccttttctccggagctcattcattgtcttcagaggatagaatgcattttcacttacccggatatccatggtgccatctaaatggaaattacttcctcccaattttcccaattgtttggaaatattttccacagtaatcggctgttttgctgcttcctggacggtctctccggtaacggttacctctgtctgatcacaacgaagagtcagtttagcaacggttccggtgagaaaagaagccttcatttgtaccggaagtgtcagatgtttgtataaatatttttcgcgaatctgctccaaaacctgctcatcactgccactgtaggcaggattgttcagagtcaccatttctttgccgttatgtttatgataatagccgttctgccgttcgctgcgaatataaaggcaggataaccgatgaaggtcttcccctgaaatgaaaagcttttccccgggcttctcataatatttatcaatatatttccgataaacagcggttacaccggcggcatattctggtttcttcatacggccttctattttaaaagaatcgattccggcatctatcagttccggaatattctcaatggtacacatatccttcagacttaaaggataacattcacggcggttaccacctacggtatacggcagtcggcatggctgggcacatctgccgcggttgccgcttcgcccgcccaggatactgctgaagaggcattgaccggaataacagtaacacatggcaccatgaataaaacattctatttccattccggttacttctttgatacgacgaatctcttccagactcagttctctggcgggtaccactctgcaggcaccctgctttttcagaaattctgcaccatattcaccggtgatcgtcatttgggtacttccatgtagttccatctgcggaaaggcatcacggataaaggcaaatacacccatatcctgaatgatgacaccgtccaggccggcgcgataataaggcatcagatattcataaagctcagagaactcggattcttttaccagggtatttacggtaagatatacttttctgcccaacaggtgagcatatcggatacagtccaccagttcatcttccgaaaaattctcagcatatgcacgtgcgccaaatcgatttcctcccagatagattgcatctgctcccgcgtgtacggctccgtaaaatgcttccgcattcccggcgggagcaagtaattccacttttttatttctcatagacatcctctgttgcgtatgatacacgcttatacaaatagctgcccgaaaacggacagctatcaatttatttatcctttagttctgtctccagacgaacaatttttctggcatcttcgttcaactgcttctgtagctcttttccctgtttttccgcattttccagcttgatctgcgcggaaatcagctcatgcttcagatcatagagttccttttctttcccctgcagttcttcctccaaaatggaaatctgctttttggctttgaaataatcatctgcaatgttcagctgaagcagaacgctctgtctgtccaaagactgtcttcgaaagctgtccagtttcccatactcagtcattttattattgatgtaggaagcaatcttctgcatgtaatcttcgctttcatagccgcttaaagtaaatactttaccacctatgagcacttcagtatctgttttcggagacattgtcaacacccctcttaacaatcttttggaaacacaatatgtgccatcttgtaaaaaatataatacaagatttattatatatcagattatatcgagtggcaagcaaaaaataaccaattatgcgtcctgattttctaaagctttatccccaggtgacgataagtcaggtctgttaccacacgacccttgggtgttctactcaggaacccattcttgatcagataaggttcgtagacatcttctatagtgccggcatcttctccgatggcagctgcaagggtatccagtcccacaggaccaccgttaaatttctcgatgatcgtcacgaggatattcctgtcgatatgatctaagcccatcttgtccacatccataagatccagtgcggttctggctacttcttctgtaatgattccgtcgtatttgacctgtgcgaaatcgcggacacgcttcaagatacggttggcaagtctgggcgttccacggcttcgcctggccatctcttttgctccggcaggttcgatctctacatccaggattcctgcggagtgcatgatgatctgctgcaattcctctatggtatagaattccagatgatggatcattccgaagcgatcccgcagaggtgctgtcaaaagtcctgcccgggtcgtcgctcctaccagcgtgaacttcggtaattccaggcggacggacctggcactggagcccttaccgatcataatatcaatacaataatcttccatggcgggatacagtacttcctccacctgacgattcagacgatgtatctcatccacgaacagcagatctccttcttccagattgtttaagatggcagccatctctcccggcttctcgatcgccggtccgctggtcaccttcatatggacacccatctcattggcaatgatcccggcaagggtggtcttaccaagtccgggtggtccgtagaacagcacatgatccagtgcgtccccacgctgttttgctgcggtaatatagaccttcaggttctcctttatcttggactgaccgatataatcgtccagcgtctggggacgtaaggagccttccagtttaatatcttcttctgtgatatttgtctctatcattcttctggacatagtcgttgctctcattccttaaaacaattttttcagggcagcctttaagattgctccggaatccatggcctccacatcttcgatggcattgacagcctttaaactctctgcctgtccgtaacccaatgccaccagggcttccacagcttcctttttcttctcactgtcaatatgcagacttcctgcggtcaggatgccttccgcaccgcctgctgcaatctctctggagatcagcgtatcgtcaatggatatcttatcctttaattccaggatcagccgctgcgccgttctggtgcctacgcccggtgccttcgatatcgctttggcatccccggacataatggcaaaccgcagagaatctgcatccataacagacaatatggccagtgctcccttaggtccgataccactgaccgtaatacagagcttgaacatctccagatcgctccttgagagaaatccatataataaaaaggcatcttccttcacataggtatatgtatagagtcggacctgctctccgattcccggaagtctcgatgccgtgtccgcagagatccggacattgattccgaagccgttgacatcgatcaccgcgttatctaccgtaacatcttccaaaaagccatttatatatgcaaacatgtatgttaaatcctcgtctttcctggcttgccaaatcatagcacataaaattcggctacgatatgtttatcataccatagccgaacatatgtttcaagtagttttaactctggatctgttttagctggtagaactctcccttcagagccatcagctcatcataggtaccatattccgtacaatgtccgtcggcgattacagcaatcctgtcggcatcccggatcgttgacagtctgtgtgccacaataaacgttgtccgcccctccgtcagattgtttaacgcttgctggatcagtttttcggagatactgtccaatgccgaggttgcttcatccagcacgataaccttcggatcccggatcagtgctctggcaatagaaatacgctgtctctggccgccggatagcttgccgccgtgttctcccaccatagtgtcgagaccttttggaagggatgcgatcaagtctgacagattcgcagccttgatcacgttctgtaattcttcttctgagacattttcacagccgtaggtaatattatcgcggatcgttccggagaacagaatggatgtctgaggtactaccgctaaatgttttctgtatgttcgaagatcgattttgcttaaatccttgccgtcgatcaggacttttccactctccgcctgatggaaaccgatgaccaggtttaagatcgtggattttccggcaccggactcgcctaccagtgcaatggtctctcccgctttcacatgaagatttaagtggttcaatacgttatgctcgttgtttttgtaatggaaacatacatcttcaaagtcaaaagtaccggtcacctgctccagtttttccttgccttcattgtcttcgatatcctcagacagcaatacctcaccgatggaattcacggattcgataccttttgcaatagtgggcagcagggtaacgatagaagatacctgattgaccactgtagcaaaataactctgatacagtgtgatatcaccggcctggatcttcccaccgatggcgagatatccggtaaatgccaggcagatcacctgaaagatctggaataccgcccaacccaccgatccaaacagtgcctggatcagatccagcttatagcccttctccgccacagcaaacagctgcccgctcattttggatacttcttcatcctccagggcatgggctctggtcacgggtaccagttccaccatttccatgactctggcggaggtctcttccatttccttacggaactccgtatttctcttcttcataatattccggaaggtaaccatggtaattgccgccaccggggtggtcaacaggaaaaatataaatacgatgcggctcttactgatagtgaccaccagtgcaaccccgatattcagggcaatatttaaaatacttaaaaataactgtgtggaaagaccttccactgcttccacatcgcgcatgatcttggactgcagtcgtccggactgggtctccacatgataggaaatggacagctgctgtaatttccggatcagtgctttccgaagtcctgtctccgcatagcgggtcgccaggctcttataggaagtgtacagataattcatgggaatatttagcaggatcagtcccgcttccagaatactgtaaaatataatattccggaaagtatccggattgtgcgccgtcacatcgttaataatattcgctgtgatgatgggcaacacccagacacaggcatgctttgcgaagaagcagatcactgccatgacaaatttatgataattccccttatacagatgcatcagtgtccgcaggggatgtccctgattcttccgatagcattcaataaaccagctttcggtgtccatcttttttttcggagatgtttttgcttcaaaatctttcatatttgcaggatccctttcctatttgttcgttcctttcattttagcgcaattaatatgcgctttccagtccatttttgcgctctttacctataaacaactgtttttttgcgaaaaaatagggctgtgacagaacttttacattcctcacacagcccttttcatagcattattttttacaatcgattagttgttgatcagcttatcgttctcattgttccagctgtaaagcttacggatctcttcgccgaccttctcagaaggatgctcagaagcaagctttctcatagccttgaagtgaacctgcttgcctgcgggagacatatctaacaggaactccttagcgaaagtaccatcctgaatatcggacaggatcttcttcatggtcttcttggtctcctcagtgatcagcttgggtccggtaatgtagtcaccatactcagcggtattggagatggaatatctcattcctgcaaatccactctggtagatcagatctacgatcagcttcatctcatggatgcactcaaagtatgcatttctgggatcgtaaccagcctcaaccagtgtctcgaaaccagcctgcatcagagcacatacaccaccgcacagaacagcctgttcaccaaacagatccgtctcggtctcagttctgaaagtagtctccagaacacctgctcttgcgccgccaatacccagtgcataagccagtgccagatcctgagccttaccggttgcatcctgctctacggcgatcagacagggaacacccttacctgcctggtactcacttcttacagtatgtccgggacctttgggagcaatcatggtaacatcaacgttcttgggaggtacgatacatccgaaatgaatattgaaaccatgggcgaacatcagcatattgccctcttccaggttgggctcgatgtcattcttgtacagatcagcctgcttctcatcattgatcaggatcatgatgatgtcagcacgctttgcagcttctgcagcggtaaatacttcaaatccctgtgcctcagcctttgcccaggacttggagccctcgtacagaccgatgataacatgacatccggaatccttcaggttcagtgcgtgtgcatgaccctggctgccgtagccgataattgcgatagtcttaccctctaataaagagagattacaatcttcctgataaaaaattttagccattttcttctcctccgttatgagactaaagatttataactgatagggatattccctagagctaacgtaaacgtgtgcctaatcctcgatataagttacgttctcaatacctctgcccagacctgtaataccggttcttgcgagctccagtacttcgtactcttctgtaaaacgctggatcagtgcattaaccttactgtgattaccggtgaactccacgatcaggttctcggcaccgacatcaatgatcttcgcgcggaaattattggcaagaaattccactccctgtcgtgtctccaggcgcttcttggggtcaacctttactttgaccagtacaagctcccgataaacgctgtcttccggatccagttccttgatatcccggacatccaccagcttccctacctgcttctcgatctgctccagaatatcttcatcaccggatgtcacaatggtaattctggtaaagcggggatctgctgttactcctgccgtaatactttcgatgttgtaaccgcgtctggaaaacaatccggaaatacggctgagtacacctgatgtattatctaccaataattgaaatactctcttctgcatgcgtaaaataccatacctttcgtatttcttctttcttcaatcatgtgtttccatcacgaaacagcgattgtattcttaatatagcaagatgattacagaatgtcaattagtgaatttaacattatgattgatgtattttaatcatcattttctgcacattttgataatgcaagggttccggttctggctacttcgacgatactgatcgattgcagcatcttgatcagagtatcgattttctccggtgaatcacatatttgcaacatcataaaatgttttgacatatctacgatctctgttttcataatgtcgcaaatttctatgatatccctacgattattcttgttatatttaacttttaataacattaattccctggtataacactgttcctgggatagcgtttttactttaatgacatccagctttttattcagctgcttttcaatctgttccaaagtacgttcatcaccggaactcacgatcgtcatacaggaaaccgcatgatcatccgtctctcccactgcgagactgtcaatgttaaagcatcttctggaaaacagtccggccaccttgcacagtacaccggaacggttttcaaccagtacggaatatattctcttcatctcagtacagccccctttgttatttcaccagatccataggatcgatcagacattctaacagcatcgtattgtcttcagccagaaaagtatccaacacttcgtccacatgctccatattattcaaacgcagataaggaatatcataagctacggataatttctccagatcgggacttcccgacagatctaccacagaataatgatctttgtaggtatagtgctgatattcgcgaaccataccgagataattgtttttcaatacaatgatcttgaccgggatccgatgctgtctgatggtggccagttccatcatagacatctggaaagatccgtctccgcatacggcaatgacctgcttgtccatcgcggctgttttggcacccatagccgcaggaatggaatatcccatggttcccatgccgccggatgttaagaacttcccttttttcacgatatgataaccgcaggaccagatctggttctgtcccacatctgcgacatagatgccgtcttcctgcattttctcggaaagtctggtaatgaacgcagccggatctacaaaatcgggattcggggttctctttttctccattgtggaacgatactcatttaaggtagtaagccattcctcatagtcacaactgaattcttccttctggaaatcctgaaaaatgtgttttgcatcgccgaccaatgggatggagggaccggcatttttaccaatctctgcgggatctacatcgatatgtaccaataccttattccgggtaatcagatccggctgactgaccgcacgatctgctacacgggctcccaccataatcaacagatccgattcgttcatggcacggtttgcatatgccttgccattattgcccaccattccataatatagaggatgttcagtgggcatgacaccgattcccatcatggtagacactacgggaattctgtgttcttccgcaaatgcccgaagctcatcttccgcctcactgagcaatacaccgcctccggcacagataataggccgctttgccttttccaattcccggatcacctttttgatctgtacggcatgtcccttgaccgttggtttataagtgcggaggtttacctcttccggataatgaaaattcttgatcgtggcattctgaatatcaatgggaatatcgatcagcaccggtccttttctaccggtattggcaatataaaacgcttccctgaatactctgggaatatcatttacattttttaccagatagctgtatttcacaaaagattccacagcgccggtgatgtccgcctcctggaatacatcgcttcccagcagttcgctgttcacctgaccggtgatacagatcagtggaatactgtccgcaaatgctgtagcaatacccgtgatgacattcgtagcgcccggtccggaggttaccgcacagactccgggtcttccggtcattcgtgccacaccgctggcagcatgtgctgcattctgttcggtacggatcaatactgtcttaatatcggaatccagaatactgttgaaaaaaggacatatcgccactccgggatatccgaataccgtacttacaccttcttcttccagacatttaataatcgcatctgctccaatcatgtcattccactcctttatctatactccataattttccgctgtttattttattccatcaggcttttggccagcttcacagcatctgctgcatccttggaatagccgtccgctccgatctcatccgcatattcctgggtgatcacggctccgccgataatgattttggcggtgataccttcctgtttcgcagcggctacgatctcccgcattctctgcatggtggtggtcatcaacgctgacagggcgataaactcagcgtgatgttcctttgccgtttccaaaattttggcctggggaacatcctttcccagatctatcacatggaaaccatgatttttcaacatcaacgctacaagatttttaccaatgtcatgaatatcgccttctacggtagcaataacgactaccggcatttcttccccactgtttccggtctgtaataaaggctccagtacttcaatagaattcttcattgcttctgcactggcaatcagctgcggcaggaaatacttgccctgatcaaaatattctcccaccagattaatagcgggaagcagaacctgattcaataattccacaggtttttctccactctccagtgcttcgtttgttatttttacaataccgttacgattccccttcagaactgctgttttcagtttttcctgcatttcattgatctgaggggtatctttcgaagcagttacagcagacggtacttctgtattgtccgtggaatctgccttcgttccctgttgctccaaaagagcaagttttctggataattccgcttctttttcttctctgcgctctttgacgcctccggcatattcaatataacggagtgcagcctcttctttattcaggagaagatcggttgccagcgcacagctcatcagcatctcctgagagggattggcaatcgccatcgtcagtcccgactgaatcgccagcgtcagaaaagcggtatttacaaaacctctctccggcatggcaaatgaaatattggataagccgcaaattgtggcgaagccgttgctcttgcagtaacggatcgtttccagcgtctccagtgcagcctttggatttgctccgacggttgccaccagaccgtctactacaatatcttcctttcgcattccaagtgaaagtgcacgatcataaattttatgtataatctcttttttctcttccatgtccttaggcagacctgcatccgataaaggaagcaggatgaacattgcaccatatttagctacaataggaagcagcttttcgaatttttccgtttccagagacaccgaattgaccaaagcacgtcccgggtaattacgaagggcggcttccagtacttccacataactggaatccagcgacagtggaagattcgtcacaccgcttacctcctccagcgcccggagcatacatagcttttcatcaataccgctcatccccatattgatatccagtacctttgcgccacaggtttcctgctcttcggcgaactggatcaccttttcaaaattgccttcccgcagttgtgcctgaagtgcctttttgcccgtagggttaattctctctcccacaacgaaaaaaccatcctccagcccgaagctgtgggtaatgcgttcggaggtcagataccggatgccctccggtcgtctggttgctgttgcttgtgcaacggtgccgaaacgatcatgaagctgccttataaattccggagtggtgccgcagcatcctcccagtatggttgcgccgacattcaccagtacttgcatttcttcggtaaactcttctgcttccatgttatagcaggtagttccgttttcatccagaaaaggcagtccggcatttggctttgcaatgataggtatcatggtaacggataccatgtcggagatgatgccttccatctgtgccggaccggtggaacaattcgcaccgatagcgctcgcacccaggctttccagtacgactgccgccgttttggcatctgtgccgaataaagttctgccatccgcttcaaaagtaagtgtagcgatcaccggaagatcacagacttcttttgcagcgatcaatgccgctctggtctctgccaggctcatcatcgtttcgactaccagcagatctgctccggcatccaccaggcagagaatctgctctttatagatagcgatcagatcttccagctccatttttcccatagggcgcagctgctcgccggtcatggtgatatctccggccacatagaccggatgtcccggagtacttgctgcagcttcttttgatatcgccaccaggtcatggatcatagaggacatatttttctctaaatgatattctgccagttttacacggtttgctgtaaaggtaggtgcgtacagaatattggttcccgcctgcacgtattccttctgtagctgtagcattacctctctatgttccagaatccactgctccgggcagactccggagggcattccggcctttaccagattggagccggtggcaccatccagatatatgatatgatcttttgtgaaatcaataaatttttctcgtgtcatgtttctcttccctgtttcttaattcttttaatcataccacattgtgcttttattcgtaaaggggacgatttaacattatatggttgcgcaaagtctcagaatatgataaattttatgtggattaaatgatttggaggatgattatcttgaagaaaaaaatacttgccattaccgcaggacttcttactgccatggcacttaccgcttgtggaaaagatcctaagctgacacagttcaagggtgaaatagatgccttctgcacagaaatctccgatatcgatactgccatcaataacgtagatgcggaatcggatacagcaactgatgaattgctgggatatctggatcaactggatacctcttttcagaattttgcggaattggattttcccacggaatttgattatctggaatctctggcagatgaagccagcgcgtacatgacacaggcagtggaaagttatcatgaagcctacagcaacggcggctacaatcaattgactgccgattatgcaaaagaaaactacgcaagagcttataaacgtattcagatcattattacgttcctgcatggtgaacaaccggaaaatgtaaatctgaccactgcagaggaaacagcagatgctgcttctactactgcagaataatacgtaagaacaagaaaatccccgatgctgatgcaccggggattttcttgttcttttttctgatagatgattattttaaaattttaatctgaccgatcaggggaacttccttctcctgctcctggcaagcatagatcagacccatgatccagcatacaaacaggaaaatactcaggatagaacctacaaatccacctactttaggaataaaattgacagcgcttgcaatgatctgaccgatcagaattaccagcgcctgattcagatgaaacttagcgccctctttatcacctgcgcaaaacgcaacgatccagccgatccaagtgatgtaagcaatgatacctgtagtttttttattcattttttctccctccgcactcttgtgcttaaaaaattctgtatatgtaaaaattgcaaatacagtcatagtgaaatatgaaaacccaaaagcaaaatgtttttcaaaataaaatttccgatcatgattgcgacagctgcatacagatgccactcatggaacttccatcctttgatcccaccgatatgtaatctggcaagagtctgtgtcagcataaaacctccaaagataacaacggtataagttaccagtggatgataccaggttgctgacagaggatgtcctgcaagcagtgcacttaccgctctggttccgccgcagccgggacaataaaatccaaacaatcggtagaccacgcaggtatatccctgcagattcggaataactatatgaagatacagatagattccaatgctgccggtcagaagaaatatccatcctgtcagataaagataatcttccagacttctgctattcttagtacatactttcaaagccgtaacctaccatagccatagaaaatactactgcaagaacggtgatcaggattcccaatacaataccgacgatggagcagatcagtccaccctttgccagtccggtcttaccctgcttattggcaaatactgcacagataataccaccgataccaaacaaagcaccgatccatccggtacagcatccgagaacaatagaaagaatacccagtaccagactgatgatagccagcacattggtatctttgttctcaggttgtacaggtgttgttacagctacctgaggctgtacattagtagtatagtcttgataattgtttgcaggctgttctgctgcaggtgtctcctgtgcaggttctgctgtagaacttacttctgttgcggtagtatctac

SEQ ID NO: 11338 - DNA, 1497 bp, Unknown
  gut microbiota DNA sequence
gatttacagaaaggatcccctatcttatgcgttcaaatacaaccaagaaaaaaaatccatggaagctctttactgccatcattatggtgatactgatactcgttgcgctcgctgcgggaatactttatatgaaaatatacgagcctgggaagcgttcctccgactttggcagattacaacaggaatcctatcagggcatatttttgtccatgtccgcgccggaagcttcccccgaagacatctatcccacctatatgggatacgacgcggtatgcggttcccaccggatcgcatccttctccgacctgtccgattatctggaaacggccttctcctccggaaatgaggtaactcatgtcttcctcgtgctggatccgctctccctgtggaacagcagcctgcacagcgatgcacggttctctgcctccctggacgaagacctgctgtgctatgtggatacctacgccggtgccgaattcacggtcattttctctgcgccttccctggaatactggcaggcacatgccaatggagatctggacacttactgcaatgtgttccgggtactggcttcccctctgtccgccagagagaacgtgaccctctgcttccccggccaggaagaatggctgatctcgaacccggatgcctatgacactcccacgaaattaactgccgaagccgcacgttccgtaatgctgctggtgctgagcggctctctgcaataccggagcacagaaagctataacagcctggatcatttttgcacactggtgcaggatgccgtagattctccggccgatcatcctgatctgaccgactgcgagcttgtatttttcggcgacagtgtcatgggaaattatcatgattttgcttccatccccggagtcgtccacgctctgaccggtgccaccgtgcataatctggcagtcggcggttcctccgctacccggaatagcgatgacgataagtccttcccgaatgtcgtacaggactttttagaccataatacggaagaactctccggtgataaaaaactctgttttctcatcaattacggcttaaatgattattttgggggatttcccatcgatgattaccaaaacggtctccgcaccggcatccgggctctgcgggaatcctatccggacgcccggatcatagtcatatcctccaattatattctgtcttttgaaaagggaatggcacgcaccggtgacgaagaaaatgtattagaagactatattgccgcggctgaagaaatcgccgcggctgaaaatgttgattttctgaatatcaatgatgctctgcagtggaatgaaaataatgccgcagaatacctggtggattccattcatcccaacgaggaaggacgcttcctgttcggtgtggaggtgactagggcctggagataatccctgtccttcttagaactttgctgttaccagtgaatagcttcccaccgtgtcgatcacttcataggggaattgcagatac

SEQ ID NO: 11339 - DNA, 1350 bp, Unknown
  gut microbiota DNA sequence
tgctgcgatgcaatgagaaaacgccagcagacaataaaataacgcaattgttctggactgcatgactccataatgtacaacatcaggatctctgttaaacgctgtgatcagtaccggtgctgccacatatatgataataccgatcaactctgcaatagtaatcgagcagaaaactccaaatcttgctccctttttcgcccggtcatactgttttgcacccagattctgactgacaaaggttgtcagagccattgtaaaacaggtcaccggcaaaaatgcgaatccctctatcttggagtaggaaccacatcctgccatcgccatttttccaaatgcatttatatttgactgtacaaagacgttcgcgatcgcgatcactgaattctgaaaaccggatggtacaccattctggatgatctgcttcagcatagaactgtcaaaacgaatctctcgcaattccagacggtattcttcttccacacgcagcagatgaaccatacagagcagtgcactgacaaactgtgaaattgcggttgcaagtgctgctgatccgactcccatgccaagacctgcgataaagaaaatatccagaacgacattgacacaggaagaaataatcagatatatcagtggatggcgtccatcaccgaccgactgcagaactccaacaaagatattgtacatgacaacacccatagaccctgcaaaatatgtacggaaatacacaatagattccgggagcacgtccgcaggagttcccatcaataccaggatctttggtgccagaagcattcccaaaactgtcagcgcagcaccggccacaagtccaaatgcaaccgttgtatggattgccttttgcaggcagtctctttttttggctccgtaatatcgtgcaataacaacacctgcgcccatggcaatgccgttaataaaacctaccatcagaaaaatcagatttccagatgaactgactgccgccagtgcattacttcctagaaaatttcctacgatcagggaatcagcagtattatacaattgctggaacagatttcccagaaacaatggaattgcaaaaaaaatgatcttttgggagatacttccctctgtcattctcagactctttttcatagctaaaattactcttccctttcctgtgtcctttggatcaatagagatgaaggactgctcttcgttatagttgcctctctaccttattatttgcaccataccatgcatatgttgctgatgtcaatgtaaagactgcttgtagagctggaatttggaatgtgctttataaattttttccgatcccctcaagttcgttcatggaatctttgtttttttcaagtt

SEQ ID NO: 11340 - DNA, 25192 bp, Unknown
  gut microbiota DNA sequence
ataaaacaggcaggaggatacagaaaagaataaacagttgatggcaaccagaagttactcgtgcaaaagacttttggaggcttctttttgtgtaccctaaaatccattcatttttaattattataggactgaacaggacgaaaaacaagctgaaaaagggtaaaagtagggaaaagcagaagttaatcgtgcaaaaaagaaagttggtgcttgaaccagaagttagttttgcaatcaactttttttcaaaaaagttaaagttctttgtaagatttgaagaataaatcacatgtactatatagaggaacaatttgagcctctaaaagtgtagcaaaaaatcttatgaaggaaaggaaaacacgagtgagaaaaagaaaacaaaagagtggaaaaatagttgctttggtattggcactgatttttgcttttagtgtgccggcacaggaagcgcatgcagaggaagcgtatcttaacgagaatgccactatgaaagtaactgtaacaaacatgagtccggaacatagtatttcggatgtgcagcctataacaacgctgtttgattgtgaaattattatggcatttaaaatggacgaagggttgtgtatgacctttactacatcttgtatgggagctgcaaaggttataggagtcaaggatatcaaggtacagcagaagatgtggtatggttggaaaacggtactgatttcagaaggggcagaagattctgatgctgcaatttttgctgcggatttaaaatatccagaagccatcaaggacaaaacctaccgtgttatctgcacacattatgcggatttagacggctacgaagaagtcgtgaacgacacgggagcttttaagtttacctattaacgttctatgaaccattaagtaacagacctgttcatttgctacactcgatcaaaactaaatattatattggccgcggacagcagaaaaaacgttatccgcagaccgccacagagggcgtgggatacagcacacgtattcagaaagtatgctaagacctgcataagggtaaaacgaagggaaaaataaaataatctgcgattgtcatagtgggtgggacaaaatcttaacgtgaaagtataaagggggaactctttcagggaaaagatatagctgaacgcattatagtaaaggacatttctgtcagggatgacaaaagcagaaacagaaagcgagaacaaaagacaatgagaaggtacatattggctaatccgatgatcagatccgcagggtacgatgcacaacgacaggtgctggagatggagttcgcaagtgacggtcagatctgccagttcgataatgtaccggaggagatatggtatcggtttcggagccatcaccttccggcgctctttttccaacatttcattatggggcattatccggagcgaaaaatgcaggaaatagggtagaaaacccgggcatacaggaaatactcattcacagaggggaatatcattacggaatatcgaaatatagaggtaaaagctgcggggataggaatatccgccgcggcttttaaagttttacataaatctctttcccaaaaaagtggaatatgctatactgttacagaagtcttgtctgatggaaggaaagatttcgaaataggaagagagacgtagaaatatttatggcaagagaactccaacagacagcgccggatgatcggcggagaagagtacagcggttgaagaagatgatcataggcattgtgatcgtaggactgttgattcccatcctgtgctgtgtctatctgatctgcagactgcatgcgatcaatgggactttgcgggatctggaacagcgcctggaggaactggatgccagggaccgggaacggcagaccctgttgcagcagctacagtcagagactgcaatacagcaaggtgtccaaacacaggaggaagtaacttccggtgaagtgtcggagcatacgccggagagtgatccaggacaggagatgattcacaaggtttatctgacatttgatgacggtcccagtatttataccgatgagatactggatattttggaccggtatcatgtgaaagctactttttttgtggtgggaaaggatggctctgaagcggaggcggctttgcagcggatcgtggaggatggtcataccctgggaatgcattcttacagccacaagtataaagaactctatgaatcgctggatagtttcacagaagatttcgcacggatcagagacgacatctaccaggcgaccggtgtggaaagcgtctattatcgttttcctgggggcagctccaatacggtcagcaatattgatatgcatgaatttattgattatctggacagtcagggcgtggaatattttgactggaatgtgtcctccggagatggcggaagcaggaatctgtctatcgataccctgttggagaattgtacagaggatatcgataccagagatacatcgatcatattgctgcatgactctgcggagaaaccgactacggtggaagcattaccggatatcatagaaaatattctggccagaccggatacggtgatcttgccgatcacggagaataccaggccggtacatcatgtggaataattgcaattttgaaagttcagggaaccggagaattgcattatattatagaaaatatttataatagaacaagagataaacggaggtacataatcatgggatttttctcagatttgaaggaagatctgtcacaggcggtgaatgaactgatgccggaagaagatctgaatcagggagacgtcgcagagactaaagagcaaccggttaagaatatgccggaaacgacagaaaaagtgcagacagagcagcccacagatgcaacaaaggataatgcagcgttggaagagatgctgaagaatctggattctattgagatcccgcaggcaaatgcagaagaaaagcctgtggaggaagcagaagagacaccggaacagtctgcggaagaagcagcgctggatctggatcatgtgcttcagaacgatatgaccgtaggaagtgttctggaacaggaacatagagaggaaaacaaaggagcagagaagagaatggacgtaaagaccgcatcagatgaaaacgcaattattactgccggcatggtgatcaccggagatgtaagttccgaaggatctatggatctggtaggcacaattaatggaaacattgatattctgggcaaactgaacattaccggatatatcaatggtaattccaaagcagctgagatttttgcagaaggcgcgaagatcaacggcgagatcatgagcgagggctccgtgaagatcggagcaagtactgttgtcatcggcaacattaccgctaccagtgcagccatcgcaggtgcagtaaaaggtgacatcgatgtacagggacctgtcattttggattcttccgctatcgtaatgggaaatattaagtctaagtccgtacagatcaacaatggtgcggtgatcgaaggtatgtgctcacagtgctatgcggaagtcagcccgacttctttcttcgacgattataagcctgagaaaaagaaaacaaaataaggagcatacgatcatgaagagaatattactgaaactcagtggtgaagcactggcaggagagaaaaagaccggattcgacgaggagaccgtcagaaaggtggcactgcaggtaaaggaactggtagatgacggcatccaggtcggtattgtcatcggcggcggtaatttctggagaggacgttccagtgagaatatcgaccgcacaaaggctgaccagatcggtatgttggccacgatcatgaactgtatttatgtctcggagattttccgctcggtaggcatgatgaccaatatcctgactccgttcgagtgcggctcctttaccaagctgttctctaaggacagagccaacaaatattttgcaaagggcatggtagtgttcttcgcaggtggtacgggacatccctatttttccaccgataccggagttgtcctgcgtgccattgaggtagaggcagatgtaattctgctggcaaaggcaatcgacggtgtatacaatgcagatcccgccaaggatcctacggcgaaaaaatacgatgaagtatccattgatgaagttattgcgaagaaccttcaggtagtggatatgaccgcatccattctggccagagataacaagatgcccatgtgggtattcggcctgaatgaggaaaatagcattgtgaataccctgaagggtaagttcaacggaacgaaagtaactgtataaaatcaaaataatagaaaggcgcagagcgcagaagagaggaaattatggacgcaagagtacaggtatatagtgataaaatgcagaaggcatttgaatttttagaggcagatttcgctgccattcgtgcgggacgtgcgaaccctcacgtactggataagctgagagtagactactacggaactcccacccctattcagcaggtaggtaacgtaactgttcccgaggcacgtatcatccagatcgctccctgggagaagtctctgatcaaggagattgaaaaagcgatcatgacctccgatatcggtatcaatccttccaatgatggtagcgtgatccgtctcgtattcccggagcttaccgaggagcgcagaaaagacttggtcaaggaagtaaagaagaagggggaagaaggcaaagtagccatccgtaacatcagaagagacggtaacgatgctttcaagaagctggcaaagacagaagtgtctgaggacgagatcaagggtctggaggaggagcttcagaagcttaccgacaaatatgtaaaagatattgatgccctgatcgacagcaagtccaaggaaatcatgacagtttaaggatttaagaaggtttgaaattatggaagaaaatttgaagattccgaaccatgtagcgattattctggacggtaacggccgttgggccaaggcaaaaggaatgccccgcaactacggtcacgtgcagggggccaaaacggtagaagtaatctgtgaggaggcgtaccgtatggggattcagtatctcacggtatatgctttttccacagagaactggaaccggccgcaggacgaagtggatgcgctgatgaaattgttgcgcaattatatgaaaacctgtctgaagactgccgaaaaaaatcgtatgtgcgtcagagttctgggagataagaccagactggatcaggacattcagacccgcatcgcggaattggaagaagctacgaagaacaatgacggtctgcatttccagattgccatcaactacggtggcagggatgagatcatccgtgcggtgaaaaaactgtccgcaaaggtacaaagcggggaagtatcaccggaaaccatcacggcggatatgctggaagattatctggataccgctgggataccggatccggatctgttgatccgtacctgcaatgagcagagaatctctaatttcctgctgtggcagctggcttatacggaattttactttactccggttccctggccggattttacaaaagaagaattgatgaaggctgtggaagcatataatcatagagacagaagatatggcggcctgaaggaggaatagcttatgttttggacccgtttgctcagtggcattgtattgcttgtcattgcactggctacgttcagcttcggcaatatatttttagcagtgccgctgtggcttatttctctgattgcatacagagagcttaccaaggcattaagatgtgcaactaatgagaaaaaatttaatgcactggagtggatcggctttgtgggcgtgacggcatattacgcaacactgttttttaccagggatcatacattactgctcatgtgtatcgtgggcctgttcatggcagaaatgttctgttatgtggtattgtttccgaaatacgaggcaagtcaggtcatagcagcggtattttccttcctgtatgcaccggtgctgttgtcctttgtctatctcacccgcgagtgtgagaccggaatctatctggtatggctgatcctgatcagttcctggggatgcgatacttgtgcctatgtcgtcggaaagctgatcgggaagaagcatattttcccggaattaagtcctcataagtccttggaaggctgtatcggcggtgtcgtcggggcagcactgatcggtggactgtatgcacatttttttgtggagacggcattcccagaccggacaattacatggatcattgcctttatctgtgccgcaggtgcagtgatgagcatggtaggagatctggcggcctctgccatcaagaggaaccataatattaaagattatgggaaactgattcccggacatggtgggattatggatcgttttgacagtatgacggtgacagcaccgatgacctatttccttaccattctgatgatgggactcagatagaggagcgaaaatacatgaaaaagatagcaattctggggtctaccggttcgatcggaacccagactctggaagtcgtgaggaataatccggagctgcaggtggtagcactggcagcaggaaaaagtgtagaacagatggagcagcagatccgagaattccatccgttgatcgcaggtatgtggagcgaggaggcggcagcggatctgcgcagtcgtgttgcggatcttcccgtgaaggtcgtgaccggaatggacggactgctggagatcgcagtgatgcccgaagcacaggtattagtgacggccattgtgggcatgattggtatcagacctacgatcgcggccattgaggcaggaaaggatattgctcttgcaaataaagagactctggtgactgccggacacatcattatgccgttggcggcgaagatgggtgtgaagatcctgccggtggacagtgaacacagcgccattttccagtcactgaacggagaaccgaagggcaggatcgagaaaattctgctgactgcatccggtggacccttccgaggaaagacaagagaacagctgcagaatattcaggtggaggatgcattaaagcatcctaactggtccatgggacggaagattacgatagattcctccacgctggtaaataaaggactggaagtcatggaagcaaaatggctgtttggtgtggatctggatcagatccaggtcattgtgcatccccagagtattattcattccgccgtacaatatgtggacggtgcggtaattgcacagctgggaactccggatatgaaactcccgatccagtatgcgctgttctatccggatcgtcgtccgatgccgggcagacggctggatttctatgaactggcacaggtgacattcgagaagccggatatggagacgttctacggattgaagcttgcttatgatgcacaacgcatcggcggcagtatgcctacggtgtacaacgcagccaacgagaaagcagtaggactgttcttagatcgcaagatcgcttatcttcagatcccggagttgattcaggaagccatggagcagcataaggtgatcgcaaacccgaatgtggaggagatcctggagacagaagcatctgtttacagttatatcgacggcaagggattctgatcctaaaatagaagcatgatatgagaggcaataaatggttacattgatcttgtttgtattgatcttcggggtggtggtcatctcacatgaattcggacattttctgctggcgaaagccaatgggattcatgtgatagaattttccgtgggcatgggtccgaatctgttttcttttcaaaaaggagacaccaaatattctctgaagctgcttcccatcggtggagcctgtatgtttgaaggcgaagatggactgaatgaaaaagaagacggggaagaccacagcggatcgtttttaaatgccaatgtatgggcgcggatctccactgtcctggcgggaccggtatttaatttcatccttggatttatcattgcttttattatggtgaatctgatcgtgatccgtgatcccgtggcgacggagatcgtggatggcggtgcggcgcaggaagccggactgcagcccggagacagaattctctctctgaatggcagtaagattcatctgtatgaagaaatacagctgtttacgctgacctaccggggcgggaatgtcacggtacagtatgagcgtgacggagtaaaaggaactacaaccctgactcctaagtatgatgagagtgcaggacgttatatgatcggcatcagtaacgcggattttgtacagctgtccggactggactgcttccgttactcctggtatgagatgcgttattgtgtgacgatgacctggaagagcctggcgatgctggtgcaggggcaggtatccagacaggatgtggcaggaccggtcgggattgccgtgaacgtcgtgggaaaaacctacgaaagtacaaaagactacggctggcagaatgtactggtgaatatgttgaatatcaccctgatgcttacggtgaatctggggatcctgaatctcctgccgattcctgcattggacggcggcagactggtattcctgatctgggaagccattacgcacaaaccggtgcccccggaaaaagagggcatggtacacttcatcggactcgtgttttttatggtgctgatggtgttcctgctatttaacgatctggtaaatattttcggatagagtatccgggatatcttattatccgttgacaaagagcataccgcatggtatgctctttttacgttcgcggaagacgcgattctgatatcattttcatgccggtcggcaaataaaccctgaagaatgaaaagaatatatgtatctgtgtttaggatagataggataaataggatagataggatagaagggagaagtgcgtatggagcatgttacggcctgctattggcaaaaggagacggtcccaaatatatttctgtcattgcaacaacgaaaataccgtcgcaggaaagcctctgtggtatatgcctgtatttccgacaacagggaactgctgatgaatctgcagaacaaaatagaagaggaattgcaggggagggatatctggaaatcgtacacggaagaaaggataagagaaaaatggtcgaaacagcttgcggcagtggacaaaaacagcaattatgcgggagtactgtgtgtggacagcagagtgcttctgtttgaccacggcaggatgaatctctgcggatttttcaagaggtttgggagaaccggatggaaagtctggaaggatcagtgcatggtgggggaagtcgaagcaggaacagcaattttgctgacggatcatggattcctgaattactgtgaagaggaactggcaggctgcctgagaccggaaagcgtggggaccgatctactgtcggacagagcggagcgggcagagagacggctggcagagctgggtcggaaggcagagcagcggggcggaagacatatgggagcggtatggattctgccggtaaagggagaagctatatggagcaaagggaaacagagcaacgaaacggtacaaatggaatagaaatggagaggatattggtctggcatggatatcacagtcctgtgtcggtgggagaaggcagcttttcccaagtctatcgtgtgacagacagtaacggaggattccgggcctgcagagtgtccgatgtcacagaacaatggcagagggaatgtgagaactggcaggagatcagacatccgttattccccgggtatgtggaacattggacggaaggaggaaagggctatcttatcatggaattctgggatggcatggatctgcggaaaatgctggagagaagaggcagacttactcccggacatgctgcgtggatcacggatcagatcgcggaaggcatacaatatcttcatgagcggcagcatccatttctctaccgggatctgaagccggaaaatatccggatccgtgtcaacggcagagtggggatcctggatctgggatgcctgtggaacagagaagaaaaatggtcgggagcaggcaattattcctacagtgcgccggaacagttccgacagggggagatacccggggaggaaagcgatgtgtatgccatgggaaaattgttggaggtcatgctgggagagaaaaacgggaaacacaacaggcaggaaaaatggcttcgcagaataagccggatggcgactcatacagagcgacagagacgtattccggatatgaaaaccttccgtcgtctgctctccgtgatgaatgcatccgggagggtgcgcagacaggtattcaaagagtctgatttttattatatccgtaagttgtactgcccgtagttgtacacaccgtgctcgaacacaatcaataaaatttataaaaaactacttgctgtttccagacggaatgagtatactgtaactagaggtcacagatcactttcgggaccggatcaattaaatttacatagcaaaaaggagaagagttatgcgtttttttattgacactgcaaaagtagaagacattaagaaagcaaatgacatgggggttatttgcggagtaacgaccaatccctctctgatcgccaaagagggcagagattttgtagaagtgatcaaagagattgcatccatcgtagatggacccatcagtggtgaggtgaaagcaaccaccgtagatgcggaaggcatgatcaaggaaggcagagagatcgcagccatccatcccaatatggtagtcaagattcctatgacggtagaaggtctgaaggcatgtaaagtattaagctccgaagggataaagaccaatgtaacactgatcttttcagcaaaccaggcgttgttggctgcacgcgccggcgcaacttatgtatctcctttcctgggaagactggatgacatcagcacaagaggggtagacctgatccgtgatatcgctgatattttcgcggtaaccgacctggatacccagatcatcgcagcaagcgtgcgtaatcccattcatgtgaccgactgcgctctggctggtgctgacattgcaaccgttccctacgcggttatagagcagatggtaaaacatcctctgactgatgccggtattgccaagttccaggcagattacagagcagtcttcggtgaataataaataagatgaacacagttaagaagctgtacagagggattctctgtacagcttcttttttgttcctgtcgattccgaggagtccggcagagcttatttcatctgctcttcctgcttcttgatcatacgacgaaccatttcgccgccgatgcttcctgcttccttagaagtaaggtcgccgttgtaaccctctttcagattaacacccagctcagatgcaacctcagtcttgaaacggtccattgctgccttagccgcgggaacttctactctattggttttacttgccatttcgttcacctccgtttggaattgtttttgtgtttcagataagcgttgtttgtgatcacttatcttggtattagtatgagcaccggctgttttttcatgctggtaagtttttcattttatgttataatcaaaaagcaacagaacaaacggagactggaaagcgcggcatcggatccactgaccggaatcccacagaaatgactgactccgaagcacggggctgagaagagaaaggcgacaaaacaatgaaaaagaaaacaggaatcacaaaaacgctggcgctggtactgacgcttggactgttatgcagcggtcttaccggatgtggacagacacagaatagcaggagcgcagcagaaagtctgatgacagagagtacacagcctgcagagagtacggaagccgtaatggaaagtacagaagctacagcagaaaatacggatgtggatgacacagtagtgcgtgtggcatccttaaaaggcccgacatctttgggacttttatttttaatggacaaggcagaaaaaggagagacttctaatgcctatgagtttcagatggctaccggtgcggatgagatcctgccgctaatggtaaaaggtgacctggatatcgcactgatacctgccaatgtggcaagtatcctctatcataagacacagggcggtgtggaagtgatcgacatcaatacactgggggtattgtacatggtatccggagagaatgaccttacggattttacggatctgaagggtaagaccatttatttaaccggaaagggaaccacaccggactatgtattgcaatatctgctgactgccaatggcatgtctgtggacgatgtgacactggaatataaatccgaagcaacagaggtggcatctgtgctggcagaggatcccacagccatcggactgttgccccagcccttcgtcactgcagcctgcatgcagaatgatgcactgaaagtgatctttgacttaaatgaagagtggaataagatacagggtgtaagcggcagcagcatggtcacaggtgtcacggtggtaagcaaggaattcctggaagagcatgaggatgcagtgaaatcttttatggaagaacataaggcaagtgccgaagccatcaatgcagatcccaccaccggtgctgcgctggcagtggaagcacagatcgtggcaaaggagcccattgcacagaaagcaatcccaggatgcaacattacttatatggataaggcagacatgaagcaggcactgtctggataccttgacgtactgttccaccaggattctctgtctatcggcggcggacttccggaatctgatttctattatgatgcagaataaggataaaaaatacattaaaaaatttatgatcctgctcttctggctgggggtatggcagatcacggcagtgtgtgtggataatttcctgctggtggtgacacccctgcaagcattgcgggcgattatcgttctcgcggggcaggtggaattctggcgtagcgcccttggctcgctgtggcggattgccgcaggctttttgctgggagcggttttgggactgttgttagcggcggtaagctacagataccgtctggcagaggaaatcctgcgcccgttcatggtattctgcaaggcagtgccggttgcagtatttgcggtgcttttactgatctggtggggagcttccccgctggcggtggcggtctgctttttcgtggtgtttccgaatatttatctgaacacactggaaggcttaaaaagtgcggacgcagaactgatagagatggcagaagtgtttcgtctgccgtttgccacccgctttttctatatttaccgtccggcattaaagccattcctgctcagcgcatttcaattatccctgggaatgagctggaaatccggagtggcagcggaagtgatcggtacgccgttgcattccatcggcggagcactgtatctggcgaagatttacctcgatacggcggatctgtttgcctggacggcagtgatcattgtgcttagtgtattgtttgagaaaatagtcttcggttgtgtggaatatttttttcggtgggagcctgcctgcaagagaccggcaatgccgcagaaaaatgtcagcagagaacgtcgcactttatgtgtgacagattttggaaaatgttatcatgaccgttggatcttccggcatgtggaacaggaattccacggaggagaaccttactttctggatacaccatcgggcagcggcaagacgactttttttaggtgcttgtgcgggctggaacggccggaagagggagaagtgtcgggaatcgatgctttttccgtgcagtttcaggaggacagactctgcgaagaatacagtgcggtgaagaatctggaaatggtcatgggagatgcgaaggaagcgcggaaggcacttacgtggttactgccggaggaagcactgggtcagccctgtcatgaattgtccggcggcatgaagcggagagtgtcactggtgcgggcaatggaagcaggagcacagtgtgttctgctggacgagcctttcacagggctggatgaagagaaccgggagaaagcatatgaatacatccgcacacatgcaaatggacgcatcatcatgatcgccacgcatatcagaccgtgggagaatatgccggaggacgttcagaagggagaaggattatgggaaaggacacggaaaacacaagagtgacgctggtaggcattatcgtggaggatcaggaggcagcaggccggatcaacggacttttgcatgaatacggagaatatattatcggaagaatggggataccttatcatgagaagcagatgaatatcatcagtgtggtcatggacgccccacaggaaaaggtcagtgctctgtccgggaagctgggaatgatcccgggagtcagttccaagtgcctctatgccccggatacgcagaaagcccccaaataaaagggttgtcaattcctccaacttatgctataattgcaaaatgactgcgactggatacagacccgcaagggtataaaggaggaaatgttataatgagtttacaggttgaaaagttagagaaaaacatggcgaagctgaccatcgaagtatctgctgaagaactggagaaggcaatcgaaggtgcttaccagaagaataagaacaagatcagcattcccggtttccgtaagggcaaggctccccgtaagatgatcgagcagatgtacggcaagtcagtattctatgaggatgcagcaaatgctttgatccccgatgcttacgataaggctctggaagagtgtgaggagcagatcgtatcttctccgaagatcgatgtgacccagttagaggccggcaagcctttcatcttcaccgcagaggttgctctgaagcccgaagtgactcttggcaagtacaagggtgtgaaggttgacaagatcgaagttaaggtgaccgatgaagaggttgacgctgagatcaacagagagcgcgagagcaatgcgagaaccatcaatgtagaagaccgtgctgttaaggacggcgatatgaccgttatcgatttcgaaggttttgtagacggtgttgcatttgagggcggcaagggtgaaaatcattccctgaccatcggttccggctctttcatccccggatttgaagagggactgatcggtgctgaattaaataaagagaccgaagtaaatgtaaccttccctgaggactatcatgcagctgagctggctggcaaacccgcagtattcaagtgcaccgttaaggagatcaaggagaagcagcttcctgatctggatgacgagttcgcaagtgaagtatctgatttcgatactatggctgagtatagagaagatgtacagaagaagctgacttccaagaaggaagaagaagctaagattgccaaggaagaggcagttctggatgcagtgatcgcagatgccaagatggagattcccgatgcaatgctcgagacccagcagagacagctgttagagaactttgcacagagaattcaggcacagggtctttctttggagcagtatatgcagttcaccggtctgaccgctcagaccatgatggagcagctgaagcccgaagcgctgaagagaatccagtcccgtctggttctggaagctgtagcagcagctgagaagatggaagctactgaggaagatttcgaagctgagatcaagagcatggcagaggcttatcagatggaagctgacaaggtaaaagaactcctgggagagcagggtgctaagcaggtgaaggaagatctctgcgtaagaaaggcagctgacttcatcgtagacaacgctaaggaagcaaaggctgcagccaagaagaccaccaagaaggaaaaggcagcagaagagaagccggaagaagcataatctgtgctttaagatacgatacgaagagaaagcggactgccaggtccgctttctttttcagatttaaaagttcctaaatttttattaaatcttcggaatctcgttgaaaaagcttactaagtaggatacgatagtagtattaatcagaagcaatggaggttttagaatatgagtttagtaccttatgtcattgaacagaccagcaaaggtgagcggtcttacgatatttattccagattgttgaaggacaggatcattttcctgggtgaggaagtgaatgagacttccgccagcatcattgtggcacagttactgttcctggaagcggaggatcccgataaggatatccatctgtatatcaacagcccgggcggcagtgttaccgcaggcatggcaatctacgatactatgaaatacatcaagtgtgatgtatccaccgtatgtatcggtatggcagccagcatgggagcattccttttagcaggtggtgccaagggcaagcgttttgcactgcccaatgcagagatcatgatccatcagcctctgggcggtactcagggccaggccaccgagatcgagattgcagcaaagcatatcctccgcaccaaggagaagttgaaccgtatgctggctgagaacaccggcaaggattatgagaccatctgcgcagacaccgagagagataactggaagagcgccgaggaagcttgtgaatacgggctgatcgataaggtgatcaccttccacgaggcatagtgtaaaaaatatgcttgatagcatattttttacacagctatttgtgccgcatacggcacaaagtagtttttatcgcagagccaaatctgaaatttggctcgcgtttcctacgacgcaaaagcggcgtcttcggaaggagataaaataacaggagtatagtagtaatggcaggaaaaaattccggaaatgacatcagatgttcattttgtaacaagacccagagccaggtccgcaagctgatcgcaggacctgccggggtatatatctgtgatgagtgcgtagatatctgcgctgacatcctggaggaggaactggaagacgaagaagtggaagagaccgcgactccggatatcaaccttctgaaaccgaaggagatcaagaacttcctggatgaatatgtcatcggacaggaggaggcgaaaaaggtcctctccgttgcggtgtacaatcattacaagagagtaacggctcccaaggatctgaatgatgtggagctgcagaagagtaatatcatcatggtaggacctaccggttccggtaagacttacctggcgcagacactggcgaagatcatcaatgtaccgtttgctatcgcagatgccactacattgactgaggccggttatgtaggtgaagatgtagagaatattctgttgaaactgatccaggcggcggactacgatgtggaacgtgcccagtacggtattgtttatatcgacgagatcgataagatcacgaagaagagtgaaaacgtctccattacccgtgatgtatccggtgagggcgtacagcaggcactgctgaaaattatcgagggtaccgtggcaagcgtacctccccagggtggcagaaagcatcctcatcaggaactgatccagatcgataccaccaacattctgtttatctgcggcggtgctttcgacggactggagaagattgtagagtccagactggaccgtaagtccatcggttttaacacagagcttgggaagagagaggacaaggacatcagtgaactgttacaggaggtaactcctcatgatctggtgaagttcggtctgatccctgagttcgtaggacgtgtgcctatctgtgtatccttacggggactggacagagaagcactgatccgtatccttcaggagccaaagaatgccctggtaaagcagtaccagaagctgttccagatggatcatgtaaagttagactttgagcaggatgccatcgaggcgattgcagacaaagcactggaacgtaagaccggtgccagaggattgcgttctattatggaatccgtaatgatggataccatgtatgagattccttccgatgataccatcgaggaatgcgtagtcactaaggctgctgtggatggagagagcgagcctctcaccatacacgaagattctctgaaaaaggcaaaataatctgggcgctgccttgtggtgacacagggcagcgttttgtgcaaaaaagcagaaagaaaaaggtatttttatgatcataaagaatgtgagtctggaaacggtctgcggtattaccagtaagcttccggaaaatatccatcccgaggtggcatttgctgggaaaagtaatgtggggaaatcctctctgatcaacggtctgatgaaccggaaatccctggcaagaaccagtgcccagcccggtaagacccagaccatcaattactataatgtgaacgatgaaatctacttcgtggatctccccggttacggttacgcccaggcaaatgagaatgtgaaagcccagtggggtaagatgatcgaagattatctacataaatccaaacagttaaagctggtgtttttgctgatcgatatcagacatgcaccgtcggagaatgaccggatcatgtatgactggatccgtcgtaacggctacgatcctatcatcattgccacgaaactggacaagatcaaccgtagccagattcaaaagcagataaaactgatccgcaccaccttacaggcgggggcggacacacagatcatcccgtactctgcacagaccaagcagggaagagaagaaatctatgagattctggacggagtgctggcggcagagaatcctgcacaggaatagacagcaggaaggatgaataagcgtaaaagcagaatgcgtgaaagagtgggagtatatgaggaaatattgtaaagcactggtaaatctgggtgtggcatttattatattaacgttgatcgttttcctggtgccgaagctgttagtattttttgcaccgtttgtggcaggctggatcattgcgttgatcgccagtcccctggtgaggttttttgaggaaaaggtaaagatcaagcgaaaagcgggaagtgcatttgtcatcgtggcggtcatcgcactggtgatattgatcctctatctggtaggggcgaagttagtcgatgagatcatgggactgatcggtgcactgccggatatctgggacagtgcggagaatgattttgccgatatcggacagaacctgagcgttatctataaccgttttccggcggatgtacagcaaagcatcatggatgtcatcaatcagatcggaagctatgtgggagatcttctgggtaagatcggcacccctacgatcaatgccgtgggcaatttcgccaagcaggttccttcgatcctgatcggactgatcatggcactgctttcttcctatttcttcgtagcggagagagaccagctggcaacatggttccgtaagcatacaccggcggaagtactgtcctggtattatatgctgaagcgcggactggtcaaagcagtaggcgggtatcttaaggcacagcttaagatcgaagtgtggatgtatctgctattagtcatcggatttgccattctgcaggtagactatgcgttgttgatcgcactggggatcgcatttctggatttcctgcctttctttggaaccggaaccgtcatggtcccctgggcaattatcaagatcttaagctctgattataaaatggccatagggcttctgatcatctggggcatcggacaactggcgcgtcagctgatccagccgaagatcgtgggagattccgtgggaatgccgcctctgccgaccctgttcctcctgtacataggatataagctgggcggtgtcgtaggaatgatcgtggcagtgcccattggtctgatcgctctgaccatgtatcaggagggcgctttacagacgaccaaggacagcgtgaagatcctgacagccgggatcaatcatttccgcagactgaagccggaggatatggacgaagtgcggcagatgcaggagagagaccggaggctgagcgaggaactggccagacaggcagcagaggaagaggctcaaaaagaagcccaaaaggaagctcgaaaagaagctcaaaaagaagcttctgcgaaaaaacagaaagaaaagaaatcatgagaaatatcagactacgactgcaatatgaaggaaccagatatcagggatggcagaaacagacttcaacggataatacgatccaggggaaaatggagacgctgctgaccaaaatgtgtggtgaacccatagagatctctgccagcggtaggaccgatgcgggggtgcatgccctggggcaggtggcgaatttccacacggaagctaccatgagtgtggaggagatcctggaatattgtaaccgatatctgccggaggatattgccgtggtggaggtgtcggaggcggcacccagattccacagcagattaaatgctaccgggaagcgttaccgttaccgcatcatcaacagtcagatcccggatgtgttctggagacgctatgcgacagaggaaccggaagaattagatttggatgctatgcgaaaggctgcggagctattgcttggagagcacgatttcaaggcatttacctctgcgaagaaaagtaagaaatccaccgtccgccggatcgacgagatccggatcgaacggatagagaaccgtgtggagtttgtatttaccggaaatggatttttgcatcacatgatccgtattctcatgggaactctcctcgaggtcggaaagggaatccggacgccggagagtgtgacagatatactgaagtccggagacagagcgaaggcgggagcgttagtaccggccaaaggactggtactggaagaagttttttacacctgaaaaataaaaatactgcaactttttgccctacaattgcgtctatgtagttgtagggtttcgttttgccatgaaatcgtaaataagctgcgtgagtgcttgcacgcaaagcagtgtatttacgattccatgagcgaagcgtcttattcatgaaataaaagatgagccgcggtagcggcgtcggctgcgaagcagacgcttttatgaatggataagagcaaaacgaaatgtttatagaattttaataattatgttgcagaaaatatgcattgacaggatacgataaacgtggataaggcagagggactttatcctatacgaaaggtgtaaggtgtggaccatggaaaaaagggttgcagtatacaataataatacaggtgtagtagagacaatgagttcccttctcgcaggagaaggcttaaaaatggtggcagtgacggggagagcacagttacaagaattactgcgggcacaggagatccagcttctgctgctggatgtagaactggatggcagaggctggggagaaggcattgagatgatccatgacatccgtaatatgactacgatccccgttattatcatttccgcacaggatgcggagactgccaagatcatggcgctgaatgccggtgcagatgattatgtgacggtggggtataatccgctggagctgttagccagagtgaaatcacagcttcgccggtatacacaactggtcaatctgtgtgaaagtattgatagtatttatcgcgtggatgggctggagatcaatgaccggaaccgtacggtaacggtagacggtcgtgaagtgaagatgacccccattgaatataagatcttacgcctgctggtgcaagagcggggaaaggtattatccatcagccagatctatgagtctatctggcatatgcaggctatcggtgcggacaataccattgcggtgcatatccgccacatccgtgagaagatcgagagcaatcccaaggagcccagatacctgaaagtggtatggggaaccggatataaggtaggatgaaaaagattgttaataagtgtgtcctctgcgtcagcaggggacatttttgtcaaagtctgatcgcgagatgcttgacaaagcaatacaaatgcattattgtactaattaaataatacaagcaagacaaggatggagcataaggatgcagacagaagtaatgcaggcagggaaaatacaggggaaacgaggaatcagcagtgcagtgctgaaaaatatcgcggtagtgactatgttgatcgatcacatcggggcggtgatcatgacaaggctgctgatccgaaacgggctgtatgaagctatggtgaatcaggaggcctatactgcctggatggggcagaacggtggaatgtacggcatctacatggcaatgcgtatcattggcagacttgcatttccgatttactgttttttactggtagagggattccaaaagactcacaatgtgaaaaagtatctgggcaggatgtttttatttgcactgatttcggaggtaccctttgatctggcattcagcggcaaggcatggtatccggcatatcagaatgtattttttacattgttattggggctgctggtgatcgcgggacttcatttggtggaacagcattttgcgggtacaacggttggaaaaacgattctgcgcgtgggactgaatgccgttattattctgacaggatgtgtactggcattggttcttaagacggattatgattttaaggggattttggcaatcactgtactttatctgttccgtaaccggaagaaagcacagatgtgggccggtgtcatcatttttttattgatggacagcctggagatgtttgcagcactttcctttattctgatctggttctacaacggaacgagagggcggcagaataaatatttcttttactttttctatcctgcgcatcttctgctcttgtggctggtatgtgtggcaatgggaattgcgggaattcctgcaatctgacgaacagcaggatgctctgtggatagtaaagtggaagacggggaagacagtgacatggagggtatggcgtatatggaagagaaaaaatggaagataggggacagcgaagaattgatccgggtacaagagatcagcaagacatttcatctgtcggcaaaacagcagaaactggagcatagcacggcgaagacgaagactgccgtgaatcaagtgagcttttgtgtaaacagaggggaagtgtttggacttttgggacccaacggtgccggtaagaccacaacgcttcggatgttggcaacgttgatccggccggacagcggggatgcggtgttatccggcagcagcgtagtgacacaaccggaggaggtacggcgtaagatcggcttcctgaccagtgaactgaagctggaggatttttttaccccggattatctgtatgactttttctctgaattgtacggtattccgacagacagacgagacaccagaaaacgcatgctgtttgcacggttcggcattcaggagtttgcacaggtgcgcgtcagggatctgtctacgggaatgaagcagaaggtatccctggtgatctcactggtgcaggatccggagatcatcatttttgatgaacccaccaatggactggatattctgacggcaaaagtggtgacagattttctgctggacctgaaagagcaggggaagaccattatcatatcaacgcacattttcagtctggtggagaagatctgcgaccgggtgggaattattattaacggtcgtatggcagcctgtgaggacctgcggacgctttgcggtgataagagcctggaggatcgcttttttgaaatctatgaagcggtgaacggggaggacgagaaccatgacaaataatacgattacggtaatgaaaaaagaactggcaagatttttcggagacagaaggctggtaatcacgacacttttgctccctggaatcatgatctatgtggtgtacagttttttgggaagtgccatgatgaagtccatacttccggaagaagcttatgtggcgaaagcttatgtggtggatatgccggagtctttaagagaagacctgcgggagcttaaggtagactggcagcctgcggacagagagcagctgacacagatgcgacaggagatacaggataaacaggcagacggactggtagtattcccggtggattttgatcaggcagtggaaaactatcaggtgcagagtggaaaaccggcgcccaacgtggagatctattacaattccgcggagacggaatccactcatttttacaatgaagtgtcggacattttggaggcatatgagacatctatatccaataagttagacatcaatgccggggattctgtgtattacgactgtgccaccagcaaagatactacgggacagatgttttcgatgatgatgcccctgctgcttatgatgtttttatacagcggatgtatgtccgtggcaccggaatccatcgccggggagaaggagcgtggtaccatagcgaccttgcttgtaactcccatgaagaggagctctctggcacttggcaaagtattttccttaagcattattgcacttttggcaggttgttccagctttatcggaacctttgcggcactgccgaaaatgatgggcggggaattgacgggagtggattcgtcggtgtatacgcctatggattttgcgatgctgcttctgatcattctgtctacggtaatggtgctggtatccatgatcgcactggcctccgctttcgcaaaaagcgtgaaagaagcggctacgacagtctccccttttaccatcgtggtgacctttatcggactgagccctatgctcagtcagggaaaagagattccgctgtatcggtatctgattccggtatataacagcgtacagtgcatgaacggtattttttcttttagctatcagccggtggaaatttttttgaccgtgatcgtgaatctgtgtgtggcgggagtgctggtattcggactgacgagggcattccagagcgagaaagtgatgtttgggtaagagcatagtattttataattattgactataaaatgagaaatgtgtacaatgataactattcggagcaacgtaaattcgagcaaaaagaaagcaccgcaggggcaattttgcgaatgatgctctgaatacagaaaatggaggaaaataatacatgcaactgcctatttttgagaaatacattgatgaactgatcgagaagagcactctggatgttcccgcatggaacattgagaaggcgagagaagggaaagctgccggctggaattatattgatggctgcatgatcctggcacttttggagatttacagcgctacc

SEQ ID NO: 11341 - DNA, 3096 bp, Unknown
  gut microbiota DNA sequence
aaaaagtttttagctctttccacagcatctgtcatggcattgtccatggtcgcatgtggaagcaccgacaatggcgcagctgagagcaccgcaagcaacacacctgcaacagcagaggcttccaccgtggctgctacggaagcagacgagataaccggtctgaattacgcagagcttactttgggtgaggattacaccgacattaccacgaccattaaggtcctgactaaccgtaccgacctgttagaggacggcgcagcagttcctttccagacatacatcgatgcattcaatgcaatctatcctaacatcactgttgatgtagaaggtatcaccgattacgcaagtgacacattgcttcgtctgcagggcggtgactggggcgatgttatgtttatccccgcagttgacaaggctgacttaagcacatacttccttcctcttggaactactaccgagatggacggacagctgaactactacaaccagatgtacgaaggcactgtatacggtgttccttacaccgcaggtgttagcggtggtatcgtatataacaaggcagtattcgaagcagcaggaatcactgagatgcctaagactcccgaagatttcatcgcagcattaaagcagatcaaagagtatgacagctccatcattcctctgtacaccaactacgcagctggctgggcaatgggcggacagtgggatcccgctatcagcggcagtgctaccggagacagcacttatatgaaccagaagttactgcacacagccaatccttttgctgatcccggcgacggaacaggcgcttacaacgtatacaaagtaatgtacgatgcagttgctgaaggccttaccgaggaagactactccaccacggactgggaaggttgtaagggtatgatcaacaatggtcagatcgcttgcatggttcttggctcctgggcagttcctcagatgaaggaagccggtgacaacgctgacgacatcgcttatatgcctttccctattaccctgaccagcggtaagcaggcagcatctgtaggccctgactacagctttggtatcaatgcaaacaccaccgaagacaatcaggcagcagctctgtgcttcgttaagttcatgacagaagaatccggattctcctatgactgcggcggacttcccgttgctatcaaggataccagattaccggatttctacgcagcattcaagggtatcgactttgtagtggatgagcctgcgatcgaaggcgaagaggatctgttaaacgagctgaatgctgaaagtggtcttaacatcaacaacaacggtgagaccaagctgcaggagctggtagagtgtgcagcagatggctccaagacctacgatgagatcatcgacgagtggaacgaagagtggacttccgcacaggagagctgtggtgtagagatccagtaattaataggtaactaatttaatcttctgaagtgagagggaaccatttatccggttccctcttatctaagagagaagggcatggaggtatttcgatgggtgcagagacaatgaagaaaacaaaaaaacccttcagcatgaaaaaatgggtaaagagcaggaacggacaacagaccatcgtcatactgtccttcatgatcattcccctgcttttgctgttcgtgttcacctatcttccttttggagagatggtaaaattcagtttttataaaatgaaatatgctaccccggtagacaaaagacagtttgtaggatttcggaactacatcgacgtatttaagaaagatgaatgcttcagtgctttgaagctgagcctttattacatggcaggcgccatggtgcagctggtacttgcgttgtacctggcaacgatccttagctttaagaccaagtttggcaatatgttcaagggattcatgttcttcccttatctgatcagtggtattgccattggatttatcttcaaattcttctacaccagaggatttgtattcgatacggtattacagtggtgtggatttaacttagaaagtcttccgttctggctgaaggacaagagcgttaacaatatctctttggtggcttcctcggtatggcgttattacggcaacaacatggtactcttcatcggtgccatcatgtccgtggactccgagatgtacgaggcagcagagctggacggtgccaataaattccaacagtttatacatattattttacccagcattaagaccatcgttacgctgaacgtgatcctgtctatcacaggctccctgagtgctttcgatcctccctacgttatcaccaagggtggcggcggaaccgcaacctacttcgtattgatggacaagatcgcacataccaaccagcaggtaggtctggcgtctgctatggcggtggtactgttactgatcatttttgcagcaacaattttacaaaagcttttcttcaaactggtatttagaagctccgatgcggataatgaagaatataccagaagaaaacggctcagaagagagagaagatggaagaaggaggcagtgtaaaatggcaaagatgaaaactaaccacaaacattacagcgcaggcgctgtcatctggatcgttattaagtatttcagcctggtattcttctccttcgtggcacttttgcccatcgtatcctgcgtcatcacggcgttcaagaccgatgcagagtaccagagcaccaatgtaatgaccctgccggaaagctggctgaacttccagaactttattgatgcttttaaccgcgccaacatgggcagagcatatctgaattcagcgatcatcctggtatttgtactgttaggctccgtcctggtgggaacacagctcgcttatgtactgaaccggttcaagtttcccggcaacggactgatccgcagcctgttcctgttcgcaaccctccttcccggaattgccatgcaggtatctgtgtatcagatcatgagtaaccttggatttatcaatcatctgtatggttatatcattatgagtatgggtacggatgttatctccatctacatcttcatccagttcatggaaaacatttcggtatcgttggatgaatctgcattt

SEQ ID NO: 11342 - DNA, 3462 bp, Unknown
  gut microbiota DNA sequence
aatcattgtatgtatttacagtggtatctcgagctcctaagactctattgtaggttcgattcctataggagacgctcatttttagcggtaatgaagattgtttcattaccgctttttttgtgcagaattgcaatttaagtgacaagtttgattttttcgctcatatagattctcccttgtatgtgtaaatatttttcgatgccggcattggcagctatcgataattttatgttagtcttcactaaccaacactatcataaatgcccggaaaaatcaaaatcatgtgatcggcaggtacaaagttttcgaggagattccttggttgttgaaatagatggattgctctataatggcactataaattgtatgtttgacaccgacagttctccgggaattgtctgagtgtactgtaaataggatatctgaggaaggtatatattatgaagtatgaaaatattgtggaaggcaaatttatcaacagacctaacagatttatcgcctatgtggaggtcgcagacaggatggaaacggtacacgtaaaaaatacagggcggtgtcgggagcttttactgccgggaaataccgttggtattcaaaggtcggacaatgaggcccgtaaaacaaagtatgatctgatatcggtatataaaaaagggtccggttgggtaaatattgatagtcaggcaccgaataaggtggtaggggaatggcttgagaaacaggagtatgattatgtaaagccggagtatgtgtatggaaattccagaatagatttttacatggaaaagggtgcaaagaaatatctcatggaggtaaaaggctgtacacttgagatagacggcgcagggtattttccggatgcaccgacggagagagggacaaagcatcttcgtgaacttataaaggcggtttcggaaggatataattgttatatcgcatttgtcattcccatggagggtgtgaagatggtgtatcccaatgccgcgatggacaaggagtttgcggaagcattttatgaagcacaggcagcgggagtgaaagtattgaatcttgcctgcagagtcgaaaaggatgaactggaagtattataaacgttggaatgacatagaggaaatccttgctgcttttcgccgttggaaaagagaagatacagaaaaaaatatgaaacgaatcaaagcggcatgtattacacagacgattcattttattaacaaggatattacgaaaagtgagtattcaaaacgtaaagtgcaggaggaaatcaccagatataagcacagattggacagagagaggacaaaatataaaattctgtcggaagaggttgaagaagacggtttcgtatttgtgcaaaacatattaaaagaacctatatgaaattggtaaaaaaaaactaaagtcattccaaatttaaaaataaataattcgaatttatgaacaaaaattcgtttgatgctttattataattacacctttccgcaagagctaaaaactcttttatgtagcttattttcatagtatcaccattttcaaaaaaccaatgtacataaaattttcacaaaaaaagaactttatcctatattccttgtggatatggggagtctttctccatcatacctattgaaatctccatcattcgatggcaaaatgatggagatatttttaagttgatggaatgtgataactgagtatcttaaataaaaggaaggaaaaaattatggaatattcggcaattcttcatgatatggataaaagattctgctatgcaatcgataaggatttatttgtgatacgtgtgcaggtaaaaaaagatgatataaaagagatcattcttcattatgaggacaagtacataccattgggatggaaggatacacgaaagacgatttcgatgaagaaggttgccacatcacagtttcatgattattatgaggcacagcttcagatgcatttgatatgcctccgctattattttgaatttacggatatgcagggagaaaaggtatattacggcaactatgagtatagcagggaatgcattacaaacagggacagaatgttcgactgtccgcaaaaccttcgcgaggaagaaatgtttgaggtgccggagtgggcagcaaacaaggttgtgtatcagatttttccatctcgctttgcagcgtcacagccaatagacaaggagctgtggtataaagcccccattacatctaaggataatctgcatggtgatctcagaggaattattgatcatttggatcatattcagaagctgggaatagatgttgtgtatttaacacctatttttaaatcggattcctgccataaatatgataccactgattattaccagattgatccttccttcggaacaacagaggatcttaaggagctggtgcaaaaagcgcatgagtgtggaataaaagtagtgatggatgcggtattcaaccatacaggaagagatttttttgcatttaaggatattatagaaaaagaagataaatccagatatctggactggtattttatcgagagatttccgctgaagggtgaaaaaggagaagctcctaacttcaaatgttttggttattatgacggaatgccaaagttaaatctgaaaaatccggaggttgaaaaattcgttacagatgttgcatgttattggattaaggaatgcgatatcgatggatggagaatggatgtaggtgacgaaatcagccatttcttctggaagcgatttagaaaggctgttaaggcagtaaaaaaggatctgctgatcattggagaaatctggcattatgcaggagattttcttgagggagatgaatgggatacggtcatgaattatccattttacctgaatctcatagatctgcttgcagatgaaaaaatcaatgtcagccagtttatacagaatcttggatatttgaaggggcgcttaaacaaaaaatgctatcctttaatgtggaatctgatcgacagtcatgatacagcaagatttctacatctatgtgatgataataagaaaaagcagcatttggctgcagcttttcaattgttattaccgggaatgcccatgatttattacggagatgaattcgcgatgcccggagcaaatgatccggattgcagacgtggcatgtactgggatgaagaataccaggataaagagatgcttgaatggtataggcagctgctgaaggtgcgaaaaaatcatgcatgtatcgtagagggtgaaccaattgaaatagctgcaagggacgaggatgagacgatcgtcctgaccagaaaaaatggagaagagacactcgctttgatcttcaactgcagcagcagcgcaagaatgtttaatgagtatgcgcaaaaatatgatttacttagagagaatccctttgatggaaaaatagagggacttgatgccgttgtaatagtactctaagaatataattattgacaagagagaag

SEQ ID NO: 11343 - DNA, 714 bp, Unknown
  gut microbiota DNA sequence
cagacaatggcttggtgtccgggaaactgcttccggcaaaattcctcgcccaacgcctgcgcccggtctacggtcaaaccgttgtccaccgcgtcccgtgggtcaaagctgataatgtagtggtggctttttacatcttcccgcttctggttcttcccatagcggagattggagcgcatacaggcaacggcaaaatcctcgtcgccgcagttcagcgtggctattcgatagtcctccctgagcatgagccgcccgttttcatcaagggtgggcttcatggtaaactcgtcatgttcaaaggtgaggtactgctcggctgcgccatagtccgcatttttagagctgatatgtttgaatgttgccaacagcgtcacctacctttcgcaggacttcaaacttcaaggcagcaaggtcagaaatggcggcgcggacttcaacggacagggcgttgtatggtgtgccgtactcgttgagggcgcgggcaatctgattgaggttgccaccgatttttccgtattcggcggtcagcctgccaacggcggacaacagttcatcattgaccggggaaacggtaacgatggggcgaatggtcgcccgtgtaatggcttgccggataaattcggcttggctcatgtcatagtgtttcagccgctcggtaaagtcggcgtattcttcctcggtcatgcgggttttgaccacatggcagcggtgggg

SEQ ID NO: 11344 - DNA, 875 bp, Unknown
  gut microbiota DNA sequence
aggatcttcccagtggtcattcagacccatgttgacctttaaagcatcctggtagatgctatacgcgtgtgcgggatcctttataatcagattatggttgacgccatattcctgaatatctattactgcagatgccaggttagacgctgcaagtgcgtcttctgtgtaggttttaagtgatatgtactgtctgatttgtaacgcgaatgccactgttgcagtgaaaaacagcaacacatataccatggtaaacgtagccagctcacctttactttttttgattatccaccgtcttatcatgcttaattttttgcagtagacattctacgcaccctgattggtattgatttgtcctgaaacacgaactgcagcatatcatatccatccatgttaagctgctccatcggcagcttacagaatatctgcagatataccgcattaccatatcctgcatccgacatggtggatcctgtaagatcaatatctgtaacctgcagatctgataactcctgcacaagggtcgtctgatttgccggatccaaatatcccatagtttccatagtgagcatgtatttccgggcaatctgttttacatcctcgttaagactaagtatctgatataggtcgaaaaaaaccataatcagcatcaccgcagcaatcaccatgatcatcgatggtaaaatgtctactatactcccttttctttttttcatcatcatatcatcccaaaataccgattgccttattctgcattgctgttacaattgtctctatgaaacctgtcagactgtctttcatcaccacacaaagaattaatgctataatgcataatcctactgttaccagtattccatcaataccctgactcttatgac

SEQ ID NO: 11345 - DNA, 25403 bp, Unknown
  gut microbiota DNA sequence
ttctgtgcaagctccactgtctttaactgcattcttgccattttcttcttcattttgtttgttcctcctctttgtattgaaataaagtttcatctatcagaaagacccgaccgatgcatacatctgcataatagcagcatataaggcaacaccaatcattgcacccataatacccatcaggcaaaatgtagttatacggttgagtttttctttctttttaagttgcaagcctgcctgcatatccgtgatctgttgggaaatatcccgcagtaattccattgcctgtccagattcccgggcctgtaacaatataatgcatagagaatcgataaatccgttatcaaattttccattaaattcacctaatgatttatcaaacgatccattgaaataaatgctggttgcaaactcactcaatgcattccgcaaacgaccagccgggaaggactgatagctctctgacaaggcatcaatcataggcacccctgcgtggatctgtacctgtaaaagactgtacagtgtctggatctgtggggtcattgcgtcattatctttgttgttcatatacagcaataataatggcggcaacaagaatccaagtaccataccaacaagtcccaaaaaggcatttacatatattccgacagcaaatccgatggccgccaggcaaatacgaatagccaagtatttcaccggatcgatccacgatccgaaatgatttactgcaccgtgggattgtaaaaatcttcgtgtttcttcgtaatcaaacaagagctttttttcatgtaaaatgccatcgattcttatatatgtcttatgcaacgctgtcatagggtgataggtctttcccacgtagatcaccagcaaaagcgataatatggctataatagctggtaatatttttaaactaatttctaatggtgtcattttttacctttctttcataatggcaaatccaaatattaagtaacagatacctgctactcccagggcaatataaccaacaatactgtgaagcaacacatcccagatagacgcttttatcatggtatctacaaccgccagaactatcagcaacattattgacaagattaccatttcgacaatagcactgtctgctatcgccctgcgttcctgactggcccttttagcatccatcagattccgtcgtaaactgtcgacaataacctttaggttggctgtataacgcgagcacacttcaagattgattacaatttctttgaacttttcatgttcaaactgatcgaccagccccatcaatgctgccgaaacattacctgtggtctgtgcttcgatgtagcattcctctaatgcttccgccaatattgaaggagcatattgagccgtttgatgcaacacatttgtaacctcaccttgaattacagaaaagttccctagctggttcagaaattccagaagagatctatctattgttttataatttctacgtgcaagaatcatttccgcaattttaataatcaaataatatccgatggccgccaacaagccagtcatagcgttctttgtgatcagcaatgttcccagatatgctccggctgccgtcaatactatgagtactgcccatacctcgaaagataaccctttgactatctttccaattctgctgtaaatatacagcttttcaggtctttcgataattttttccagcctgcccttattcttttgatcccggatcagcagattcgcatgtgcttctatctgacgtctcgccgcagtttcttcaatagatcctcttactgtcgccaaccctttttcaataatttttgttctctgcagataccaaaaaaagaagaaaattccggaaaaaaggcagattgctataataattttcaaaatgatcatcatttcattcccttctgttcttcattagtttataaatggtacagagatttatatttaatggattgcgtaacgtcatcccatccgtctatttccagaacctcgtacaccttataatctttgacattaatgaccgtgtgatagcagtcagcaatcatctttaacagttctgcgcgattgtatttgttccctgatgcctgtaatgcataatccacgattttctccggtgccgcctgtgcagatagggaatggactgtggcagcactgatctgcccggtgtatgctgcattgatcaggtacatagcttctgtcccctttacttccccgatgatgaaaaaatccacgtccatggtcagtgatgctatgctcagctgttccaggtcatatttaactgctgattccgctgattccgacagagaatgtaaaaagatcatatccggatgatgcttggtcgtaagctcatctgcctgctgtgctaccataaccgccatatcttccggtaatgtttcctttaaggcattcaataaggtcgatttaccatctgagttaccgccacagatcaatgtcgatcccgtccggaatctatccactaaagtatccgctaattgctgtgacataaatttttcctgaacaagatccgaaatctccgggaaatttttggggaacttacggataataagatatggatttccgtaagtggtaacaatcggcgtaattaacgtaaatcgcaatataaagttcttgtcagtttcatcatcagcaaatctctgaatagcattaaggtttgagatattaacaccattttgcgtcgccacacggtcgataaattcccggtattcctgattagatgcaaattgtacatctgccgcttgacgttttccccgcttttttatacggattttgttataggcaatacaatggatatccgatatctccggatcctcaatcaatgaggtcaaccgaaagtatcggaatacgtattgataaaacatcaatcttgcctggtcttttacctctgtatctgcatctatttttttcagggaatcatctacatatgccataaattccgcatctgtgatccttttctggcgcaagcggacaattagatccttccgggatgatgcatattctataatcaaatttttaaaaatatcatcctttgacaaattcatttttcccgccacatcctgttgtacttcacgattccttttttcttttcctaacatgcctttctcctcttattacattcccattgcaagcgttattactgacaccataattccacacaatattccgcaaaatgctattatctttatcactcggactattgtattttctaaattactggattcgtatataatcaccgtatccgccgggaagcgttgttgatccatttccttccatgggttctcctcctctttcttttcccgcaaattttctaaaggttctgatggctcattttgcgaaacctcttccttttcctcaataaccttctcttccactacagtctcggaaattatgccctcagtttcttcatcttccattttcacaatgtggggcagccttggtaagtctgtcaccgactctggaattgatgttttttccagacaattttgtagttcctgaatccgaagatccagttttgcatctgtttgctgtaatgtctctaattcatcaatcagatcattgcattcccgcttcaggtctctgatatccattcatataccttcctctcatgagtggcaacaggatgatggaatccgtatgcgctgtcaagtgttttttatttttttgttttttatgtaggtatttatggctgcttttttcagaaaaaatattttcttttgtctaaagaaacagtgaaaagaactgataaaagacagaatacgttccccagctgctacaatacccggctgcatatttttgcgctttttctcttctggttccttgcatagttttggaaaaagtgtccttcaacagcgtgttgaacggcacccaaaatagaaaagattatccacagagacaccatacttgaaaagttcactatttcactgcacaaaacttgaataaaatctctctttttccacacgaaaaaagaagccacaccggctccctactcacatttatcatctatttttctcttgctcttcggaatttcaggacatgatctatgatttttgagatttatagaaacacaaataagcctattttcatagacttacttagccatctgtggctgattcagtattttctcctgtagcaggcggtgtacaaacttcggatttaaccgccggttccacttgtaccggttcctgattcctgcattccggatccgtatgctttcaagtacagcctctgagaacagccggatcaatgttctgttgtcaggtacctgtccggcgtactgtgtcaaaagtttcgacgcttccttcccttccttctctgtgtaggttgcacgattcctccgcagtacaaaccggttcacatgctccctgagcagttctgtatccgtttttccgctgttcttctctgcaaaatgtgcattcgggcggatataatatatcccctctgtgatcgacataacaaagaacctttttagccggtgaagatatcttaaaataatgcgtttcgtcacagaaaagagcttaccatacttttctaaaagcttctctttgcctattctgtatttcccgccatttgacgggttctttgcaattttaagaaattccagtgcaagcagtttctcctgcggtccgcatttctggaactccggatccaggaacagatcatcaccagtgcttacataaccggtaattccattctggaatgaattgtccaatatcgtaacatcccagtctccgtaaaaggctttatccacctttatgatctccttagcctgtaggctgcgcagcacgtcataaaatgtctgatacgatatctgtagtgcttcacaaatatcccgatagtatattccagacacacagccggtatcgtcctggtaatgcgatatatgtaatataaaatccatttctgccctggacaaatctgcccgcagcagtttgtccagcacaccgtattttatcttttgcatataaattaacagttccttttcatcgtttatactgataatcggtttctcagatcacagtcactcaaactataagtgcgtttattctccagctcctgtcgacaacagaaacgctctgcactgtcaatggaattaagtccaagcgttccctgtaatctgaaaatattcattccactgtcatacatttcttttgccgcagagttacgcaatatcttaggtgttatattataatttttcaggcaataacgtactgtctgttccgaaactgcacgtccacgcctgttaataaatactgcatcagaatcaactacgtccaccgatgctgtatccacatcactttgatatgtctgtaatgcagttatgacctgcttatttgttatgagaaattttcgttcccgtttgccgtttccgtgcatagacactataataaattcatcaaaaaattgaatatcgtcttttttcagggcacaaagttcagatattctcatccctgttgcataaagtaactccacaatggccatatttcgagatttttcccaataaaattttccttctttcggagtactatatagttcccggaagattccagttactttgtccgccgtcaaagtaaccggtgtttgcagtttaacgcgctgggattttattacaggcgtttcctgaatatatcctttctctttgcagtactgaaaaaatatatgaaatgaaacactcctgcgtaacatcgtagccggctttaagctgccattaccttttattattttttggagttcttccgattcaatatccagaagttctgtatgtctctggcttcgatctaaaatctctaaatcacatctgtatgctttaagcgtactccagctcagttttcttgcttcgcattgcttaagatattcattaattgcatcgtgaatcgtcatgttttctgcccctatctatccatttttttaacccactgtataccttttagctgctttttgtggagcttttcaaaccgcctgtataagcaaagatgttcccgcgtaagattatcgtaatcctgatatatcttgatctgatcctcttccaggcgcctgtgatcctgaatcgcctgctcgtatcgtatctggagtttattcagactgtttgcataaaaatccactaagttatcatttgcatgcttctgctccgacatcctaaaatttccccgctttctacaattacaaatacttgtttaaaatatctcttttagacaaatgtctgcgttcctctctggaaccggatccggaaggtacctctctgtgtttcggctgtaactcattcagaaagttgatgtccttttgcattgccgtctcctgtgtagcttccagattttttcggatggtatctttgttttcagctactttgttgtacatctcctccagacgcgtcttaggataagtcataccgcagacacagcagatcgactcttctccgctgtatgcccgaaaggtatctaccggggttcccaccgctttctccagatcttccatgcttacatttccggtcagagctgccgttatatacttcactgtccggtctgcttccgcaggagcatactcattgtctgtcagtgcctgtatcacctgtgagctatctactccctgcgcatgtacaatcatagccatgccatgtgcttttaacgtctcctcgatctccgctctgtcaatatttccgcggagactcttatatttctccgggatctccagaaaactgttgaaatcatctgcaaactgctcattcaggtttattttatcccctctgttgttatccaggataaagcaggctgccgtcccttggatctgcgtcagttcagtgaaacactcataagagttgatgtgggcttttacactttctgcaggtgacggaaggattgtgactgctcctacctcccggccatcatcaagcagtaaatctatcaacataggtcctgctccggatcccgtgcctcctccactagcaaagatcacaaaaagaagcctgtcctgtaattttgcctcaatttctgcagctatgttatcaaaatcctctacgataagatgttttgccttatgccggtctttattgcagccttctccattggatacatgataccggaactttgcattttccagtgtctccagatcctctctggacgtattaatatatagtactgtgtaacccatactctcaaaaagctgaccgatatttcctccggcctgtcctaccgctataaatgcaatcttatccttcatccgtataatctcctatctttatttcttattctgctccaggaattcctttccgtcatccgtgatataaaaagtgttggcttttccatccttcataccttttttcacgtatccctgattttcataatcccgaagttttttaaataatgtattttctcttacatctaaatcttctgtctgcatgatctcctttaatgacatagctgccatacggttatccgcattatttgccaaaagtacagacagcaccaaaaatcccaatcggttcacactctcaccgtctctttcttcctgcatctctgatatagtctgattatctctgatttactcagattatctctgatattctctgctatattgtgatatatccgaatgctgttatctattacatgcccctaagttattttttgagcatatcttccatcgcatcgtccgtcatctgcgcatactgataaagatcatataatggtgcataattgtattttccaaaggcacgaaatctgtatttgcctactttttttaatacaccatttctttccaagcattttacatcctgatgagtgatgttaaaggcactctgatatacctggctgctgacgcctattccaaatagatcagcaaactgcttatattcaaagccgttgttgcaaagaagatcaaacagctcttcttttttcattttttcgttacattcaatacccgcagagctgcataatgaaataagctgttctttaaaagcaacgctctgagtgccggcatttttgcatacttcctttttcacatactcctcgacagataattctttatcaaaataattgatatttctcattttcatcgccctcttttctgatcttctctgctatattctgatatacttggatactatctgatataattccgataatccaagataaccaatgccaaagtacatgaccaatctccacagcttgtccataattcctccggtgcggaaattgcatacccggatccttgcaacactgaacggtatcagcagcggaactccaccggaaagcatatccagaatcaaatggctgagattacctgcaatcatccctatcagaaaagccttctctattccgtttgtattgccgataaccggcagtgccaacagcattgctgcaggaaccagcagagaatgaagcagtccccggtgtcctgtcatggaacggacattctctctcagtttccgcggcagaatgccggaaagcagccggattcctctctgacagccatggactatcagctccactacaggcagtctgctaccgatctggctgtggacattgtcgatatccgggagcagccctcccagaaccgatccggtggccattgccagcgtcatagcgccggggcatcctgtatagtgacttatgacaagtccggcaaagaatcctgttgcactatgcgttttccccgtcatgcttctgcctttccttcggttatcttttgcatctcccgaaaacaatgatacgaacaataatatattttccgccgcttttggcggacactatacacccagttggtcctgcctccgcccctggtctgataaggcactgcaaaaatctcgtgacataccgggcagcgatatattttgcttactccaccgcatcgtttatacatttttaacaccttaacctcttgacaagtactttgaaatcctatattgtaacgtttaacaggatgcggagtaatttatatacttcgcatgtctactcagacacagtgcttcggttctccagcctttatagcactgtgtttttttatccacaaaattccgggtagcgcagcctgactgcctgccaaaaataaggggcatatccgcagcaaaatatctcttccactgcgtagcttctacattcatccaacttctcctcctcgtcctcatagtcatcgacactgactataccgttggtatacagattgaatgccagtctgattgcacgcttgcttcccgaggtctgccatccctcctgcagagcttccgtccggatcagcccggctttcagatcatatacattctcgaaatgctcccggacagtccggtcgattcccaggcagtagatcaatgccatatggtaaatatcaagttctctgcactttagtaaatttctgcagaaaaagtccttatgctccttattcatgaatttgattcctgcacataattctttcatctttccgtctccttccttgtctgtcactgttgtttgatttctgcctctgcagccgccttcctgcgttcgtgccacgcctgattgtcccggaccacctgagtataaaagtcttccggtttatcctcgggatgtcccggacggacgatcctcgccggttccacatgcgctgctacgcagatgtcaatgattgccttctccaatatttttactttgaccgggtctaccttctccggtctgataatcgttacaggcataacactgctccttatcccgctttgtaaagcgtatgtactacggtttgtactttatcctactttctctttcttatgcttctcactctttttacgcatttgttcacttgcacgaagaacattcacattttgtaaaacgagatatcgcatttcctctgggagctgctcatagccctccttaagttcacgtaattcttcatcacttataatattcatacagtcacctcctttgttgattctaaaacaatagtaagtcgttataaaacatttgtcaaggtgtttttgttgaaataatcaacaatttaattgactgtatattattactgtggtatcgtatagaagggaggcgaccatatgaatgaacggataaaaaaaataagaactgataatcatttaactcaagaacgttttgctgccagactcggtgtaaaacgtaacactgttgccacttatgaaatgggacgcagcgagcctagcgatgctgttatttcccttatttgcagagaattttacgtgaatgaagaatggcttcgtcacggaatcggggacccttatttaaaatccacgcataatgatctcactgcaaaagccgtggctttgctcggccgtcatgatcctatgtttgaagctattgtagaagcgtactgcgatctggacgattatgatcgggaagtcatactaaaatcactgcaaaatctggtatccgcatataacgaaaaaaagaaagagtaagcctagcatcagcttgctctttcttttttcattagaagtaccagtctgcaaacactattttgaataaactgcatcatttttggaaaaaagatacacacaatactgatttatgctaatcccctctctctttcatttatatagttttatatcttattttcagtaaatatttttctgaaagtcaatataaagcttgtgtttttcatatatttaacatataatacccttaagaaaggaggctacaaatcatgttatgccagttttcatttcagaatttcaaatcctacaggagagaaacaacattagactttcaggcagctacgcttcctgaattcagagaaacattaattacagaagaaaaagcaactgatttactgcctgtaagtgttatatatggaccaaacggaggcggtaagtccaatctgcttcaggctctttcatgcataatttccactgtcgtaaagccagtaaatgaattagaaaagaatcgacagaatctcatccttcagcagaaggtcgatgcgatgccattcctttttgaccatacctcagcaaatgaacccacagaatttcgtatgttctttcgaatcgccaagagcgaatactgctactatatctcgctcaagaatgatgaggtaatctcagagtctctataccgtaagcaaattaccggcaaaaaatcagcaaccatcttcgagcgtgagacagacggcatcatacctggtccttctataagtaagaagaatatcaatacaagcgtcaatccaaagatgccctatctctccttccttgccataaactacgaccttccagttatcaatgaagtcatgacctggttcgagagttgcataatccgaagctatgccaatccgatagtcgagcatcaaattatgcttgccaaggatgcaccttataaggatcaatttattcgtacattaaatgacatggatatagatattacagactaccgttacgacgaagatagtcatcaactttttatgaagaggatcttaggatctacagaatacgagcttccattttccgatgaatcagatggtaccagaaaacttattgccgctcttcccgttatcctgcttgcacttcgtgagggacgtttggttattattgatgagttggatgcaaagctccatccgaagcttcttaagtacgtcatttcactatttaagaataaggacattaataagtatggtgcgcagcttctcttcacctctcacgatatgtacaccttaaaaaacaccgtattccgccgtgatgaaatctggtttgctgcagaaaatgatgcacatgaaagcgagatttattctctccacgaaatccgtggtgaggataatgaaagaattaagaacacagcggctttcgacaagcaatacctggaagggcgctatggagcagatccatatctcagaggtatgttgggaggggaattctgatgagtttaaagccacctaagaaaagcgaccttgataaaagctggataaaacccagacgtgactcgcataagaaaattcagccggaatatcacctcatcataactgaaggaacggacaccgaacccgcttactttggagttatgaaagaaattatcaacagtgcctactctggccgtattcaacttagtgtccttggtgctggagataataccctaagcctttttcaaaaagcaaaaaatatggcagcatcctcagctaatggatataagcatgtgtgggttgtatatgatactgatgatttccctgctgatcatatcaataaaacatctgcactttgcacatcagaatcaactgacgaaaccatctaccatgccctctggtcaaatcagtgtattgaattgtggtttctgcttcatttcagctacatgcaatctgatcttcaccggacatcctactggccaaagctcacagaaattcttaccgctcttggttacggtgaatataaaaagaatcctactgatatgtatcagattctcttgccatacatggatgcagctattgcaaatgcagaaaagcttgatagagtcaacgaaggaaaacttccatcagcttctgcccctggaaccaaagtatatgaactcgtaaaaaaattgaaaccatatctgacataagaagaaacagctggtaaacaaactttatcaaaatagtttttcccccaagtgtatatacagacaggagatcctatgaatttttatattgaaaaatttcaacccgaagagatccttgaatacttgcgtaagtcccggtcagatgatcctactttatctgtcgatgaagtactctcccggcatcgcgagattttgcgtaactgggaagaaagaaacctggatggatttgtgcctgaagaaaacatttaccgcgaagttgtatccggagaaacgcttgacgggcgcccggagatccttcggatattaaaccgaattgaagatccacgtattaaggctatattggtcgtagatgtgcagcgtctttcccgtggtgatcttgaggactgcgggcgcctaatcaagctcctgcgctataccgggactaaagtaatcaccccgcagaaaatatatgatctggatgacgaatatgaccgtgatgcatttgaaagggaattgaaacgcggaaatgaatacctggagtactttaaaaagattcaaaacaggggacgcctgcagtccgttgctgccggtaattacattggcagtataccgccttatggggctgataaagtatttatcatggaaggcaagcgcaaatgtcctactcttgcttttaatgaaaaatctgagactgtcgtattgatgtttcatttagcttattataagcatatgggctgcgtaagcatcggtcattatctggatgcgatgggcattaaatcacctaccgaaaaacattggaactatcagcaggttcatagaatactacgaaaccctgtctataacggtaaggttgtatggaaccgcagaaaagaagttagaactgtagaaaatatggaagttcacatttctcgtccagtgaacaatgattacctctgttatcccggaaagcaacccaaactgatcccggatgatatttttcagggtgtacaagaatttcttgactctcatattgcacgtaagaatactaataaagaattaaggaatttactttccggaatcttatattgtggttgcggtcgatccatgaatttacgatcatatatgcagtcaacccaaaaatactctgcagatcgttttgtttgtcctgatcaggcctattgcaataatggttccattcttgccgatgatttactgcgcactatctttactgctctgtcttcagaactggaatcatttgaaacaatgcagcaaaatgctccctcacaggaggaaaccaatgttgatacaatatcccttctcagcaaacaattatcggctttggagaaaaaaagaatatccctgtgggataaatataccgatgaggctatgccacgtgacattttcgaggctttaaaagcaaaatgtgaggaagatatcgttttaacaaaaaaagccctaaatgaggcttatacgagcgcagacagccaatgtaaacttagcgataccatttatacgatccaacaggcctcccgctgcatttatgacgattctctgtcagctgcagaaaagaacgtccttcttaaagctgctataaagaaaataacatattccagaccacgccccaatcgatatactaagcaagaacaacgggcaaataaattgcctataagccatggcggctggatgaatccggatccggatattacgattgagtttaatgtataaatttaacgtacagcatctatgcacagatgaactggggcatttggaaatggtagccaccatcgtccaccagctgacccgtaacctctccatggaagagattgagaaaagcggattcgccaactattacgtggatcataccataggcgtctggccccaggcagcgggcggtgttccctttaatgcctgtgagttccaggtaaagggagatatcatcaccgatctgcacgaggatatggctgcagagcagaaagcccgctccacctatgacaacatcttacgcctgatcaaggatccggatatctgcgaacccatcaaattcctgcgggcccgcgaagtcgtccattaccagcgcttcggagaagccctccgtatcacacaggaccacctgaattcaaagaacttctatgcctttaaccccggttttgaccgctgtgaatcctgtgacaattaacccttccacaaaaagagaatccctcacacaaagagggattctctgatcatgatcttattccacattaaataccgagaaaactcttaacggtatccttcattttatccacatcacactgcgtatcatgaagtatgggtgcggtacggatctcttcgatcgctccgggcaccttcaccttagcaattttggataattcatccaccagttcaaaatcgcccatcacatcatatttggtgtcaatcgcatccatgacgcttctggtgaatttgaaggggcttgcggtagaagcaatgacagtggtcttatgatccccggtctctgccacatattttccatatactgcagaagctactgcggtatgggtatcgatcacatagccgcacttctcatacagacgacgaatttctgctgccgtctctgcctcacttgcaaagttaccatagaagtcagccagctgcgccttcatttcttcggtgatctcgtatttgccattgccggtcagcgcactcatcagctcacggtttttatctgcatcattgcctgcgatacggtagatcagacgctctaagttgctggagatcagaatatccatggaaggagatgtcgtcagtacgaactctctgttgcggtcataggttccggtacggaagaaatcatacagtaccttattgtcattggaagcacagatcagcttatcaatgggaagccccatattcttcgcataaaatgcagccagaatgttaccgaagttaccggtgggaactacgacattgatcttctcaccctctgcgatcttaccgtctttacataactgtgcataagcatacacatagtagcagatctgcggtaccagacgtccgatgttgatagagtttgctgaggagaactggaagcccttctcgtccatctcttttgccagttccttatcggagaagatcttcttcacgccggtctgagcatcgtcaaagttgccgtgaatgcctactacgaaggtattggcacccttctgggtcaccatctgcttctcctggatcgggctgacaccgttcttcgggtaaaatacaatgatacgagtaccttttacatctgcaaagcctgccagggctgccttaccggtatcgccggaggtagcggtcaggatcacgatctcgttcttaatattgttcttgcgggcagaagtgatcatcagatgaggtaaaatggaaagtgccatatccttaaaagcaatggtggatccatggaacaattccagataatacgcattgtctgccttcacaagcggagcaattttttctgtatcaaacttggaatcgtaagcactgttaatacaattcttcagttcttcttccgtaaaatccgtcagaaataatttcatgacttcatatgcaacctgctgataagtcattcccgcaagctccttaagactcttgtccagtgtgggaatatgatccggtacaaacaatcctccgtcatcggataatcccttcagaatcgcctgtgatgcggttaccggtgcgccgttgctgcgtgtgctacgatatattacttccatttcctctcctccgtatcaatatgtatggatctattgtatccatcttcaatttcgtaaaagtatagcatactttaagcactgttgcaaggtgaattgataaagtccaagctgcacgcaacatacttattcttattattctttaaaaaactcatgtccgccgtgccggaataacagtgtaagcttttcatcaaaccaacgcattcgtttactgtccgcataatctctggcggcaaaataaagtgctccttcggagatatcctctccatccagtgctcgtcccactgcccttacggtctcctcactgatctgtactctgtcatagctcccatcggacaccggggaaaactgcgtgatcccattctcctgctggaacacgatctccgacacactgtccggaaatttatcggaattcagacggttcaatatgacatttgccaccaaaagtttcccctcctcatcctcacatcctgcttccgcttccacaattttcaacagaacctccagctccgccatgtccaaatgatacctgctgttcctctgcaattcattgcagtcgactacccgctgtcccgaggatgtccgggaagcaattcctatcattctgctctcactgtctgccgctaccgggacttttatctgcagattccgctgtatttcttccatttgtcccaggcacaaaaatcctgccagaaataacaaatgcgctgttaacagaacagtcaatgcccgtttatacattttcgatcctcacatacctacaaatgattttgactccaacttcattctatgcagctcgtccgaaaaatatatctgttgttttccgggaaaaaatgatactatgaaattatgaatgagcagaaaacagcaaaaagcaaactggataaagggatatttcgtgccgtaaaaaaagatggaaccgtgtattaccgcgcctctctgacctaccgcgggaagcacatcagtctgggtagctaccgggatgccggacaggcacactctgcctatgaagaagggattcgtctgttaaatgattcctctctctccctgaaatcctaccgggagacctcttccctttcctttgagaagtgggtctgtctgctcaacttccgggataacggaatctaccttgggaaccccatctatatgggccagcagcttttttactattatctcacgccacaccatgtactgaaatttgatctggaagatctgttctattattcttcacacaaaatcatgcggcgcggtaatcattattttgtgtccgattatggaatgcagctgactcttacatcccgctatggcatcaaaagctatgccgtacccggtagagactattgtttccgcaatggtgatcccacggatttccgcagagaaaatctgcagattcacaatatttatcacggtgtccgcaaaacagtaacaaaaaacggacagcatctctatactgtccgcattcatattcatggcaattatctggtgggccgttatgctaccgatgtggaagccgccattgcctacaacaaagccatcgacattctccgaaacaaaggagtgaccaataactttttatccaactacgtggaagacattgctcccagccgctatgcagagatctattcttctctgcccattgcccccggcattctgaactatccggctatttctccgaataatcaatgaagctgatattcatgttggcataaccggcaatcccatccaccgagatatcgtccgcgtattgccacatggtaaaccgatacggataatccggaacatctcccacctgggataaccatacatcatacgcagacagttttgacagatccacctccttgatcagccattccttgttgccatataataatgttttatatccggccgccgctatcgtatccaaaaaagctttcgtgatcttcgtcttgtccgctctgctgactccttcgatgcgggccgtatcgttatccacgaatcccatatcaaaagccaccggataagtaatcttataatctttaatattgttcagtacgacgttcgcttcttccaccgcttctgcttcggtgatcgcctgtgaagtaaaatacactccgatctgcagtccggcatctgtcgctctcttcagattatccgcgaaatactcatccagaacgatctgaccgctgccgtaacctctggctcccacccgaagcatcacgaaatcaatgcctgctttctttaatttcaggaagtccacataatcctgatatttggagatatccaccccaacataagaagtaagctttccatcctgataatatttcataaaatccgactgacacaccagttttgtaaaatcgtattcgtgtttcggcagataagggctgatcaatacccattcttctttcccatcccgattagtcaccagggtatgctttccatcggtggaaggatctgtatccgtcgtatcttttttcccatcctgtccggaaggattctctgaaggcatcggtgtagccgttgtctccggatacatatcccaaaaatccagatccgaaggagtcaatgtacttccggtgatcagatcctgcgtatccggatactttgctgtctgctgatttcctgcctgttgtacattctccgtctgtgcagttgtattattctgttgatgagacgccggtttcctgttaatgatcagcacaaccgtaagtatcaccaccacaaaaatagtgacagcaacgatcgcactgaccacggtaggagtcaacccgtttccatgatcttcataatcgtccggaagacgcatactatttctcctcttttatgcttttacaatacactttttagggcatttttccatgcaggctccacagccgacacacttttcgggatcaatgaccgcatgaaaattctctactttcacagcatcatgctgacaatttttcacacagattccgcagccaacgcatcctgtggtacaggctttcatagtgaccggtcccttgtcggtagaactgcaggctacctgcaccgtattggaatatgggatcagactgatcaggtgtttcggacatacctctacacattttccgcaggccttacacttctctttgtctactacggctacaccgtttttgacgtgaatggcatcgaaaggacatacctgtgtgcaggttccatatccaaggcagccgctgttacaggatttcggtccgcctccggggacaaagctcatcatacggcaatccttgattccgtaataatcatagtctgtcttcgtccggtcgcagtcaccctggcagtgaacatacgctatttttctctcggaagcctctgcctctactcccatgatcgcagcgatttttttgccgacttcctctccgcctaccggacaggtattaacggcagcctctccttttgcaatcgcagcggcaagtccggaacatccggcgaacccacagccgccacagttattaccgggaagggcggcaagtaccgcttcttccttctcatctacttctactttgaattttataccggccacgccaagaaacagtcccacaaagatgccgacgattccgacacaagccgcagcaatcagaattcctgttatactcatctatgttactccttcctagatcagaccggagaatccgcagaaagcaattgccatcagtcccgctgtcagcagcaccatgggcattcccttgaaagattccggcacctcattgtattccattttttcacgcaatccagccaggatcacgatggcaatggtaaaaccaagggctgtggcaaatccgtttacaataccggtcagaataccgtattccttctgtacattggtaatcgctacacctaaaaccgcacagttggtggtgatcaggggtagatatacacccagtgcctgatacagagaaggcatagcctttttcaggaacatctccacaaactgtaccagcgccgcgatcacaaggataaatacaatggtctccagatactcaatgtgcagcggctgtaagataaatttataaatcacgcccgctaccgcacttgccagcgttatgacgaaaataaccgcggttcccataccgcctgcagtcttgatcttacgggatactcccaaaaacgggcagagtcccatgaactggcttaagacgatattgctgacaatggaggaactgatcagtaacagaagcatatctttcacactatccatttatttgtcctccttatccaagtctattgtctcaaggtcatccgttgcagccttaggctttgctgccgctctggccacgtccatcacggcatcctccgaagtatcggtattgtcgtaaaatctctctgaacagccgctttcgccacagtgcagacaatcatgtccacagccggactggattttctcataatccttgcctgccagttttctcttgttcttcacataattctgcagagcagtcaatgcagccagcacaaagaacgcaccgggagccagtccgaagatgttgatcgtcacataggaatccggcatgatccggaatccgaagacagatcctgccgccagaatctctctcacggcaccgatacaggtcaatgccagggagaaaccaagtcccatgccaagtccgtcaaacaaagaaggaatcggcggattggagtatgcatagctctccgctcttcccaaaataatacagttcacaacgatcaaaggaatgtatacacccaatgcatcattcagagacggcagatatgcctgtaaaagtaactgcaccgccgttacaaatgaagctataattacgataaatgcggggattctcacacggttgggaatcactttccgcaacagggaaatgatcagattgctcatcgtaagtaccaccgctgtcgtcagtcccattcccagaccgttcattgcggaagtggttacggccagtgtaggacacattcccagcatcagcacaaaggtaggattctccttgataatgccgttgtaaagtctttcacctgctttattcattgcctgcacctccctgtacataatcatgaaatgccagaaggcttccgttcacggcattggtcacggccttggtggtgatcgttgcaccgctgatggcatcaatctcactgtcagaagcggaaccggtcttggtatacgtaaagctcttcacatttttctgatggaactgcggtaccaatacatcgcctgctttcattcccagtcccggtgtctcggagatactcaaaatagaaatatcatttacggtaccgtccagacggattcccacatacaaaacgatatttccgccgtatccctcagaggatgtggtctggatcacatagcccagtttctctccggaggcatcctgagcttcatataccgtaccgatggtaattccggtatcggaaagcttctgcgccgtatcatcggaagggatatacggatccaattcttcaaaatgtccggcatccgtaaatactgcctggcaggcttcctgcactgctttttcttcctgcagacggatgggttccttggtaagttcatagacaaatccaagtaacaggccggcgatcagggtgatggcaaataaaatgcctgcttcttttaacattgcctgcacatcatttttatttttcatgtttcgcacctgcctttcttccgaaagcaaccggcatggtgaatttttcaatcagaggtaccagaaggtttcctaaaatgatagcataagataccccttccgctcccggtccgaagatacggaagattccggtaagaagtcccagtacaacaccatatacatactgtcctttgatggtgatcgggcgggtaacataatccgtagccatgaaaaaggcacccaggatcagaccgccaccggctaactgtgccgacagatatgcgggatcaaaaccatgtccgccgaaaaatccggcaaacaggatcactgtcacaatataggttcccggaatgcgcagatcgatcactccgatcaggatcaggaaacatgccccgatcagtaacgcaataacggaagtctcgccgatggtaccggctgtcttacctacgatcatattcatgacattgacactctctcctgccttcagtgccgccagcggagtggctccggtataagcatcacaaacgaagttcgtcatctgcgaaggaaaagagatcaataagaaacatcttgctgccagtgccgggttcataaaattttgtcccaggcctccaaacaacatttttactacaagaattgcaaacacaccgcccagggcagccatccacagaggaatacttaccggcagattcagtgccagcagcagtccggtgaccaccgccgacatgtctgctatggttattttcttcttccacagccagccgaataacaattctgtcaggactgtgcttgcaatggtaacagccatcactgccagtgctctgggaccgaaattgtagattccgaagccggcagcaggcagcagtgcgatcaccacagccgtcataatactactggtcgttactttcgaccttatatgaggatttgaagatacttttaaaagttcactcactgttcttccctcctacttctttttctttttggccagttgaattttacgcatggacttgatctcctgcgtcagaggtctcttggcaggacatacaaagctgcagcagccacactcacagcattccattccgttatgttctacgaatgactcttcgtcaaaatgctccgcataagttgccagcagactgggaacgatccttcccggacatgcttccacgcatcgtccacagttaatacaggggctgggttccatcgcagagacatcatcctgtgtcaatgccagcaaagcagtagaagtcttggtcgtcggaacattgagatcaaacataccgaatcccatcatcggaccaccgcagataatcttctccggatcctgtttaaatcctcccgccacatccaacagttcctgataactcataccgatgggtacccggaagttccgtggattcgccacagcatcaccggttaccgtgataatgcgctccatcagagggcgtccttctgtaactgctctgtaaatagcaaccacggtatctacattgtctacaatgcatcccacatccgcgggcagcatggaagaattgatcttccgacccgttgtggcatagatcagctgacgttccgcaccctgcgggtacttggtcttcaatgccttgaccgtgatctgcggatcatttttggtcatctgttttaacagagagatgcaatccggtttattatcttccactgccagaattccatgagcattatcgaacagcttcagtatgatcttcagaccgccgatcaacttgtccggctcctccatcatcctgcggtaatcagaagtcagataaggctcacattccgcacagtttgcaattacatagtcaattttatcaggatccttcggagataattttacatgggtaggaaagccggctcctcccatacctacaactccggcttcttttacaatatcgatgatctcatctttttgtaatttatccaccggtgcatagggatgaaattccatactttcatacagaccgtcattgtctattacaatgctctgtatcagatctcccgtcactacacgccttgtctcgatagactttacagtaccggacacggatgcataaatcggcgccgacacaaatccaccactctccgctatcttctgtcctgcaagtacacgatctccttttgccacgattggcttagccggggctccgatatgctgagacatgggatagaccatttctcccttaggcagaacatcctggatcggcttgtctttcgacagatctttgccatcatagggatggattccacctacaaatgtcaacttcgccattttctatcgtcctttctgaatcattcttgtatttcagatcacattacgataattgtactatttttatcaatttttatcaacttttatcaacaaaatgctactgcattttataaaattatggtagaataaattaaataagcaaacatgccccacggcagaaagaggtcatacatgaaaaaatcagaagagactctggaggattttgcgatctcctatcccttggataagctggcacctctggaacaggtactgtttctcgatattgagaccacgggatttacttcccgtacttcttatttatatatgataggctgcgcttacaaccgggccggtaaatggcataccatacaatggatggcagaggattacgcacaggagggagcgattctcactgctttctttgactttgcgagatcctataaatatctggttcatttcaacggcaataacttcgaccttccctttatcagccagaaatgtgcccagttaatgcttccattttctttcgaaggttttcagggaatcgatatttatcgtcggatctctccttataagtttttcttaaagttgcccaactgcaaacagaaaactctggagcaataccttggaatcgcccgtacggatgtcttttccggtggtgaattgatcggattatatcacgactatgtcaagaatccttccgaattcaccgaaaaggctttattccttcacaatgcggacgatttaaaagggatgttggaagttcttccgattctcgcatactatgatctatttaacgagaactgtgtcaaagccaaaaaggtacaggccaactattacaaagatatgcatggggcacagcgaaaagagctgctgatcacactgcagattcctacaccgctgcccaaacctattactgcctctgccggtaattgttacttccgcggcgagggagaatctgctactcttaaggttccgatctatgaagaagaattaaaatatttctattcgaactacaaggattattattatcttcctaccgaagatgtggcgcttcataaatccgtagctggttttgtcgataaggaacacagactccaggcttccgcagcgaattgctataccaggaagttttcctgttatcttccccagtgggatattttatttacacctttcttcaagagggattataagagcaaggaattattttttgaacttacagatgaaatgaagaagaaccgtgaaggtttttcccgttatgccaatcacgtcctgtccatgattgccgccacatattaaaaaaaggaaagctgatcgctttcctttcagactgtagacaaaacgcttttggtca

SEQ ID NO: 11346 - DNA, 814 bp, Unknown
  gut microbiota DNA sequence
cacggaaagaagacattgtcattgtgaaaagccctgtgggaatgccgggcagagccatacagaatgcttttctggaaaaagtggcggccggagaacggtttatgaccggatgcagacattgcattaagacctgcgacccgaagacggcgccctattgtatcaccagagcgttgatcaatgcggcgacgggagatgtggataacggactgttgttctgtggcagcaatgcctggcgggcacagaaaatagaaagaacagtggatatcatggaggaaatggcgtgaggaccataagaatcaccggaaccggaagtgcacttccgggaaggattgttacaaataaagaattggagcagatggtagaaacctcggatgaatggatccgtgagagaaccggtatcggtgagcgtcatgtgtctgtgggggagacagttgtgacacttgcgtcagaagcagcccgtaaagcactggaacaggcaggaaaaagagcggaagagatcgacctgatcctggtggcaacctgctctccggagcagtatctgccctgttgcgcctgtcaggtgcaggcggacatcggcgcagtgaatgcactggcttttgatgtgaatgcggcctgttccggatttttgtttgcactgaataccgcggatgcctatctgcggacgggacttgcggaaaatgcgctggtcatcggcagtgaggtactgtctaaactggtggattggaaggaccggggcagctgtattctgttcggagacggtgccggagcggtagtcgtagaacgatgcaaggcagagtcccgagcggtggaatac

SEQ ID NO: 11347 - DNA, 9266 bp, Unknown
  gut microbiota DNA sequence
caccaatctggaaagggtcggaaatatgtcatccgcttccattccggtactgctggatgaactgaacaggcaaagaaagctgcaccgcggcgaccgcgtcgttctggcgggattcggagccgggcttacgattggggcttgcgtgatgacctggtagacggtatactgataacgactaaggacacgacaacggcatggacgcggtccggtagacaggaagcctgcggtccgggagcattgccggtataccagagaaacatttattgggaaaactatggaaaaaagcaacaaccgggtactgaatgaattgctggtgaacctgttccataacgtgatggatgcagaggcaaaggcggtcataacagaagaattcaaggatattacgaataatgatatgcacattctggaggctatcggcatcgaggaaccaaagagtatgtcccggatcgcgggggaactccacgtcaccgtgggaaccctgaccacgaatatgaacagtctggagaaaaaaggctacctggagcgtaaccgcagcacacaggacaaacgtgtggtgctggtgaccctgacagagaaggggcggaaagctttttttcatcacagagatttccacaggaaaatgatccatacgatcattcgggatctggacgaagaagaaatgaagacattgatcaaatgtctgggaaaactggatacatttttcagagatggcaatgcagagtgaccggagagctccggttactcttttttgtttgcaggatatcgaaatctttcggaaattacaacaaactattttcagatgaaaacaaatgtattaaaatagaaatagcgattcaaaatgttggatagttatagtagacgcaagagaaaataatgaaattatagaaacggaggatcctacgatgaagagaatcggaatgttaacgagcggtggtgactgccaggccctgaacgcagccatgagaggcgtggtgaagaccctggcgaacggcaaggaagaggtggagatctacggcttcctggatggttacagaggactgatctacggtaatttccgcatgctgacagacaaggatttctccggcatccttaccaagggcggcacgattctgggaacctcccgtacccccttcaagacgattcaggatccggatcccaacgggctgaacaaagtggaagccatgaagcagaactattacaagctgcagctggactgccttgtaattctcggtggtaacggcactcacaagacggctaacctgttgcgcaaggaaggactgaatatcgtgaccctgcccaagaccatcgacaatgacctgtggggtactgatatgaccttcggtttccagagcgcagtagatattgctacggatgccatcgactgcatccataccacagcagcttcccacggcagagtattcatcgtggaagtgatgggacataaggtaggatggcttaccctgaatgcaggcatggccggcggcgcggatatcattttgattcccgagattccttatgatatcgataaggtgatcgagaaaattgaagacagagacaaaaaaggctgccgttttaccatcatcgcggtagccgaaggtgctatctccaaagaggatgcagcccttccgaaaaaagattacaagaaaaagatggaaaaatatccgttcccttccgtatcctatgaagtggctgcgcagatccaggagaagaccggcagagaagtacgtgtcactgtacctggtcatatgcagagaggaggaagcccctgcccttacgacagagtattcgccagtcgtctgggctccgaggcaggcaagctgatcctggacaaccagtacggcttcatggtaggctataagaaccgtgagatcgtaagagttccgttagaggatgtagcgggcaagcttaagaccgtggatcctgatgccaccatcgtgcaggaggcgaagatgctgggcatctgctttggcgattaagaaagtcttcacggcagaacaaagttaggaagagagaaaacacatgtcatatacagcgctataccggaagtttcgtccggatgctttttccgatgtcaagggtcaggatcatatcgtgaccacactgaagaatcagctacgggcgaaccggatcggccatgcgtatctgttcaccggaacgagaggtaccggtaaaactacggtggcgaaaatttttgcgaaaacagtgaactgcgaacaccccacagaggacggcccctgtggggaatgccgtatttgtaaggcgattgcggcgggagccagcatgaatgtcatcgagatcgacgcggcttccaacaacggtgtggacaatatccgtgagatcatcgacgaggtatcctattcccctgcggagggaaaatacaaggtctacatcatcgacgaggtgcatatgctctcccccggagctttcaacgcattgttaaaaactttggaagagccgccctcttatgttatttttattctggcgaccacagaggtgcacaagatccccattacgatcctgtcccgttgccagagatatgattttaaacgaatctccattgataccatcacggatcgcatgaaggaactgatggacacggagcaggtacaggtggaggacagagctctgcgctacattgcgaaagtagcggacggttccatgcgtgatgcgctaagccttctggatcagtgtatcgcgttccatctgggcaaggagctgacctacgacatgaccctggatgtgttgggggcagtggatacggaagtgttcagcagattgctgcgcttcgtcatggaccggaatgtgttaggctgcattgagctgttggaagagattgtcatgcagggcagagagctggtacagttcgtcacggatttcacctggtatctgcggaatctgatgttagtacagacggcggacaatctggaggatgtcatagatatgtccacggataatctggcgaatctgaaggaagaagcttccatgcttgccatggatcagatcatccgctatattcatatcttctccgaactgtccggacagatccgctatgcggcgcagaagcgtatcctggtagagatcgcgctgatcaagctgtgcaagccggagatggagacagatcaggaagctgtcctggatcgtatccgtcaggtagaggaaaaagtggaaaacggcattgtcgttacggcgcaaatgcctgccggagctcccggagtacaggggggaccgcagggtggcgcggcgagaccaaaaccggagctgcccaaggctatccccgaggatgtacaggagatcgtgcgaaaatggccgtctatcgtaggcaatgcggagaatcctatgaagatgtatctgaaaaatgccagattgagcctgggcggagacaataagctcatggtggtgctggaggacggactggcctccgattatttcaagggagaagcccacgagcagaataagcagcagctggaggctttattgtccgacttttccggcaaggagatcgaagtgacgatccagacggtggaaagcaaccgccagttcgaggacaactacgtagatcttagcaaagtcatcaacatggagatcgatgaagaggagtgatcctgcatgaatttaggattgcgacaggcttgcagataaggtaagatatagtaataactcacccatagaaaggcagcgtgactgcttgcagacaaagcggacttcctatgaggggagtaaacatatatgttatgatttcgaaagtgcgtagcactgagaaatcaattataaatcatatggaggaagtaataacatggcaaaaagaggtggattccccggaggcgcaatgcccggtaatatgaacaatctgatgaagcaggcacagagaatgcagcgtcagatggaagagggacagaaggaattagagaccagggagttctctgcatccgcaggcggcggagctgtggaggtgaccatcaacggtaaaaaagagatcacatccatcaaactggcagaggagatcgtggatcccgaggatatcgagacattacaggatgctatcgtggcagcagccaacgaggcactgcgcaaggctgacgaagccaatgcagagctcatgggcaaaatgaccggaggcttaggaggatttcctttctaatggaactttacagcggacagatcaataaattaatagatgaactggcagccctgcccgggattggcagtaagtccgcacaaagactggcttttcacctgatcaatatgccgaaggaccgtgtggacagactggcgaatgtcatgatcgaggccagagccaatgtccggtactgtaaggagtgttataccctgacggataaggaaatctgcccggtgtgcgcaaatcccagaagagatcatcatacgatcatggttgtggagaataccagagacctggcagcctatgagaagaccggcaaatacgaaggtgtgtaccatgtcctgcatggtgccatctcgcccatgctgggcgtgggacccggtgatatcaagctgaaggaactgatggaacgcctgcagggagatgtgcaggaagtgatcattgcgaccaattccagcctggagggcgagactacggcaatgtatatcagtaaattgatcaaaccgaccgggatcaaggtgaccagaattgccagcggagtgcccgtgggtggtgatctggaatatatcgatgaggtaacattgctccgtgccttagaaggcagagtggagttataagcagcagagaaaatgaataaatgtgggaggagaagacaatggcagtaacaaaaagtgtatttgggaaaagccccgaagggagagagatctctctgtataccctgagcaatagcaagggaatgcaggcaaaggtaacagatctcggtgcgaatctggtaggaatcctggtaccggatgtgcagggtgtgacagctgatgtgacactgggctttgacagcgtggaccgttattataagaattacagcttcttcggtgcagtgatcggaccctgtgcgaaccgtaccgcaggggcagcatatacattagacggtgtggattatcggatggatcaaaatgacggacccaacaacctgcacacacatattgagctgggattccataagagaatctgggatgcggtaccgggagagaacagtgtcaccttttctctggaggacgaggatggatatctgggattccccggacataaaaaggtgtccgtaacctattccctggacgaggagaatgccttaagactgcattatcatgcgtccagtgacaaacggactatttttaatctgaccaatcattcctattttaatctggacggacaaggtaccggcagaattgaggaccatgaattatggctgggagcttcccatttcacacctgtggtaccgggatctattcctaccggtgagatctgcgcagtggcgggcacacccatggatttcacacagccgaagaagatcggaagagatattgaagcagactttgaacagttaaaactgacaggtggctatgatcataatttctgcattgatgactgggatggcagcctgaaacatattgcgactgcaaaaggaccgaagagtggcagagtgatgaaggtatataccacattgcccggcgtacagttctatgcaggtaactttatcgcaccggaggagggaaaagcaggcgcagcctatgataatagaagcggattcgccctggagacccagtattatccggataccattcatcatgagaacttcccttcttatatctttggtggggaaaatggtgattatgattctgtgaccgtatataaattcgagtaaataaatagttatgcaaactttgtcgaagtgtttttttaaggacgcgacaaagaacgctaaaatacctcctgtgcggatgctatagttagtgataactgatagaaacggcatgggaggtgttttttgtatggaattaccgaaaaatataacgcagatcggagaggcggacaagcactgcagagtctatgtggaagattatgtggtatcttacataaaacaaatgaacggaatggcacagaacaaagacattgccattgcgctgtatggcagacggacgacggagaatggtgtggcttatctgttcgcctatggttcggcgaaactgaattttctgcaaaaaccgatacggcacctgtcccaggcacaggagcaggagatcgagaagctgcggaagaagtattttccggaaatgacatttttaggatatcagatcctgaatggcgagatggtggaaggcttccggatctgtgagcaggagatctgccggtatgtggcaggttatgcacaattttatgaaaaaaatgacagcatgctggcgtatatgctggagaaccggggagaggaagcggaaccggagaaactggatcaggaaaaatatgaggtcgtaaagaagcggcaggaagaacgcagacagagacaggaaagcggacatgccgggcgtgtcgaatataccggacgagcggaacatagggataatattattcccatgcctacggagggactgcgccggatgaagatggcagccacgggagtgttcgtactgctgtgcgttatggcactggcactgatgcggcaggaaaacaccggggaatccctgggagagacggccaggcaggcgatgagcagtctcatggagcagaaattaccggatgcggtggaggagcagaaccaggtcagtacactcgtggcggaggacaagctggaagaggcactgcggcaggaaaacaatgccatggcagagagcgcgacagctacagcggagaccactgtgccggagacgatggagaccgaagctgctgtggaagacacaacagaggtaacagaagaaccgcagccgacaccgacaccggaaccgacacctgaagtgacagtggaatcggaaacaccacagacacaggcagctgtggcacagccgacggcttatacgatcaagaaaggtgacacattgatcggtatctctttacgtaattacggaagcaatacaaaagtgtcggaaatctgtgcactgaatggaatcacagatccggatgacatcaaaatcggacaggaaatccttttgccgtaaaaaacttattttcaaaaggtaagattatggtatactgttaatgttacacaatggtcatgatgatcattagatataagaatacataaggaaataaatgcatggcagcagatattaaaaattatctgaaagaaaaagaaaaacggcaaaagaatcaggatgactataagaaaaagatccgtaaacataaactgaccattgtataccgggtgcttttggtagctgcggcactgggagcggcgctggcactggtggtggagcaggcgaagcggcatatttacacaggttatgataccgtgtcctctgtaaacagggagacttcgtcagatgccatagatgttcgcctgaaaaatggaatccttacctatagtaaggatggtgcacattgtacggatgcaaagggaaatgtgaaatggaatcagacttatgttatccaggatgtgaagcttgctacctgcggaagtgtggcagctatcggtagttacaatggtcgtgagatttatgtacagaatacggagaaacagctgggaaccattaccacgaccatgccaattcgtaatattacggtagcagacaccggcagggtaacggcaacactggcggacacagatgcgacctggatcatgacttacgaagcagacggaagcaacagttacaccggacaggcacatatgaatgacggaggatatcccatctccatcagtctgtccccgagtggagagctgttggcggtcagctacttatatgtagatgcaggagtggtgaaatccaacgtggtattctataatttcggtccggtaggtgcgaaccagagtgactatatggtcagcgcttatacctattccgatctggtcgttccgaaagtgcagtttatgaacaatgataccgctttcgcggcaggtgacagccgtctgatgatttttagcggatcccagaagccggtaaccatcggagaatatctctatgatgatgagatccagtcagttttttacagcgagaaatacgtaggactggtatttttatcggatcaggcggagaccaaataccgcatggatgtatataatgattcggcggtaaaagtggggagctattattttgatgtggattatacagatatattttttgaagaggatggtatggtgatctacaacgagtcggaatgtcagatcttcacaacagagggtgtggaaaaataccgggggaactttggcaagagcgtgcggcttatgcttctggcaggaggatcctacaaatattacctggtgacggataatacaatagataccatacagttaaaataaaggagtatacgaatgaatctgaatttattgcttattattacagcagtgatcttgctatgcatggtggtggacggttataaaaagggaatggtgagatccctgatctctttgatctccctgctgatcacctgtgttgtactgttcctgctgggaaatgcgctgagcagttactttgacggaaggtttttcaatgtgatcatcactctgttattgctggcagccatcggactggtacaccatttactaaatgtggtatttttctctgcaaaggtaatctcaaaactacctatagtacatagcctggacaaattactaggtattgtggttggaatattggaaactgtcctaattgtttggacaatatatgcatttgacatcttcagagacctgggaagcctgggacaggtcatcgtagattacaccagagacagcaagatccttacatgtctgtatgaaaacaattacctggcatacctgatcgaacagctcggacaaaagcttcctttcttcgtaaaatagaatagaaaagtggtaaaaatcccctgtacatgcggaatttgcatggcaggggataatttgtgtaaaaaattcaaaaaataatgttgacaagtgatatgtggggtgatatactcagattcgttgtcagggcagtaccgagacaacacaacaacgaaaaagaaattcaaaaagattttggaaaagttgttgacagatgtctggcagatatggtaatataaaaacctgccgcgaaaaacgaaagtttttcaaggcaaaaaagtttttaaaaaagttgttgacaaacgaaagcggtcatgataagatatcagagttgccgctgagaacaacagcaacgaagaatcactgatc

SEQ ID NO: 11348 - DNA, 5852 bp, Unknown
  gut microbiota DNA sequence
atccggtctttactatcctatctttcttactgtctgtccgcaagttttatggttttcatcagtgtattctccagcacacctgccggacagtcatcgctatccggcttaactttttacagcaatgtattcagatccaccagggttccgccctcgatctccacgcacttatcactgttcaactgcaaccatacactgcaggcattagggttatataccttttcgtaatccgcagagaactgtaaacgttttgatgcatccatataatcaatgatctcgatgttggtggcgtaccaaatgtcgtctctgccgcccatatatttgcagaagttttcgatcacatcccagttgtcattattatcgaactcatagctgtgaccccagacatacatcagcttcagatactgtctcttctggaaattcgcgaaaaactccgcatactccatcagcttcgggtcgttatggtgacaggtggcgtgccactccaggggatccttcggcagtgcaaaatccggaaccgtctctaccactctggcataagcaacgcccagctgacgatacagctgcttgatctcctcgctgtatgaaccgttgggatacgcatgtcccctgacgatctgtcctgtccatttctccagacctttccgatcctccagaagctcctgtgccacttccactaacggacatctctcgatggtgggatgagtcatggtatgggttgcgatctcatgtcccgcatacagaccttccatttcttcaaaagtcatgcgggggcgttctcccacctgaccgtaattcagattaaatgttcctttgataccatatttattaaaaatgtcgatcaggcgtctgtcctgtaccttaccgtcatcataactcatggtcagtgctttggcttttccaccggggaaacaagtatatactttcatcttttccatccttttctactgtaatttctattgtggttttaataatatgatgattttcatcccacatgttttcatcatattacgaccggaacgattttgcaactgataagaatccagcattaactatctttaacgtgcagaactttccattgccttccttccattcatcctttaatataataaagtatacaacaaataaacaaattccagtgagaagggagcatatttatgaaaaaattcaactccttccgtaatcgccagaacggctttgaagatttaggttccggcaccgcggaagcagcaaaaacgaaaaaaagctggtggaaggtaccagtcaccattcttgtgattctggtaatcgctatttttattttcaattccacctatcagatccgcgaacaggagcaggcggttctgatcaccttagggcaggccaaagcggttacggatcccggacttcattttaagataccgttcatccaacaggtccgcaaggtcaataccaccattcagggattttccctgggatatgatgtagattccaattcttcggaaaccgacgattctctcatgatcacttccgattacaattttgtcaacgtcgatttcttcgtagagtatcgcttcagcgatccggtaaaagcagtctatgcttccaaagaccctgtgctgatcctgcgtaacatcagccagagctgtatccgcactgtcatcggcagctatccggtagatgacgtactgaccaccggtaaaaatgagattcaggctgctattaaagaaatgattctggagcgtctgagcgaacaggatatcggtattcagctggtgaatatcacgatccaggattccgagccgcctacctccgaagtcatggaggctttcaaggccgtagaaactgccaagcagggaaaagaaaccgctctgaacaatgccaacaaataccgcaatgagcagcttcctctggcgcaggcacaggcagacggtatcattaaggacgccgaagcacaaaagaccgagcgcatcaatgaggctactgcacaggttgcacgttttaacgctatgtacgaggaatatatcaagaacccggccgtcaccaaacagcgtatgttctacgagaccatggaagaagtcctgccggatctcaaggtagtcatcgaaagtcccaacggcaatacacagaccttctaccctttggaatctttcacaggtacgacaaccggttcttccacggaaaacagtacctctgaaaccgcacaataatcattgtctccagaaaggcagttttaataatatgaaaaaattaaaaaatatatctctgattctattggtactggtgctgctgatcatcggatcctccagcattgtcgttaccaacgaaaacgaatacagtctgatccgacagttcggtaaagtagaccatgtagtgagttctgcaggtgttacctttaagattccttttgtacagagcgtcgataagctccccaaggagatcctgctctatgatctgtcttcctccgatgtcatcaccagtgacaaaaagaccatgatctgcgacagttacattttatggcagatcaacgatcctctgaaatttgcccagaccctgaactcttccatctccaacgctgagagccgtctggacactatcgtatataactctaccaagaacatcatcagcagcactactcagaatgatgtgatctccggacgtgacggagagctggcggcagccatcatgaaaaacattgggaacaccaccgagcaatacggtattgaattgctctccttcgaaaccaaacagctggatctgcccagtgacaacaaagccgctgtgtatgagcgcatgatctccgaacgcgaaaatatctccgccacctacactgctgagggaagctccgaggcacagaagatccgcaataccacagataaggaagtcaatgtcctcctgtcggaagccaacaaaaatgcagaaattctcattgccgagggagaagcagaatatatgaaaatcctgtctgatgcttatgcagatgcatccaaacaggacttctattccttcgtcagaagtctggatgctctgaaggcttccatgaccggtgataataaaaccgtgatcctgtctccggattctccgatcgcacagattttctacggaagataacgtaaaagccggtgtctgcaatattcttgcaggcaccggcttttttatgccagaatctcctcaattctgcgtctctcttcttcactgaatgcggttgcatgtacaataccaatattatccaggatctgtgagggcttggatgcgccaatcagaacactggtaatatccccatcccttaagatccaggacagtgccatctgtgccagggtctgccctctctgggatgccagatcgttcagtgcacgtaccttcttcaatgtctcttccacgatcgccgcttctttcaggaacctgccgtcggtacggacacggctgtcctccggaataccgtggagataacggtcggtcagaagtccctgtgccagagggctgaaggtaataataccgatgccgtgagctgcagcgtaatctttcagaccatccttctcaatatctcttacaaacatggaatattttctctggttgataataaacggtgtgcccagttccttgaacagttctgccgctgcaatggtctgttctttattgtaattggaaattcccacatacaatgccttaccggatttcacaatgccgtccagtgcacgaacggtctcctccaacggtgtatttggatccggtctgtgatggtagaagatatccacataatccagtcccatacgcttcaggctttgatccaggctggctacgagatactttttgctgccccagttgccgtaaggtccgggccacatatcatagccggccttcgtggaaatcaccagttcatcacgatatcttcccagatcctttttcagaatccgaccgaaattctcttccgccgcaccgtataccggtccgtagttgttcgccagatcgaagtgtgtgataccgtgatcaaaagcagtgtgacacatgtccaacatattgtcaaaattcccattggatccgaaattgtgccataatcccagagatactgccggaagcagcaatccactggcaccacagcggttgtatttcatttcttcatatcttttctcatctgcctgatacatttaaataacctccatctttttaccttttgttgtctttattatatttttttacgtctcccgtttctatgcaaattttatagaatgaagtgcattatcttacgaattatctcttacgtcccacgatcttcaggcggctgaaaaacaggtaatacacaataaaagcaatacttgtcaccgtccaggtcagtggatagctgaatacaatggtgagaatatcatttttcagaggtacggctgtcaggatccataccacacgcagcgcgcagattcccagacaacagatgatcatgggaagccagctgtcgccgataccgcgcagagtaccggacaaaatctcaatggcaatataggtaaaatatgtaggtaccaaaaagtgcagaatctgttctccgatcactaccacctgtgcatccgtggtaaacagttgataacagatcgatgcataattatagaggatcacggacaacagtacggttgcccccgccgtaattcccatacaggtacgcactcccttgtgtacacggtccattttccccgcaccataattctgtcccacaaaggtagtgatcgatatgccaaaggcgttgacgatcatccagaacaggctgtcgatcttgctgtaggctgtccatgccgctaccgtatccgttcccagcgcgttaacgctggactggatcagaatattggacgatgtatacattaccgactgcaatcccgccggaagtccgatccggatgatcctgtggaacattcttccatcaaaacggatctttttcagttccaggcgatgcatgtccttcgtccgcatcagtacccacaataccagcacagcactgagcgcctgcgacaggatcgtagcaagtgcggcacctgccacacccatatgcagtccgatgacaaatgcaatatccagcacaatattggtcaggcagctgacgatcaggaaatataatggtctcttggaatctcccacagcccgcaggatacctgcgcccatattgtagatcaggttcccgatgactcccagaaaatagatacggatataggttgtcgacggtcccaaaatatcctcaggtgtagacatcgcgcgcagtgcccagggtgccgccgtaacacccacgatcatcatgccgactcccgccgcgaggctgaaagcgatggaggtatgcaccgcatagcctaccatctcggcacgttttgccccataatactgagagataatgactgtggcaccgctggacaatcccacaaaaaatcccaccagcagctggatcagcgtaccggtgccgccacctaccgctgacaaagcttcttttccgacaaagcgccctacgatcaccgcatccgctgcattatataattgttgaaaaaaggtcccgaacaaaatagggaaaaagaacaggagcagctgctgccagatgactcccgttacgatcttgttctctttccctataacattttctgtctgctgttgtgctttctttgtattttcttccatgtaaattatgccctttgaaaatctgtacttctacgatgatagtatcatttccacagaaccttttcaagagggcaatcttatccacagtcgaaggcaggaaaaaccccgggtggtggaagcatccggggatcctgtctgcacccggatgagtcgcagcatccgggcacagcactctataccaaattgagggattagataaaagctaattaattattatgaaacataatgcctac

SEQ ID NO: 11349 - DNA, 21413 bp, Unknown
  gut microbiota DNA sequence
cttatcaacgttgtagacgaagatcttgccatcaccgatatgaccggtgtacagagccttcttggcagcctcgatcacagttgctactgggatcttgctgactacgacttctaccttcaccttgggaagcagggtcgcatccatttccactccacgatacatctcgccggcgcccttctgtacgccacagcccataacctgtgtcatggtcataccggtaacacccagatcgttcagtgctttcttcagtacttcgaaccgggcaagctttgcaataaccactactttgtagattccggttgcgggaattgctgccggaactgtctctacctttactgctgcttccttcatggttgcggaagctgcgtcataatcacttacaccaaggctggtattttcatttacctccatggtcatagtgttggaaatatccataatgctgaagcctgcatatgcggaaggaagaccatgctcgcaggaatccagacctacaatttcctcttcctcagatacgcgtaagccaacggttgccttgatgatcaggaatgcaatggtaatggttactgcagtccatgctgctacacttacaaaacctaacagctgtaaaccaagctgcttgaatccgccgccatagaacagacctacaatactgtcgttaccgggtgcggaagtagttgcgaacagaccagttgcgatggtaccccagataccgttcaggcaatgtactgcaactgcacctacgggatcatcaacatgtaatttgtaatctagaagccatacaccaaatactaccagaagtcctgctacagcaccgattacgatagcaccgaagcagtcggtcacatcacagggagcggtaattgctaccaaacctgccagagatgcattcagacacatagatacatcgggtttgccatacttgatccaggtaaaaatcatgcagactacggttgcaactgcgggagctacggtcgtggtaaggaatacggaacctaactgctctacggaagtacaagctgcaccgttaaatccataccagccaagccaaagaataaatacaccgagacatccgatcggaaggttatgtccggggaatgcatttatttttacgatcttaccactcttatccttatcgaacttaccgatacggggtcctaacagttttgcaccgatcagagcggaaataccacctaccatgtggatcgcacaggatcctgcgaaatcatggaagccaagctgtgccagccagccgccgccccagatccagtgagcttcgatgggatagatcaatgcggagatcacaccggagtaaatacaataggataagaacttggttctctctgccatagcaccggatacgatggtagctgtggtagcacagaacaccaggttaaatacgaaatttgaataatcaaaattctcataggaggtaaagatatccagtcccggcttaccgatcagacctactacatcttcaccaagtaacaatccaaagccaatcagaataaacactacggtaccgatacagaaatccatcagattcttcatcaggatattaccggcattcttggctctggtaaatccggtctccaccattgcgaatcctgcctgcatccagaacaccagggccgcaccgatcagaaaccagactgcaaataattgaccgtctactgcgcttaagatttcttctgtcataacattttcctcctcactcttcgtgaaatatcttccaccatacttcaccggtgtaaaaaaatatgcgatactatggtctcatccttcgaagccccattgcatcgcatccttagggtatagcagttaaactgttttccacatacccttacgctatttttgtccggccacgcgcgttgtgatactgccaaacaaaaagggcgctacagttttattctgtagcgcctttgctatgttgagagtatagcaccgtagttttagagtgtcaacacgttttttacattttctttatatttttacagttccagcagaagccgttcatataagcttcctccccatgtaacctgatcctgcctgtggaaccccaggtttccagccaatcgcagtgacacctcattttccggcatcaccagcatctgcacctgctcaaatcccagttcttctctcccatattccagtaatgccttacacacttctgtagcatatccctgtctctgccacgggacaccgatgacgaagcccagttccggatcctcatacccctcccggttggaaaatcccgctctgccgatgacctgtcccgtaattttatcacagattgtccagacaccgtaattataaaaataatacatattttctgtatagtctttcaaataagcttcttcctgtgcccgctgcggatacagtccttccgtatactgcgtcacggaaggttccgcatatatctcataaagagcatccaagtcctcttcccgggtctcccgcacaaggcagcggtctgtcgtcagaatatcccagggaatccccatatatctgcggtacaccttctccatataatcccagtccagttcctcaaggttttcacaggcatagcggacaccggaaaagtcctgatcccggttatgctcgtggagccatgccagcaccgggcagccctgccggaacagttcctgtgcccgtggtccctgatcagtgatccagagcacgccgtctgcctctgtttccgaactccgttcaggggtctccgaacataccatattctccgggtttttcggaattttcttcggattaacttttgtatctaatatgatctgccgcaaaaaatacatccgcaacaattctcctctttacctttttaatggaatcaactaaaatatagatattattttaatccatttttttagaaaaagaaaggacactattatggcaaaaaatcctattgttactattaccatgaagaacggcggtgtgatcaaatgcgagctttatcctgaaattgcacccgaatccgttaacaattttatcagcctgatcaacaagcatttctatgacggtctgatcttccaccgtgtcatccgcggtttcatgatccagggcggatgtcctgacggcaccggatgtggtggtcccggctacagcatcaagggtgagttcgctgctaacggcgtaactaacgatctgaagcacaccgagggtgttctgtctatggcaagagctatgcatcccgattccgcaggcagccagttcttcatcatgcacaagaccagtcctcatctggatggctcttatgccgctttcggtaaggtgatcgagggtatggatgtggtaaataagattgctgagacccgcaccgattacagcgatcgtcccctggaggatcaggtaatggaaagtgttaccgtagataccttcggtgagacctatcccgaacccaacaaactggatagataaaatagttgttcatagtttgtttacaaatccttcaaggaatcttcaattcctcaacatgttttggacatttctgtttcatatactataaccatagaaacaaacaaaacaaccatttaagcccacaacagtttcttgtttaaaaaactttttcataataaatgccaaggatcagaatccttggcatcctccctttctaggggtaaaattacagctatcgcggtagaacactacgccggatagttatttttttgcaaaaaaatctcccgcatcactgcgagagatttttattatctcaaaattattcagccttaccaacagatccgaacagttccatcttctccttaacagtagccttgatagcttctgcaccgggagctaagagcttacgaggatcgaagcccttgccttcgagatccttaccagcctcgatgtacttacgggtagcatcagcaaatgccagctggcactcggtgttaacgttgatcttggatacgcccaggtcgatcgctttcttgatctgatctgcggggataccggtaccaccgtgcagaaccagaggaagctcaccggtcagctcctgtacagctgccagagtttcaaagcttaagcccttccagttagcggggtatttaccgtggatgttaccgatacctgctgccaggaaatcaactcccagatcagcgatagacttacactccttaggatcagcgcactcgcccataccgataacgccgtcttcctcaccaccgatggaaccaacttctgcctcaatggaaagtcccttgctgtgagcagccttaaccagctcagtggtcttttctacgttctcagcgataggataatgagaaccatcaaacatgatggaagagaagcctgcttcaatacacttatagcagccttcgaaagagccatggtccagatgcagagcaacgggaacatcaatgtccagatcctttaacagtccgtttaccataccaacgactacatcataaccgcccatgtatttgccggcgccttcggatacacccaggataacaggggaacgaagttccttagcggtgagcaggatggactttgtccactccagattgttgatgttgaactgacctactgcatagtggcctgcttttgcttttttgagcatttctgttgcggatactaacattttaatacctccattttatatactcattcttgttaggatatacgaaatgtaatccattcctaaattcacacaggaaacacatttcgaataatcactttgtgactacccaaactataacacaactctaacaaaaagggaacagcttattgttaaatttttaccaaattttatgatttattctattccacacgaatatccatgcccttacagatattctcgatcactactttcgtatgggttccgccgtattctccgtccaacgtccagggcagtggatctgtggaagtgatctccagcttcgacgtccggaaacagtacatggcatcagtatcaatgtcacgattcaacagcgaaaccataatattgttcagctccatgggattcttcgggcgcttgatcagtgtcacttcaaatacaccgtcatccagcttgacatttttgccggtgatccttttaaatccgcctaccgacacagagttggtgatcattccaaagataaaatcatctacgatcgtcgtatcatcataagtaacgcgcatgggataagaacggattgccggaagacgtttcatgccttccagcagatacgccatatgacccagaacatttttcatgtcctgccccgtctcataggagacatccgtgaaaaggccgaatgctgcgatatatacaaatatatcctgattaaaggatcccacatcacaggcaaaatcattcccctttacaatcgtttccgcggcatgcaccatatttttcggcaatcccagactgcctccgaaatcattggtacttcctgccgggatatatccaataggtgtccggaagccactgcggatcatacctgtgactacttcgtccaaagtaccgtctccaccgctgcagacaacaatatcatagtccttgctccgatccctggtcttctccatggcatcttcacttttctgcgtgggataaacggtaatctcataatcacccttggtaaacacatccagaatatccgcaagcttgttgcggatctgtgcctttccggctttcggattatagataaataacatcttcttcataaatactatcctcaaaatatgcaaaacgggactaacagaattctctatcagccccgctcctcgtcatactatgtttttaagctacctgaccgcttaaaaacttctcaatattgtccacagcggtctgctcatctgcaccctctgcagctactgtaagctcttcgcctgcgcaaagtcccaggctcatcatgcccataatgctcttggcattgatccgcttatcatctacttcaatgtaaatgttgctttcgtacttgctggcttcctgtactaacagtgccaccggtcttgcgtccagaccatcttccagtctgaccttaatgctcctttttgtcataattttcctcctcttttacgtcctgattctatctgctaactcgctgagcttacgtaacctgtggtttacaccggattttcctaccgggggatccagatattcccccagctccttcagtggagcatccggattctccagtctgacttccgccatctgacgcaatgtctccggcagattctccagtccgtagtggtcccggatatattcaatatcctctatctgtctggtcgccgcatttaccgttttggtaatgttggcggtctcacagttcactcttcgatttacggaattgcgcatttcctttacaattctcatattctccagcttcattaaggcaacaggtgcctcacatacattcagaaggtccacaatgccggatccttccttcagatagacaacgtaatacttcttccgaagcacgatcttggcttctatatcaaatccctgtatcacactctgtagttgtctcgctttatcctcatcggtgcatacaaattccaggtgataactcttctgtgggtcgctcatagaaccaatgcagagaaaagctcctcttaaaaatgctctttgacagcaggaatttttaatcagcagggggctcacaggttccgacagatcaccgatcttgtcgatcacactccgcatctgttcctcgctgattttaacatcagtatctatattatatgtttttttcaataatgtaaagccttttctgacgaccgcctcattttccgtctggaaaccgatcataaaatcgccttctgcagaacgtccatattgaccgctaaaatgcatgatcgcagccagctctgcaatctggcaatgccttgccgggctgattctcttcgccagttcttcctttacctcactcgaaaatgacatgtcagattccttctctgggtacatcacggtgatacagtttgataccgtaatgaccttctgccttcaaacgttcatataacttgtttgccagagtaacactccgatgtttgcctccggtacatccgatggcgatcaccagccgatattttccctctttgatataattcggaatcaggaattgaatcatatcggtcagcttgtccaggaaaattccggtctcaggaaaactcattacatagtcctgtactcccttatcattgccggtctgcggcttcaattcttctatataataagggttgggcaaaaatctcacatcaaataccagatcagcatccgcaggaattccgtgcttgaatccgaaggacatgactgttaccatgagactgttgtactcttcattctgtacgaaaattcgatccagctcctctttcagttctcttaccagaagattcgaagtatctattacataatcggaatttttgcggatcgtctccagaatcttacgttctttgtgaatgccgtcctctactctgccatccgcagcaagaggatgtacacgtctggtttccttataccgttttatcagagctgagtcatcggagtccataaacaatatctcaaatttgtagcctttttcctttaattgttccaaaatgcgggtggcgtccgtgaaattctggtccgcacggacatccagtcccagtgcgaccttactgatctcacttccgggcatggcaatcagttccacgaacttttccaccaatgacaccggcagattatccacgcaataaaagccggcatcctccaaaagctttaatgcagttctttttccccctccgctcatgcctgttactactacaaatctcatatgcacctctcacctgtcttacaggaatttgatctcgggttccaggtctacctgaaaacgctcttttactcttctctgaacttcccagatcacgtcttttacatcttctgcggttgcatttcctgtgttaataataaatccgcaatgcttctccgacactttggctccccctacggaatatccgcgaagtccggactccataatcagttgtccagcaaaatgtcccgtggggcgcttaaatgtgctgcctgcgctgggatactccaacggttgtttttcccggcgccttttcgccagatcagccattttctctgcgatctgttccggatctccctgttccaggcggaaagtcaccttcgtcaccacaaaaggctggtcctggatcacactggtccgatagccgaattccatagtaccattatccagttccatgatctccccattgcggttcaccacggttaccgtgctcaccacctggctcatctctcctccgtaggcaccggcgttcatcaccacaccgccaccgacggttccgggaattcccgctgcgaactccaatccggtgagaccatgctcctttgcagttttggccacctggctcatcagcgctcctgcctctgcctccagataacaatccttcaccgtgatctcactcatatattttccgattaccagtacaattccgcgatatccgtcatcgctgaccagcagattacttccgttaccgatgaccgtgtatggcacatccaccaggcgcagatacttctgcatcctgcagagctgatcttcattttccagatagatcaggcaatccgccggtccgccgatgcggaaggtagtatgcaatttcatgggttcctgaaacagaatcctctctgacggtacgatttcctttaatgcttctatcactgctgcacttatcatgtatatcaggccgctctttcttttttattatagttattccaaacaggcctactttaataccagtgctgcagcgccgtagattccggcatcatttcccagtttggccagggcgaattttgcctgcttgcagggtccgaaagcacatctcttataagaaggctctatgtatttgaataaaatatctccggccttggacacaccaccgccaatgacaaagatctggggatcaactacactggctactgcggcaagtcccttgccaagatattctccgaactgttctgcgatctcaattgctaccttgtctcctgccttaacggcatcgaataccgtcttggcagagatctcaccgccacgcagaatgctgggtgcatcgtcttttgccagacgtctgttcgccaggcgggtaatcccggtagcggatgcatactgctccagacagcccttgttcttgcagccgcagacctctgtctcattatcttccatgtgaatatgtccgatctcgccgcctgcaccgttggtgccggtcaggatcctgccatcaataatgatacctccgccgacaccggttcctaaggtaacggctaccaggttggaatagcctttaccgccgccctgccacatttcgcccagggctgccacattggcatcgttgcccgccttcacggtaacgggcagatccagttcctttttcaacgtttcagcaagatcaaaagattcccagccgatatttacagcaccgttgaccatgaagccatcggcatttaccgcaccgggagcgccgattcccacgcctaccaggtctgctgcggtgatgttcttttcctgcattttgtttttgatggatgctgcgatatccggcagaaccttctctccgccgttatccttgactgtagggatctcccacttgtccagcacctgtccttcgtcattgaacagtcctaatttcactgtggttcctcccacatctactccaaatgcatacttactcatcatcttcgtcctcctcacgtctttttgctaaagagttctgtacacgagtgtacaattcctttgctgcattgtatcccatttttttctgacgatgattgatagctgcagtctcgcagatcaccgccagattccgtccgggacggatcgggatgttgtgacatactaccttattccccagatattcggtatagttttcttccagtcccagtctgtcgtactctttgtccttatcccagtcttccaggcggatgaccagatcaatggtctgtgtatcttttacagacaatgcaccgaacagcgccttgacatccacgattccgattccgcgcagttctatgaaatgcttcgtgatatcaggggcagaacctaccagcgtatcatcactgactttacgcagttctaccacatcatcggttaccagacgatgtcctcttctgatcagctccagggccgcctcggacttaccgatgccgctctcgccggtgatcaggacgccctcgccgtagacatccaccaatacgccgtgtacggaaatgcagggagccagcttcacatttaaccagcggatgatctctgacataaaatccgaagtggattttttggtagataatacagggacttcatgttggatcgctgtctccaggaaaataggatccggcttcagatcacggctgaatacgatacagggaatatcataagccatcagcttctcatacgcctccctgcgggtctcatctgtcagtccctccatataagtatattccacaaatccgataatctgcagtctggtggcatcaaaatgttcaaaatatccggctaactgcagtgccggacggttgatatccggctgtgtgatcttcacatgtttcacatcgatctccggtgtgagattttccagtttcattttttcgataacacgggtcaaacttacacttgccatactaatttccatacctttctgcgaaaaacccacccctgcattttttctcgaaggttccccgcctcattatcgtgctgtaacttttgaagttaccatattacttatgattgtaccacaggcggtcgcttctgtgaagcgaaaaaggctacaatctcctgcgctgtgcgctcattcatttcgggaatttccatcaggtcttccgccgttgcctgccggatctcctctaaggacttgaagtgccgcatcagggcttttcgtctggcgggccccactcccgggatatcatccagtacggatctcacctgggtcttactgcgcagagacctgtggtattcaatggcaaaacgatgcgcctcgtcctggattctggtaatcagcttgaacccttccgaatgagtatcaatcggaagctcgatattatgataatacagacctctggtacggtggttgtcatccttgaccataccgcagaccggaatgtcgattcccagttcttccagtacggacagggcaatattcacctgtccgcggccgccgtccatgaggatcagatccgggaacttggtaaaactgccgtactcctgatccatctcctgttcttccagttctctgctctcttccataccatgacggaaccgtctcgtcagcacttcccgcatgcaggcatagtcatccggacctgagacgcttttgatcttgaatttacggtaatcgctgcgtttcggttttcctttttcgtagaccaccatggatcctacattttcaaaaccgttgatattggaaatatcataggcctccatccgggcagtgccggttaacggcagttgcaacagatccgagatttccttcactgcaccgatggtacggccttcctcacgttttaacttttctctgtcctgggacaataccagttttgcgttctgcgctgccaactccaccaatttttccttactgccgatcttaggcaccttcagatagaccctgctgccttttcgctccgacagccatttctcgatcaattccgcatcctcgatctcatattgcagcatcagctctctggggataaatggggtccccgcatagaactgctttacaaaatcctgtaaaattgccggcttgttattttccggcacatgtgtcatataataatgttctctgccgatcagcttgccatcccggacaaaaaatacctgtaccactgcttccgtctcatcctgatacagcgccaggatatctttatcttcaccgacaccctcggtaatcttctgtttctgggatacctgtcgtacactggagagcagatcacggtatctggcagcatcctcaaattccatagcctccgcggctttcttcatcttctcctccagatccttcaggattggactgtaattaccattcagaaattccagtgcacctgccacctgctgtctgtattcctctttgctcacatatccctggcagggtgccagacactgcttgatatgatagttcaggcaggggcgctcgattcctatatccctgggcagcacccggttgcaggtacgcagctggtacagtttgttcagcagttcaatggtatctttcaccgccgcagcgctggtatagggaccgaaatagcgggatttatcttttttcatggtacgggaaaacaggatcctgggataatcctctcccactgtcaccttgatatagggataggtcttgtcatcctttaacagcgtgttatacttcggcgaattctccttgatcaggttattctccagcactaatgcttccagttccgaatccgtcacaatatattcaaatcgggcgatcagcgacaccatctggtcaatggccgggcctctgccgatattttcacgaaaataagaccttacacgattgtgcaggttgattgcttttcccacatacaaaatgacatctttgtcatctcgcatgatatacactcccggcttgcgggggagcttttttaactcttcttccacgttgaacataaatatttcctcacttgtatctatcataccgattctggagaaaaatacactttcgcatacatgggcacgggcacacgatatctctctcccatacggacgacttcgtagatcaggccatcgatctcggaatctttggcaactgctcctgcattttcgcaccggttcctccggctccgataattgcgtatttcacaccaaaacccttcccttccgttatctacctttacttttccacaatgataccacgacgcaaaagaagccgccagtctctgttttcacataactgacagcttctccttgatatcatttattccttacaggaactctttcacagacttgtaaacgcccttggcatccagaccgtacttctctaccagagcagcagcggaaccggactcgccgaagacatcctgcataccgacctttttcactggtacaggataatgtgcacacaggcagtcgcagactgcgcttcccagtccgccgatgacggaatgctcttccacggtgactaccttgccggtcttcttcgcgctgttaaggatgatctcctcatcgaggggcttaatggtacagatatttacaacctctgcgctgatgccttcctcctccagcatcttcgctgcacccagagcggaatctacgcagataccggtggctacgatagtgacatctttaccttcgcggactactgttcccttaccgatctcgaaatgataaccgggatgatcgttgatcacgggtactgcggcacgtccgaaacggatgtatacaggtccttcatattccagagcggcacgaacagcggctcttgcttccacatcatcggaagggcacattactaccatgccggggatggtgcgcatcagggcgatatcctcgttacactgatgggtagcgccatcctcacctactgtgatacctgcatgagttgcaccgatcttcacattcagatgcgggtaaccgatagagttacgtacctgctcgaatgcacgtcctgctgcaaacattgcaaatgagcttacgaaaggaatcttacctaccagggacagtcctgctgccacacccatcatgttttcctctgcgataccacaatcgatatgacggtcgggatatgccttacggaagattccggtcttggtagctgctgccaggtcggcatccaatactaccagattggggaattcttctgccagctccttcagggagttgccgtaactttctctggttgcgatctttttcacggtattttctgccattactgctcacctgctttctctaattctttttcaatcttatcaaggtctgccattgcaatcgcatactcctcatcattaggtgccttaccatgccagtctacgctgttttccatgaaggagactcccttgcccttgatgctgtggaatacgatacaggtgggcatgcccttggtctctcttgcttccttaaatgctgcacggatcgcatcaaaatcatgtgcatctgcattgatcacatggaaattgaatgcctcgaactttttatcaataggataaggagaacatacctgatcgatgggtccatcgatctgcagattgttgttatctaccataacgcagaggttgtccagcttacggaagcccgcgaacatagcagcctcccatacctgtccttcctcgatctcaccgtcacccagcagtgtgtatacacggaaatcacgtttgtccatcttagcacccagtgccatgccgactgctgcagaaataccctgtcccaaggatccggaggacatatccacgccggggatatggatgcagggatggccctgcaggtaggaacctaagtgacgcagggtaggcagatcctctaccgggaaatatcctctgtaagccagtgcggaatagagaccgggagctgtatgacccttggacagaacgaatctgtcgcgttcctccatatcggggttcttcggatcaatgttcatctcctcaaaatataaaaatgtaaaaatatctgcggctgacaaggatccgccgggatgtcctgctttcgcactatgaactgcggtcacaatgcccttgcggacatcattggcacgcttttgcagttctaaattcttcattgtttcctccattccgccatattggcttatctgttgcaatttacgttgttatactagcatacttcccgatgctagtctagtaaaagaattgctcttctaccgtaaaatattgcgatggcaaattctatttctgaactgtttgaccatagtacgctccggcaccatgtttgcggttatagtgcttatcctgcagttcctggggtgccggctggatcctggggttgatcgtctctgcgcgataagccatttttgccacctcttccagtactaccgcattatggacagcctccttggcatccttgccccaggcaaaaggcccatgattcttgcacagaacgacaggcactgctttcgggtccttacccagacgtttgaactcgttaacgatcaggtgtccggtattttcctcgtaagcgtcctcgatttcttcctttgtcaggcagcgcacgcagggaaccggaccgtagatatagtctgcatgggtggttccgtagcaggggatgtctcttcccgcctgcgcccagctggtggcataggaagaatgggtatgtacgataccgccgatctccgggaatgccttgtacaactccagatgggtcgcagtgtcggaagagggatttaaattcccctctaccttattgccgttcagatccatgactaccatcatctccggtgtcagtttgtcgtaatccacgccgctgggtttgatgacgaacaatccgctctctctgtcaatggcgctgacatttccccaggtaaaagtcaccagaccgtaccggggcagatccatatttgcttcatatactttctgttttaattcttctaacatatcctaaacctcatttctttctatatcctacaagctttccgataaatgagtgtcgtgcagacataattttacgaccgaaaaattattttgcggcaacggctgccttctccgcaggaagcagtctcttgtactcttccaggaaagcctcaaatcctttcacatcctcaggctccggttgcaatgtggttccggtctgtccagcgaagatcttgtcatttaagtaggaagaaagggtctcgccggtttctttctccttcatgaaagctgccaggatcgccatgccccaggcgccgccttcgcttgccgtatccataacagtgatcggtgcgttcatgcctgctgccatgacacgctgtcccaccacgggagtcttgaagaagccgccgtgtcccatcagggaatctacagccacatgctcctcctttaacagaatatccataccaatcttcagtgtggcaactgcgctgtacagatgggagcgcatgaagtttgccagtgtaaaatctgcatctggtgtccgcaccaccataggacggccggcatccagaccagtgatcggttctccggaaaaatagttatatgccgttacgccgccgcaattcgcagcaccttccagcgccttgcgatacaacacgccgtacagttcgttcttgtctactttcacaccaaagctctctgtacactcgccgaagaggttcacccaggcattcagatcggaggtgcagttgttgcaatgtaccatggccacgggcataccattgggtgttgtgaccatatcgatctcttcgtgtactttttgcatagccttttccaggactaccattgcgaaaatagaggttccggcggagacattaccggtgcggacagccacactgttggtagctaccattccggttcccgcatcaccttcgggaggacacataggaacaccgggctgcaaagttccggtaggatccaataatcttgccccttctgcggtcaggacaccggcggattctcctgccaccaacaccttaggcaggatgtcgcggagcttccagtcaaaatggtgtaaatcatcgaactgatctaacattttctgatcgaaatccatgatcgtggaatctatagggaacatacctgctgcctcaccaatacccagaaccttttctccggacagcttccagtgaatataacccgccagagtggtaaaaaatgcgatatcctttacatgctcttctccgcttaagattgcctgatacagatgggcgatgctccatctctgagggatattgaagttaaataccggaatcagcttcttgcaggcttcttccgtcatcgtatttctccaggtacggaaaggtaccaaaagttcaccttctgcattaaaaggcatatagccgtgcatcatgccactgaatcccagtgctcccaaagtagtcagcttttcaccgtattttgcctccacatcgtctgccaggctcttgtaacacccctgcaatcctttccggatgtcctccaggctataggtccaaatattgttctccagacgattctcccagtcgtaagttcccatggcaatgggggtgtggcttccatctaccaataccgctttgattctggtggaaccgaattcaatacccagaaccgcctttcccgctttgatcgcttcttttgctgtttcattcattgcattctctccttttgcttttatatcgtttctgctttatttactttcataacgatttgtgttctgctacagactcccgttctaccacccgggtatcaaattcatacgtcagatcctttttcttccccgctatcatctgcaaaagtgtctccgctgcctttttccccagattttccttcggatgaggaagtgaagtaatgggaacctcactgtgtcgcgccagatccgaatcgtcgatactgatcaccgacacatcctccggcacccggatattgcgctcttccaacatccggatcagctggaatgcgatctggtcattgtacgccaggagagcagtgcattcctccacccggttgagaagccggtcccggcaatacgccagttgcttcgcttcgtccgtgtcgatccacaccagtcgggaatccgtcaccgtaagccctgcttcctccatggcacgcagatatcccaaataacgctgtctgccctgtccgtcgtccagtttcaagactgcccctatcttctgatgtcccttctcaatcagatatctcacagccttatacgctgtgtccgcatcattcaatgatacatgtggtacctccagctccggataataggtattgaaaaataaaagcggtatctttctcatcatcagatgcctgtacagctccagattcggattcggcaatccactttttgttccctccacgatcattcctgctacatcatcccgtttgagcagatctttcagaatgcctttctcccgatccagcgtgttattcgtaatataaatctgtacggaaaagccactttcatataatgtattctgcatgccctgcaggatcctcgggaaaatatagctgtccacataagtagttactaccgcaatactgttccgtttctcgagatttttcctgcggtcaaagctaacataagtgccgctgccacggatcctctgtaccagtccttcctcctccagcgttccgattgccttcctcactgtctgtctgctgatgtggaatcgccccgcaagctgattctccgaaggaaccttctctccgggacccagttgtccgtctgtaatctgctcctgtatgtaattaattaggttttgatattttgtctccatgattattataagtataataaggctactgttcaaagtcaatacatcttctggctattttagatacatttgtatatagttgtatggtgtacaactatgcttgtatttcgatttactccacatatgaagtcagagacgtgactgtgaccctgaggtaagtcgctttaagtctatccccggtgctgttcacatatacttttaccaacactctctgtcatcaggtaactatcgtgcgaaaacgtccttccctttccttccaccaactgcttctgtgtatctgcctcctctgcactctcaccggcgccatggctcttttgtcccattgtacttccgcagacaggcgctttgaacaattcacctcccgggttttccgggaggaaatgactgccagcaccctgaacatgcactacaccattgcggatcctgccgcctttgggattacggattacgagcctgtccttcccctctatacctccgggcagtcggacgcgagtggggaacgttgttctgcgctccttaggcaactaagttgtattgcttacgacaagctctcaccggagaatgctttcacctatacactcctacagcggtctctggaaaatgacctggcgttggcgcagttcccctattacaacgaaccgctgtccccatcttcgggaatgcagtcacagctccccatcctgctggcagaatacaccttccgttccaggcgggatgtgacagactacctggcactcttagaccaggtggacgattattttgcctccctgctcctctatgagcaggaaaaagctgccgcaggcttcctcatgccggatgtttccctggaaaaagtccgaaagcaatgtgacaccatcgtcactatacaagaactagcgcagggaacccactttttgcagaccacctttgaagaccggctggtggaattgcaggcacagggcatattatctgccgaagttgtctcttcctttcttaaggaaaatgaccggctgctcaccacggtagtacagcctgcctacgccacactatccgaaggactgtactctctggagacttccggctctgccggtcagacatcttctatctctcaggcgtctcccggtgggatcatagatacatccggcgccctgccgaaaggtctcgccctgttgccggatgggaagacttactatcaccacctgcttttcgccgagaccggttcctcccgttcggaaaaagaactggtgcaaatgcttctggcgcaatttcaggaagaacagtctgccatccgcagcctgacacaacagtccccttctctgctttccatgctttccgaagggatcacggaagattttcccatcacggaaccggaagaaatgctttccgatctacaatcacgcatgataaatgactttcctgtcagtaatcccactccctcctttactgtcaaggatgtcgttcccagtctagagccttacagtgcaccggctttttacctgacgactccccttggcgattctgacaataatgtcatctatataaaccgacgcaattctcccatggggctggagttctatacgaccctggcacacgaaggttttcccggtcatctctatcagaccgtgtatagtaaccgtgcctttttaggtaaagacatggatcctgtgagaaagctgatctggtacggcggatatttggaaggttgggcgctgtatgtggaatttatttcctatgattatgcggcagatctgctcgaacagtccggacagtcggatgccgcacaggccgctctcctggaaaaacatacccggagccttcagctgtgcatgtatactctgttggatcttctgatccacggggaaggtgccggatacgatcagactgccacattccttggaaaatttggcattgattccccggaagcctgcaaggcgatctatacttatattgcggaggagccctgcaattatccgaagtattatgtgggctatctggagattttgaaattacgggaaactgcccggtcccattggggtgacaggtattgtgaccttcgctttcacacattttatctggaaaatggttgctgtgatttttccttgctggaggagctactgtaaaatagagcagccttgtaaaacaacacaagaccataacttgacaaagcccccctccttttctatacttgcaaaaggagagaggcttttcgtttcctatattccgcttccgataacagaaaggcatacaattcccatggaacaactattattcagtttgaatgcaacgatccccgtattcctggtcatggtgatcggttatgttttacagcagctgcatgttaccaacgactcttttgtcaaaaccctgaattcattcaattataagatcactctgcccgtacttttgttcaaggacatgtccactgcagatttttacagtgtatgggataccggttacgtgctgttctgcttcttcgtgaccctgttctgcatcatcatcacctgggttgtgacaggcattttttataagaacaaatcccgcctgggagagcttgtccaggcaagctaccgcagcagtgccgctgtcctgggtatcgcctttatacagaacatctacggaaactccggcatggctcccctgatgatcgtgggtacggttcccctgtacaatatcgctgccgtgctgatcctgtccttcaccggaccggatgcgaagggcttcgataaagaatccctgctgaaatccttaaaagggatcatcacgaatccgatcattatcagtatcgccctgggcatgctgtccagcgcctgccggatccattatcccgtgatcatttccaagaccatcagcaatgttgccgtactggctacccctctggccctgatcggcctcggtgctggattcgagggaaaaaaagccttaaagcttttagcccccaccggagtagcaaccgttttaaagctggtagtatggcccgcactgttcctgccgcttgccgtccattttggctttaccggagaaaaactggtggcaatcctcattatgttaggctcccccaccaccgtaagctgttatattatggcgaaaaacatgaaccacgaaggaactttgacttccagcgt

SEQ ID NO: 11350 - DNA, 4404 bp, Unknown
  gut microbiota DNA sequence
gataagcttttaatggtaacgccggtttgctcacacgatttactttatggatcagtccgcaatccaaaagccactggattgccagttcaaaatcttttgccctggcgccctctctcacctgtccgtagatatattttttattttcttttgccagctgcatcggaatggaatcccacaccaggttcaatcggggaaccagagaattctccgcatgcttggaaaaatcctggcggtaataattcagcagatctttctgaatttctctgacccgcccgaaatctttatcattcacataggactggaccacttccggcataccaccgacataatagtactctctcagacgatccttgtatttggaagcgaaggtattgatcatttgcgtatccccggactgcagaagctctgcaaatcgttcttctcccaaggcgcacaaaaattcctggaaattgagcggatacagatccatgaagtctaccttgcctaccgggaaagaggtgcccttgtgcatcgccacacccagcagggaaccggcagctacaatggcatattccggagcattttcgcaaaaatactttaaagaggatagtgccttcggtacttcctggatttcatcaaaaataagtaaggtatcttcacttttgaccgaaacacctgtctccacgctgattgccagaagaatcctttctacattgatctctccatcaaacacctgttgcatacggggattactgtcaaaattgacatacgctgttttctcaaaacagcttgctccgaattccttcataagccaggtctttcctacctgcctggctccgcgaatgatcaacggcttccggttctttttttctttccattcttttaatcgttccaatgcaaaccgtcgcatgtctgcctcccttgtactattcacaatagttatctacttctactctatcccagtaaaattgccttgtcaacagaaataagtccttaaattcgtatatataatacacttttaaggacttatttctgtaatttattacatttttcaggacgtaatttccgctctgcgctacacttttcaggacgttacttcaaaaaacgccgcaacaacttctcttttttctcatcatacctctgatagcgtattggcagatccatccatgtctttttgtccacgatactccgataatggctgaaggtctcgaacccggtgcggccgtgatacccacccatgccgctctcacccacgccgccgaagggcatggcgctggtggcgagatgaatgatggtgtcgttgatgcagccgccgccaaaatggcagtgatccaggatccgtctctgggcttttttatcttcactgaagaaatacaatgccaacggatgaggatgttcctctacgcagcggatcgcccaatccacaaaatctcccgcggcagcttgggttccagaaacttccccgctaaaatcattttgtgcaacacctttctctgcatcatgtgcattatacgtcagcaccggcaggatcggtccgaagatctcttctcccatcacggcatccgaccagtccacatccatcatcaccgtaggcgcaatgcgcaacgtcttctcgtcatactgtccgccgcagacgatttttttcgcatccagcaatcccaacagtctgtgaaaatgcttttcgtttatgattttcccgtaatccggattctgcaggggatctgctccaaactgcctcgcgatctcctcccggatagcttccaccaatcggtcgcggatcctgacatcacacaacacataatccggtgccacacaggtctgcccgcagtttagatattttccgaatacgatcctcctcgccgccagcggaagcttcgctgtagcatccacaatacagggacttttcccgcccagctccagcgtcaccggggtcaaatattccgcagcgcttctaagtacctcccgtcccacggtcttgcctccggtgaaaaaaatcatatcaaaccgctgctgtaacaatgcctgattctctgctctgccgccggtgatcaccgccacatattccgcctggaagcattcttccaaaatcatttttaacactgctgccgtcgccggagcataggcactgggttttaccactgcggtattccctgcagcaatagcatcgatcaacggatccagcgtcaatagcaccggataattccatggactcatgatcagcacggtgccatagggtgacggagaccggaagctcctcgccgcgaactgcgataacggtgtcggcactctcttttcccgcatcagcccccgcaggtgcttctgcatccaggtcagctccgagagcgtcagtccgatctcgcacatgtagctttccatccggcttttcccaagatcctgttgcagtgcatcgttcaattctatttcatggcactgcagggatgcctttaactttcccagctgttttgcccggaattcccaggaaagtgtggctcccgtagcaaaatattctctttgtctgcgtaatattgtccggatctcctgctctgtcatagatgcctcctgatttctctgctcttctattctttatactacccattttttcatttcaatgcaacgaaaaacggcggagcttttcactccgccgcccgcctatttctatttactttatttccacgcaaaatttaccattccgtacacatagatgaacagcactgccgccggcacaaaatatttaaacaccggtttcatccacggctgcacttttaagcctttgccggcatttgcttcctccaggaatttgtcccagccccagccgaccttataacaacaaaatactgccagcaggatcgaacctatgggcatgatgttattcgacaccaggaaatcccagaaatcgagccaggtcgtccccgctgcaaacggctgaaaatgaaatacactgaagcccagtgctgtcgtcagagccaacaggaaacatccggcaccacacgccacgcaccctgccggtctggaccatccggtcagttcccggaccatggccagaatattttcacatacacccagcactgtggacatggctgcaaataccatgaacaagaaaaataaagttccccaccatctgccgcctgccatgtggttaaatacagtcgccatagtatcgaacagaaggctgggacccgccgtcacttccacatcataagtgaagcatgccggaaatataatgataccggcgatcactgccaccagtgtatccaggataataatatggatagactcacccatgagagaacgatccttgccgatatagcttccgaagatcgccataccgcccattcccacggacaaggtgaaaaatgcctgattcatggcgcccaccaccacagaaccggtaattttggagaaatgtgggatcagatagaagctcaatccctctcctgctcccggaagtgtaaagctgtgcaccgccagcaccagcatcagcacgatcaatgctgacatcatatatttggtaatacgttccagaccgccctgcagatggaagcttaaaatgacaaaagcgatcagcaaggtgactagcagatatgtcacattcaccgagggcgtcgtgatcattttttcaaaaccgaaatcctgattctgccctgtcagaaattttacaaaataatagaggatccatccggacaccaccgcatagaaagcgatcaacgcaatgtttccgatgagacagacgatgccccacagattccatttgcccctgccgccggacagtttccgatacatataaagtggactcgtctgcgccgcgcgccccacggaaaattccatgatcatggtaggcaggcccagcacgatcaggcagatcacgtagatcagcatgaaacttccgccaccgttctgcccacacatccacgggaatttccacacatttccgcagccgatggcacaccccgccgacagcatgataaatcccaaacgactccccagtctttctctgttttccatacctctgatccttcccaaaactacttattttaaacgccggatacagcatatatttttgctgttttcccatatttttcgccatcttttctcattgacagccctattttctcattatataattttcttaaatatttgaaaaacaaattatttgcattgcattgatcgaagaattgaatttacaatatagaaagtgtatctactctatggatgtcaaaaatctggaaacctttgttatggtgaacgaactgaagagctttacgctggcggccggacgtttgggttatacccagtccaccgtatcctttcagatcaaacaattggaaaaggagctgtccatccctctgtttgaacggatcgggcataccgtaaccctgaccaacgagggggagaagctactgcccctggcccagcagatcctgcgtc

SEQ ID NO: 11351 - DNA, 5431 bp, Unknown
  gut microbiota DNA sequence
gtgacgcactgcatgcggcaggaatccgggttgtgttagacggtgtgttcaatcatgtgggcagaggctttgcacagtttcaggatgtgattaaaaaccgtgagaactctccttatgtgaactggttctaccgtattgatttcggcggcaattccaactacaacgacggattgtggtatgagggctgggaaggctgctttgatctggtgaagcttaacctgcagaacccggaggtagtgaactacctgttagacagcgtgaagggctggatcgatgaattcggtattgacggtctgcgcctggatgtggcgtacagcctggatgagaactttgtcagaagactgcgggaagtgaccgatgcctacaagcaggatttcttcttattaggcgagatgcttcacggagattataaccgcctgatgaatgatcagatgttgcattccgcaacgaactacgagtgttataagggactttacagcagcttcaacagcatgaatatgtttgagatcgtgcattctctgctgcgacagttcggaccggagaattggacattatataagggaaagcacctgttgtccttcgtggataaccatgatgtgacccgagtggcaagtattttgaataatgaaaatcacctgccgctgatctatgccatggcattcggtatgccggggatcccctgtgtctactatggaagcgaatggggcttcaaagccagaaaagaagatggtgaccctgcactgcgtccctgctttgacaagccggagtggaacggcctgtgtgactggatcagcagactggcagaggccaagaagcattccgaggcactgaattacggagcctttcgttcggtactgttgaccaataagcagtgtattttcgagagaaagtcggagcacgagagagtactggtggctatcaatgcggacggagaggacttcatggcacattttgatgccggctgcggcacggcagtggatctgatcaccggagagaaacatgactttggcggcggcagtcttctgcctgcgtacagtgcatatttctggctgatggaaaactaacggagaatttatttatgaaggtactgatcttatccaccggaaccggtgagggacataattccgctgcaaaagcggtgaaagaacagtttgaaaaacggggcattccctgtgagttggcggatgtacttaatttcgcttcggacaaggccagcgcttacggacgccggatttacatctggagcacggtccgggcgaaaaaggtgttcgcaggagcgtaccgggtaggcagggtcatttcgtctgccagattaaagtcaccggtgtattttgccaacgctttgtatgcggataagctgtgcagctatatcacagaaaacggatatgatacagtggtaatgccacatctgttcccggctgaggcaatgacctggctgcaacgacagcataagctggaggtacagacttattttattgccacggattatacctgtattccttttaccgaggagacaaaggtggattactattttatcccgcatgaggaactggcaacggagtttatcaaacgcggcatccctgcggagaaactggttcccacgggaattccggtatcggagaggttcctgcagcttccgggaaaaagagaagcgcgagtgcagctggggattccggtagataaatcctgtatccttatgatgacgggcagtatggggtacggccgtgtggaaaacatgacggcaaagctggtggagcagaccggtgaagatacccatctgtatatcctggggggaaccaatgaagaactgaagaagacactccgtgatagatatgccgatacagagcgggtgcatgtgctggattttaccacggaagcgcatctctatatggcagcggcggatattctgttcaccaaaccgggaggactgacttctacggaagcggtggcagcgaaggttgcattggtacacactaagccgatccccggatgtgaggatcgtaatgttgcttttttcacacaacatgggatgtctgtatcaggagatacggaagatgccgtgatacaaaagggactaaagcttctgagggatccggaggcacaggccgaaatgcggaagtgtcaggaaaaatacggaaagccttatgctgcagacgcagtctgtgaatttatctgcggacaaaaggaagcggcggaagcagcacagaagaaagcttaggcacagaggaaaacgacagataggagagacagatgagcatacgggaactgggaatgacagtcttcggattgttatgcggaagtatattgttcggcagggcattaccgaagtggatcaaaggaattgacgtcactgaggtcagcaacgatcataatccggggactgccaatgccatgaaatacgcaggagtgcctgtcgggatcctgtgcctgcttggagatctgttaaaaggagcactgccggtatacgtggcagttggcatggggcttgtgacagacagctggttcccgcttatcatggcggcaccggtactggggcacgcctattccctgttttatcatgggaatggaggcaaagccattgcggtatccttcggcgtattgatcggactggcaccggtacagccggaactgttactgttgctgatcatattgtatttggcggggtctgcccttctgatcagaccgcacaccagaagaactcgtatcacttatatcttttttgccctgggagcagcggttctgctgatgatacagagaataccacggcaggtattttggggagcacttctgatctctgccattgtgatccataaaaacagtattcgtcaggagtttctggaggagacgacggaatctttggaaagtctttagaatttcttacggtttctctatattgacgcatgatattatatgccgtatagtatagccacagagcaatactatacggcatataatattgtaaggaaagccggatagccgcaaatttcagagaggagcgataggatgctttttaatacaggagcagctctgctggatgctatcgtgctggcggtggtcgcccgggaaccggaaggaacctatgggtacaagatcacccaggaggtccggcaggtgatcgagctgtcggaatccaccctgtatcccgtgcttcggagactacagaaggacgaatgtctggaggtctatgaccgggaatgcagcggcaggacgagacgctattacaaggtcaccagcaggggctgggcacagcttcatttatatgaaagcgagtggcgaagctacagcgggaagatcacaggactgtttgagggaagaccggtgaagaggtcagaggcgtaacgatgtacagatgggagaaaaaatagatgagtagaacggagtatatgaggcagctggagagcctgctgcaaaatattcccgacacagagcgggaagaagcgctacaatattataatgaatattttaacgatgcgggaccggagaatgaacagaatgtcattgaggcactggggaatcctgcgaaggtggcggagaatattaaaaaagatattctgtggaacgggtacggagagaacagctaccagagaacaggagccgacagccgggcagtgatcacttatccggcagattctcagacagaaaatggtaacaaccgtcagagtgatacgccgcaagttgcacaggcacaggtggtatctccacaggaaaaagaaggaatgtccaccggtatgatcgtgctgatcgtcattttatgtattttggcatccccggtgatcctgggagcagcttccgccggtatcggcgtggcggcagggctgatcgccacatggttcggactgatcatcggtttcggggcaacggcagcagcactgatactggttctgatcgcactggtggcagtagggatcatcagtatgtttacacatccctttgtgggaatgtgcctgatcggtgccggactgatctgcggaggtgtcggactgctgttcttgatgctgaccgtggccatggcgggaatcgccacaccggcaatctgttgttggatcggaggattattccagaaaagaggtaaagcagaagcatgaaaaaatttatgaagggctgtgccatcacagcgttgctatttatattattgggactgatcctgggagtgagcggaagtctggggaatggctccacgcatgtttcgcccggggagatcctgtcagcggttaccctgggaagaatctccggagaagaggtggatgactggagcaacggtgtgacggagcagataagggaaaatatgggcgatgtgcactatgatctggaggacaatgtggattatgattcagattatgaagttaggtcgggaaagatagagctgtatgttctgggggatgacagccagggcatcacggatttacaggtgcaggccggcggctgtgtcatgaagattcaggtgtcagaggataactgtttccgggtagaagccgacggtatgcgaaagttccagggatatgtggaaggcggtacgatggagatccgcggaacctcaaaagtaagcagcaacagtgaaggtaatctgggcggttccatctgtctgtatgtgccggagggatattattttgaaaatatctctttggatctgggagccggaagactcagtgtagaggaattgcagacgggggcgctggaagccaatgtgggcgccggcaagatgacgtttgagaaactggaggctgaccaggcagagttagactgtggtgccggtcagatgacagtagaagaactgagcagtcgcgtggcagaggtttccgtaggaatgggatctatccgtctgaccggagatgtgaccgaacgattggacggagagtgctccatgggagaactgaaactgacactggctggagcgcagacggatttcaactacgacttaagctgcggcatgggtgaactgaaagtcggtgatgacagctacaacggcctggcacaggagaaacagatcaacaacaacgcttctaaaaatatggagctggaatgtgctatgggcagcgttgtggtggagtttaaataaaatatttcttggtattaccgcctgagtggagttgtgattccctcaggcggtatttttgaaagttctatctatgatttgataaaaataataccgcttggagtataataacagactttcaggcggtaattatggagacggcaattataatttgcaaattatagttattttatgggagaaataaaaaatccttgtcccggaaaagaaaagtcaatggaatctttgctttttagctttcatagagaaaagtagaaatctggctttttcaatcatcaggaagagatactcaatatcccagacaccgtctgttaaatttgaaaatatttgtttttcttgtaatatctttctcttaattcgtagtatataggtgaggcagaa

SEQ ID NO: 11352 - DNA, 11774 bp, Unknown
  gut microbiota DNA sequence
tacggaaatgtctgtaacaaggtcgcaaaaaatattttgaacaatatcctagatgcagaggagtgtgttaacgacgcttatttaggagcatggaatacaataccgcctcaaaatccaaacccgttgcttacctatatctgtcgaattgtccgtaacctctccataaaaaagtatcacgcgaatacatctgtcaagcgcaacagcttttacgatgcggctttagacgaactggaggaatgtatatcctcctctgaaagtgtagaggcggagatttccgcaaaggagcttacccggcagattgactattttctggatacgctggatgcagagagtcgaatactctttgttcgtcgatattggtatgcctattctatttcggaacttgcaaaacagtttggtctgaagagtaataccgtgtcagtgcgactttcccgtattagggacaaactgcgggattatttgaagggggagggatttacagtatgaaacgtgaagatatttccgaggcggttggtaacatcagcacaaagtatattcaggaagcagctcccaacatacgggtgaagaaaaagccggtatgggtgaaatggggagtagttgcagcagttttttgtttcttttctatgactgtttttgcaaacagtttgttttcctccctatccggagatgaactttctctgtctgccacatatgagggaaatggtgtaatttctgttcaagtagaaaataggtctgacaaagagcttaattttcaatcgaaacttaaactaatgcgctggtctaccagcgaggaagttaaaccgctttcgggaaaggtgtctttcagcaacaccgagatacctgctaactcaagcggtacgatggtaattgatctttcagatgcctatgatatatcactgttggagacaccgatttcggatgatgattggtactacttggtgttgacaaataacaacttcttatttggacaggattggatgtgtacggttgaatttgcagaatctgtcccaaccgaaaaagttgacgtggcgccgattactccggttgacgctgatccggaactgatatcagaaattatggaagaattcagaccatactttgaaagatacactttggatattaatgaaagaaatcggcttgctggcgaatatctggaacattgccagagggtgttggaacaaatggatataaacatcgtgccctccgtgtcaccaaatgagttaactttgattgacagcgccgaaagtgtcctttttgaccctgctgtgcctgcggatatgcaattgcagctaactggtctgcatcgccgatcaacggacgggtatgacaaaatcattggtgcctccgcggaagaatgtgcgatggttttaagcgcctacatcccgcagcacaaaggtgaaatcgacggcggtgtggatattcccttgatttatgttttcatatacgaaaaaaatgaaattcataccacgcaggactatgcctttatccgcggtcaacttttgacctttgaacagatggagcagtacaagatctatgaggacgaacagtatgtctgctatgatgtcagcgatttgttctattccgatcttcgtcagtatgtggaaagcatggttagccaaaggagcgacgtttattttgacgagcaggtttgggaacgagttcagaacatttatacctactatcgggataacatgggaacacttctcggttatagaactgacacggggcgcggaacaacagagaatgtaaccggaaacgacgcatcaagtaaactggaaaataagtcgaacacttgtgatagcttaccggagtttcacctgactattgaaagctgctacgataaccctaacgaacctgttgcagatcagagttataatgttggtgaacccaattggaatgactaaataatccgctctgtcgggcgacggtaaaagaaaaagccgtcgccttttttacaacaacgccgccagatacttttcaaataccacgccctcctgcacgggcgttcccgccttttcacttccggcgatgcacagacctacgaagttcgctgccttctgcacggaggttagcagagtctccccgcggacggcatcggcggcgagaatggaggcgaagatgtctccggtgccggggcgggaggctccggcaatggggctggctacagtggtatagacgccgtcgtcccacaggaaattgaccagagaatccccctggcggatgccggtgatgacgatggatgcactgacagaatctttcagacacagagaagccagcttctcacacaatccggacagctcctgcatcgtccattccccatccttccagggagtgccggtcagcaggcaggcttccgtgatattcggcgtgataatatccgccagaggcagcagttccttcatcttctgaacatgcgtctttgtgatggaggagtaggccctgccgtggtctcccatgaccggatccagcaaaaacaggggcggccggaacatttccacgaactcccgtacaatgtcgatctgctcttcatttcctaagaatccacagtataacccatcgaaagtaagtcccagttcgctccatacttttatataatctcgcatatgagaggtgtagtcatcaaaatggcagagaggaaatcccaaatggttcgataaaacagaagtaggcacagggcatacctgtaccttcattacgctgatcacgggcagggacacggtggtggagcagcgcccgaaaccggcaatatcattgatcatagcaaggcggggaacgaaatccccgcctttttgtgcagtagtattacagttgttagcattacatttcatggaataatcctgctttcttcaatgccgggcgaagtgccagataaaggacggttgccagaacaactgcccagacagcattaaaggcagtaacaccggttgcaatctttgccaatgccttggaaatatcctgaggcacccctaacaaatatgtcttatagaagtaccctaccaaaggatcggctacaatattgaatgccataccgcagacagaagctaaaatagtgacacgagccacattttttttcggatgctcagcactcaggtggaaaatcttgtgagctaccagacctacgatcagaccgatgcacagttttaataggaaagtcttgggagcactggttacataagcagtagtcaggtcagcgatggtcatacccacggcaccggcaagtccaccccagtaaccacccagaagcagagcagccagtacacagaaaacattgccgaagtgcactgcggttttttccagactgccgggaacgggaatgtcaaatttcaaaaaagcaaagccgatgtagcaaagagccgccaataatcctgcctgagccagtttggttacatccacttttttctctgcggaaggaacgcctgcaattgcattatacaatcccttgattgtcagcaaaatagcgaagaatacaagcaccaggctgtaagaataaggacgttctgcggaaagcttctcatcggacagagtggacttctgagcggataactcatccttctgtgtattcagggcatccagatctccgtctgctgtgccgccggtgactgcctcaatggaagcttctacttcttccagctgtgccttgacatcacttaactggctgccataagcaacggactcttgataactgctgttgtgggtaacgactgcaaggatgattcccagaatcaggagaatggctcccgcgatcaatacaccgtatgattttttcttttccataatgatgatctcctctattagtttctatttcataattcccatttcttcggtgggatatgttaggattcagtgtatagaaaaagtggcttgcttaaaagagccagaatatgttttttttaccatgccagttttgaacgttgatcatacaatctgtaggacaatctgtaggacaacaagattttcttgacaaaggattgcttcctgtactatattttttattagaagttttacagatcaaaaggcaatgacgaagaggagtacacatatccccttaccagagagagcggctgcatgtatgcgctggaaggctgcttcaagacaggaatgtggaaggtagcttccaagccggagagccgagaccggatattccgggcgtaagttctcacgagttatccccgttaccggataggactttgtaagaagtcgcgaggcagcgcaagctgtgaacaaaggtggtaccgcgttactgacgccctttgctgacgagagtcggcagagggcttctttagtttcaggagaatttaaggaggaagcaatgagcaaagaattagccaaaacctatgacccaaacggcatagaagacagactgtatcagaagtggcttgacaaaaagtattttcatgcggaggtagatcacagtaagactcccttcactatcgtgatcccgcccccaaatatcacaggacagctccacatggggcatgcactggacaacaccatgcaggatatcctgatccgctataagagaatgcagggctacaacgcactgtggcagcccggcaccgaccatgcaagtatcgctaccgaggtcaagatcatccagaagctgaaggaagaaggcatcgacaaacacgacctgggacgtgaaaagttcttagagagagcctgggagtggaagaaggaatacggtggacgtattatcgaacagctgaaaaagctgggttcttcctgtgactgggacagagagcgtttcaccatggatgagggctgtaacaaggcagtcaccgaagtattcgtgaagatgcacgaaaaaggctatatctacaagggtgcccgtatcgttaactggtgtcccgtatgtaatacctccatctccgatgcagaggtagaatatcaggagcaggcaggacatttctggcacatcaagtatccgctgatgaacgaggacggaaccccaagcaccacagagttcctgacctttgccactacccgtcccgagaccatgttaggtgataccgcagtagccatccatcccgatgatgagcgttacacccatctgcatggcagaaaggtactgcttcctattgtaaaccgtgtgatccctatcgttgaggatgcttatgtagacagagagttcggtaccggtgtcgtgaagatcactccggctcatgaccccaacgactttgaggttggtaagcgtcataatcttcccgtgatcaacatcctgaatgatgatgccaccatcaataaaaacggcggcaagttcgagggcatggaccgctatgaggcgagaaaagccatcgtggaagaactggatcagatgggcctgttagtaaagatcgaggatcatgtacacaacgtaggtacccatgaccgttgtaagaccaccatcgagcctatggtaaaggaccagtggttcgttaagatggatgagctgatcaaacccgcaagagaagcagtaaaaaatggcgagatcaagctgatccccgaacgtatggagaagaactacttcaactggacggataacatccgcgactggtgtatcagccgtcagctgtggtggggacacaggattcccgcttattactgcgatgactgcggtgaagtagtcgtagccaaggagatgccgaaggtatgtcccaagtgcggctgcacccactttacacaggatcccgatacgctggatacctggttctcctccgcactgtggccgtttgagaccctgggatggccggagcagaccgaggatctgaagtatttttatcctaccgatgtcctggtaaccggttatgatatcatcttcttctgggtgatccgtatgatcttctccggatacgagcagatgggagagaaacccttcaagaccgtattgttccacggactggtacgtgacagtcagggacggaagatgtccaaatctctgggcaatggtatcgatcccctggagatcatcagccagtacggtgccgatgcactgcgtctgaccctgatcaccggcaacgcaccgggcaacgatatgcgtttctactatgagagagtagagaacagccgtaacttcgccaacaaggtatggaatgcttcccgtttcattatgatgaacatggagcaggcgctggagaagaccggaaaagatatcaccacccctgcggcagcagatttacaacccgtagataagtggatcctgtccaagttaaatactctggtaaaagatgtgaccgacaacatggatcacttcgaactgggtattgccgtacagaaggtatatgactttatctgggatgaattctgtgactggtacattgagatggtaaaaccccgtctgtacagcaccgacgatgcagtcagccagaatgcggcactgtggactttaaagaccgtcctgatcgatgctctgaagctgttacatccttacatgccgttcatcaccgaggaaatcttctgcaccattcagaacgaagaagagtccatcatgatcagtaagtggccggagtacagcaaggatcgtgcattccccgcagaggaaaaagccatcgaaacgattaaggaagccgttcgcggtatccgtaacatccgtaccgagatgaacgtggcacccagccgtaaggcaagtgtatacgtagtcagcgaaaatgacgagatccgcaagatttttgaggagggtaagctgttcttcgcaagccttgcttatgcgaatgagatcatgatccaggctgacaagaccggcatcgcagacgatgcggtatccgtagtgatccccggtgcaaccctgtacattccgtttgcggagctggtagacatcgcacaagagatcgagcgactgaagaaggaacagaagagactggaaggcgagctggcgcgttctaaaggaatgctgtccaatgagagattcctgtccaaggctcccgaagcgaagatcgcagaggagaaggaaaagctggcaaaatacgagcagatgatggaacaggtgaccaagcgtttagaacagctggcatgaactgcaacgaaacgtacagagtataaagaacgtaaagcataaggaatacgatgagattcggtaatgacatgataacgtttgaagaagcggtggcatatctgaaggatatgccccgctttactgttaaaaaaaatcctgcggacagcagggaccttaaatggtttttaaaaaaactcggaaatccggagaaggatcttcggatcattcatgtggcgggtaccaatggaaaaggctctgtctgtgcctacatgagttcgatcctgcaggcagcaggctatcgcacggccgtatttacttcacctcatctggtggatatgcgggagcgttttgccgtcaatggtaaaatgatatccgaagaagcttttttacaggtttactgtgcagtaggggatgcattgcaggaggcaaattccgttaacccgggagtcttgttgccgggaggagaagctgccccggaatttgtactcaacttttatgaataccttttctgcatggcattactctgttttgcagaagaaaaaccggattattgcatcattgagaccggtctgggcggcagactggatgccacgaattacgtggacaataagctcctgaccgtcatcacgcggatcagtctggatcatgtacagtacctgggagacaccacggctaagatcgctgcggaaaaggcagggatcctgcgcccgggtgttccggtggcgtacctggatggagatgcggatgccagtgcggtaatttgccgcaaagcgtcagaacttggtgccccacagataccggtgtcgaaaaaggactatactttcctcggatttcggaagaaatacattgatttttccctgcgctctgagtattataattatattagtcttactttgcatactattgcacgttaccagatggagaatgcagcgttggcggttcgggccgtggaagtgctgtttcgcagtacggatacggaggagaacggcggcagactctgtgcaggagccgggtgtcccgctatggaagagatccgtcagggaatccttggctgcttctggcaggggcgcatggaagaagtacttccggaggtgtacgtggatggtgcgcataatgatgacggcatccgggcttttctggataccgtggaacaggacggctgcacggagggcaggagactgttatttggtgtggcggcggataaggactgcaggcatatgatacagagggtgatcacgtcgggattattcgaccggatcgcttttacgcatatgcggacggctaggtcactttcgctggaagaactgaaaggtttactggcagcttatccggaagaccggtttactatgtatacggaagcggatgcggcgtttcgggaacagctggcgggcaaagcgcccggcgaacggttgtacattgccggaagcctgtatcttgtcggggaaataaaggagtctttggaccatgatcaattttgaagaagaactgaagaaatttcatcccagcctggaagtggaagatgctgaggaagctatctacaatcaggatctgaccgatgcggcggatcttttggtgaagatgatgaaagaagcagaagaaaaagaagagaaataaggagggaaagcatgttttgttataactgcggctgccatctgtcggagcatgatttctgtacatcctgtggagcagatgtatccctctataaaaagatcatgtgcatgtccaaccgtttttacaacgacggattggagaaagcgggagtacgggatcttacgggtgcgatcaacagcttacggcagagcctgaaattcaacaaaaataatatcgaagccagaaatctgttaggactggtatattttgagaccggagaggtcgtggcggcactgagcgaatgggtcatcagcaaaaatatgcggcccgagaaaaatattgcggacgattatatcaatatgctgcagtccaatgcgacccgcctggatgccattaaccagacgatcaaaaaatataatcaggcactggtctattgcaatcaggacagcaaagacctggccatcatccagctgaaaaaggtgttatccctgaatccaaagttcatccgggcacatcagcttctggcactgctctatatggacagcgaacagtgggaccgtgcagagagagaactgcataagtgcatggatattgaccgcaataacactttgacgctccgttatctgaaggaagtggagacgcagctgaccccggatgagaacagcaaacagaccggacggcgtaaaaaggatgatgcggtgcgctaccagagtgataacgagatcatcatacaaccgttgaatgtaaaggaacagaagagcgcgggaatttcttccctgatcaatattgccatcggactggtcatcggtctggcggtaatgtatttcctggtggttccggcggcagtgtccaatgcgaataatgaggcacagaagaccattaccgatatcggcaaccagttagataccaagacttcccggatccaggagctggagacacagatggaagcactgcagacggagaatgataccctgaaccaggagcttcagggatatgtgggagccgatggaaccttacagactatcgacagcctgctggcagcagctaccacttatctggagacacaggatattacacagaccgcggcgaacctggagacgatttccgcttctgtgaatgtagatgacacctccgaagcgttccagaagctgtacaagacattgcttggactgatcggcccgcagctgtcggcgcagtactatgagacaggttataatgcataccgcagtgaggattatgcaacggctatcgagaatctgtccaaggcggtgatctatgatgagacgaacaaggatgcctggctgagcctggggaattcctaccgcaagagcgatgacgcacagaatgcgatcaccacctatgataagatcatagagctgttcccggagacagagacggccagaagtgcgcagagatatcgatcccagctggcagaaaataccgcacagtagggaatttgcaatataccatcagacaattacacaatacacgaaagagaacttgctacaagaggcaggttctctttttttatagcaaaatgaagaaacgctgtgcaacagcagaatgagaggaaatatggaagattttcaagactttcagatcattgataattgcctgatggtgcgtatgccggaggaagtggatcaccacagagcctcctatatctgtgaaggggcagacaggcttctggtcagggaaaatgtggaaaatgtagtgtttgattttgaagatacccgatttatggattcttcggggatcggaattattatgggacgatatcgcaagatttcctgcttcggaggccatgtctatgcgatccatacggatcggcagatccagcgtattttccggatgtcgggacttcataaaattgttgagattctgccgggataagagaggcggagcaaagatattgtcgaaaatcacagaatatgaaagaaatcatgcaaaaaaatatgaaaaacagtgcaatgataggcgcagaaatgaggagaacatggtggcagagagggaagaagtgcaactgacagaggaaagagaggatgtacagtatcataaacagaggaagcggaatgaaatggagatcgtatttgatgcggtttcctgcaatgaaagctttgccagagtggcagtggcggcattcatcacccatctgaatccgacgctggaggaactggcggatatcaagaccgcggtgtcggaagcggtgaccaatgcaattatccacggttatgaaaatctcgcagggtacagcaggcatggggaaagcattccggcgtacagcatcgtccatccgggaaaagtgcggatgcactgtgtcctggatggagatatgttatccatcgagatcacagatcagggaaagggaatcgaggatattaagaaagccatggaacctttatttaccacgaaaccggaattggaccgctccggcatggggtttgcttttatggaagcttttatggacgacctggaggtagagagtacgcccggtaagggaacgcgggtacatatgcggaaaaaaatgcgttgcggagactggatcggaaaagaggactgaggaatggaagaagtatcagtactcatcggaagatcacagagtggagataaagaagcaagagaagtactgatcgaaaaaaatctcggactggtacaccatatcgtgaaacgattcctggggagaggttatgacccggaggatctgttccagatcggtgtcatcggtctgatgaaagccattgataaatttgacctgaagctggaagtgcggttttccacgtatgccgttccaatagagtaagataaaggaaacgaccggaaaagccttaaaataagggatttctgataaaggcattggataaaaaaacagtgctgtcagatgtacatttcgatatcttatgttgaaataacagtatagataagatattgaaaacaattcggaattgtttctgataggaaccttcttgaatgagatgatgaccattcaaaggaggtttttttatggcaagaattatgacaagaagaaaagccatacccaaggcaatcgaattactgcaatgtctgccacagacggaggaagttgtggaagtgatacaggcactaaaaaaatattcttccacgccattggatagatgggatgcagccagtgtatatgaagcattagatgaatggacagaatctcataatggtataccaccgaaaataaaagagtgtgaca

SEQ ID NO: 11353 - DNA, 1964 bp, Unknown
  gut microbiota DNA sequence
catggttgccggagggaatacagatcagacccttgcgctgtgccttttcataattttccttatatttctctacgaaggctgccacatcacccttaccccttcctgagaagaaaggctcctcgcagcggaacagatcgttataatgagacggtccaaaatgaagtaaaaagtccatatggaagccgccctgcagggacttgtccggttctccccattcggataccagcactgcctcggggaactctgcatccaggaacgctcttacctttctccacagagcaatgtttcccttgctgtcctcatcatttttcaccagagaacctgccatatccacacggaagccgtcacagcccatgccgatccagaaccgcatgacattttccatctctgcaagcgtcgccttaggacccggatcatcgggatcctgctgccagtcctgtgtctttttataaaatccgtaattgagtgccggctggtgcgcgaaaaagttcacgatcactgagccctctctctcggagataccgcacagacttcccatgttttccagctgtccccaggtgctgtcggtccagatataacgatcagtaaattcattacgatctgccttacaggactccttaaaccagggatgtgccacagatgtatgtcccggcaccaggtctaacaggatatgcatattccgtttgtatacttcgttaaacagacgcttcaggtccgcattggtgccgtatctgggagctgcctgatagtagtccgccacatcatagcctgcgtctccgaagggggatgcaaaacagggattcatccagatcgcattacatcccagttccttaatataatccagtttttctatgataccctgaaaatcaccgataccgtcaccattggtatccagaaaagactggggatagatttcataaaagattgcattatcaagccattttgccatagtgtactccttcctgtgtgctttatttttattataaaaacgttttccgtattctttcttttaccatatcacagaatggctacttgtacaactgcgaaaaaccatctataataaagtagcttgatgccccgatatgcgaatagtacaaaacaatccgcaggcatccaactaggataaaataagaacgaggtctatcatgttaacacaaaaagtaagcaccatcgatgaactcctgcagttcgtcagtacgttacgccagaagcacggcgtccgcctctggttccgcggggaagagaacgcggatctgactctgatcccttccatccagcgaagccagaaaagactggactccgaacgctatatagccaatgatttctatatccgggcgagacagatcctggacaatcctcccgacaaacacaattatgccggctgggtctccctgatgcagcactacggtctgcccacgagaatgttagactggacccagtctcccctgattgccgtatttttcgccacggagacttaccgggagactccggacaccgatgcctgcgtctgggtactgacaccgggtctgttgaacgagaaggaaggcttcggcaactgcatctatcccattgatgcggacaccacccaggaaatgctgctgcccgccttcaaacacaaccaccacaatccggaattgaaaaacaagatcctggcttgcagctccacggaaaacaacctccgcatgtactcccagtactccaacttcaccgtacataactctctggaacgtctggaagacatctgcgatgaaaatatgctgtataaaatcattattccctccgggcggaaacaatactttatagaaagcctgcgggtattcggcatctccgaaagcttcgtataccccgacctggatcatatatccagcgatttgcgtgattcctacggaatttaaatccacctggtgcaaatcgctgtaggattttgaaagattcctatggaatttagcgcaaaggcgtgataa

SEQ ID NO: 11354 - DNA, 1672 bp, Unknown
  gut microbiota DNA sequence
aaagtctttttttggatttatctttcaccacataaaaccggtcatagatggaagtgatctcatacttctccggatcgaatagctctctctgtccggagtccacgatatacactacccgctctccggacgcctcattggctgctatggtctctgccgtgacgttttcatagtggtagcgttctttatacgggcggagttccacgccgtcctgtacgttgctgatgccctgatagtaatgtgcatcgatctggtgggtgtacatagtcaggatctcgcctaaggtagcgccggcatcgattccctggggatccggatagatgtaataggcatcgcaatcgatggtatgtgcgtagttcagcgcctgtatgtagggatcgtagtaatacgtccggctgagttctccccagctgccaaaatacatctgtgccatcatcagtgccatcacaccgtaggccgctgcaatgggtacggacaggaggtgtaccttccggatgcagcgtgcgataccgatgcccccgatgatcagtaccggatagaatatgatattgatacggttcactgtcacatttttggtaaggatacctacccacagtcccatgcccagccacgccagcagtgcgacataggggtaacgttcctctttttccattccccggagtctgcggaggatgctgaccagtccgatgacaaagaacagatccgtgatatagtacaccgggccgaatttcaccatggtattggtcacgctcttgtccccggagccccaggtggtggtaaaggtccagacgatattctcccacagctgtttccaggagaagttagcgaacagaatatcatcaccgcggttactggacaggaacgacgggatcgtaaaaagcggtgtctcgattccgggctttcccagcagagtaagcagcatggataaaaattccggcagcacgatcactaggtacagcacaaagcaggctgccagctccttccaatttactgcctgctgccgcaggagataaatagcaaccaccagtaaaaacagcggtaccgaatagtccgcaattccgtaggcataggagcacagtccgaacatcaccatggaaaggtacaatagcggtttcttttttagtccggcgatcagcagtacgaccgcgatcaggaacacatgggggaacaggttacagtcaaaggaccaccggctctgcatataatgccaggggctgatggtccccaggatcagcacgatcatgccggtccatttgccggccagctgtctgccgaagaggtacagtgccagcagtcccaggcagctgatcaccagcatcggcagtctcgtggataccatggagaatcccaggagcttaataaacgggatcatgcagtaggacagtaatacgctcatctggctggtacgccacgccgtaaaatgcaccggataccgcattccgtaacggtccgtaccgtagtccgccagtgctttggcatccacggcagccatggcttcgtcctgatgtacgccgatgggcggcgctccgaaatggtatgcccggatgacgatagccgccaataggagcaatgccaccagcagcagctctatttttttcgattccaatatcttctgtttccatggatatttcaatgaataaatcctcctcattccaaatgtttcacttttccgggc

SEQ ID NO: 11355 - DNA, 2538 bp, Unknown
  gut microbiota DNA sequence
tactgaatcaccggttcgaggcgatgcagatttttctgactctgaatccgggaagtattgtcgatggtgaccttatagtgggtcataaggatgtataaaaaatcataaagcagaccggaaaaccgcagagtatagctttgcggtttttttgtatagagatcgcccatggaagtcagaatctcctgaatctgcgcatcggcagaagaatccctgtggaagaacagaaaacggatgctttcatattctgggatggcacctatcagaaacgcataaggaatctgtaataacagaacccgggacggtgtcgtggtccgggtagcatggacggcggcggaatttaccacatgataatctccggcatgcagcaacagaacccgctgtccctcaatgagttccatggaaccctcatagatatagataacttccatgcttcgatgccagtgttccggtatgtaatcgttattgctgttatagattgtaaaacggacattgattccgctttcaaaagcaacctcttcgtgtggaaattgcggcatcgcaaagcctccttctgaaattatattatttcccgcgatatatttatatcatagaataaaaagaaggaaaaagtcaatattgacctaaaaagaagtcataatcagatataggaatcaatgtggaaaattgctaaactggtaaacagaaagagcaagcggacaaggttgaatgacaggaggttatagcaacatgacaaaggaaaaaatcgaagatctgatagcaaaaatgacattggaggaaaaggcggcaatgtgttccggagcagatttctggcatactgaaagctgcgagcgactggggattcccgcaagtatggtatccgacggccctcacggtctgcgcaagcaggatgacaaggccgatcatctaggtgtaaatgagagtattaaagcagtatgtttcccggcaggatgcggaaccgctgcatcctttaacagagatctgttgtatcatatgggcgaaacactgggcaatgagtgtcaggcagaaggcgtcagtgtcattctggggccggctgtgaacatcaaacgatcacccctgtgcggtcgtaattttgaatactattcagaggatcccctggtggcaagtgagattgcaggctctctgatccgcggtgtgcagagcaagcatgtgggaaccagtttaaagcattttctggcgaataatcaggagacccgtagaatgtccgtgaatgagatcattgacgagagaacactgaacgagatctatctggcggcatttgagggagcggtgaagaaggcaaaaccctggacagttatgtgctcttataacaggatcaacggtacttatgccgcggctcatcacaaatatctcacagagaccctgagagataagtggggatttgacggttatgtcatgagtgactggggagcagtcaatgaccgcgtggaagacttaaaagcaggtctcgatctggagatgccttcctctatgggagtcaatgataagctgatcgtagaagcggtacagaacggaacattggaggaaaaggtactggataccgcagtggaacgtattttgaacatcgtatatcgctatgccgagaaccgagataccgaagcggtgtttaatctggatcacgaccatgaggttgcgaagaaagtggcggaagagaccattgtattgttgaagaatgagaatgtgctgccgctgacagagggcgaagagatcgcctttatcggaaaatatgcgaaaaagcccagatatcagggcggcggcagttcccatatcaacagtcataagatcacaggagccctggatgcggcagaggcagcaggcaatacacatattgtgtatgcccagggatttgatgacaaagaagataagacggatgaggtactactggcagaagccgtagagacagctaaaaaggcaaaggcagccgtgattttcgcaggactgccggatgcatttgaatccgaaggttttgatcgtaaacatatgcggatgccggattgccagaacgaattgatcgaaagagtggcagcggtacagccgaacaccatagtcgtattgcacaacggtgcaccggtagagatgccctgggcagatcgtgtgaaaggtattctggaagcctatcttggaggacaggctgtgggaggtgccgagtatgacatcctcttcggcaaggtgaatcccagtgcgaagcttccggagacattcccgaagcagttggaagataatccttcttatcttgccggcttcggtgagggcgaccacgtggaataccgggaaggcattttcgtgggataccgctattatgataagaagaaaatggatgtattgttccccttcggctacggattgtcctataccacatttgcctacagcaatctgcgtttggacaaaaagacaatgaaagacacagaagaactgacggtgtctgtggatgtgaccaataccggagacagaacgggtaaggaagttgtacagctctatgtggcggataaagatagcactgtgatccgaccggtgaaagag

SEQ ID NO: 11356 - DNA, 6628 bp, Unknown
  gut microbiota DNA sequence
aattcaagtttgtagaattaagaaaatcgggattcaacaggacaaattctttttacaggagcatctttgatggaaatgtttcctgtctgtgaaattgcacgaagtcagggtatcgaacgagtgatatataatcatggcgttttatcctgtaaatcttcacctgccatggctcggcagagataagaacatttccggttttttattggatgccggaagtgcggaagtgttctgcacgatactgcgttggtgttttcccggtcttttcccggaaaacagatgtgaaataactttgactgggaaacgccagggtggtagaaattacagagatcgcataatcggaatggcaaagcatattctgagcggtctctatttttttgctctgaatataggaactgacagagattcccatctcttttgcgaacaggtgacttaaataaccgggagatatgccggcatgagcggcgagcgtcgggacagtgatacgattatgtaaatgatcatagatatattccagacactgggcaaccggacgggagcaggcatgatttctatgcattttttccatacgagtagtgtaatccagacacatctgtgggtgcagggcggaaatttctttttttgatttcatgagatccgccttatgaatatagtagtcgctgagatcataagcctctgtgacttccatgccgccttcgatgcagtatcttgccagcatagcagcggtgatggcaaagtggtatttcagattttgcagaggagaatccgagaggacacccaggcctttcttttcctgaaaagattcacggcataattcttttactttttcggtatttccctgcctgacatagctgtagaattccagctcaggatcataaggggcacgataagtctctaattctctgcggacatattgttgatagagaagttcctgaggaatgttcatatggacacctttctgaaattatgaaaatgcttttcaaaaccgctttgcgattctttctcttgtggagtgaagatagtggcacgctgatgctataaataatatagcataaaaacgacaaaaataatatagaaacgatatatgaaatttgtttcaaattatatgatagagaaaagaagaactgcaggattataacttttccgttgcaaaggatcaggaggacaagagcatgaaattagagagaggtattaatttaggtggttatttatctcagtgtgtgcatagcacagaacattacgatgcatttattcaggaggaagacattcgtaagattgcttccatgggatttgaccatgtacgtctggcaattgattatgaagtactggaagatgaatatggcagaaccagagaagagggctttgcctacgtgaccagagtggtggaatggtgtaaacggcagggattgaatattgtactggatctgcataaagcgtatggctatgattttaataatgccggggatcagaaaaagaatattctgttcacaaataaaatggtgcagaagcgttttgtaaatctgtggatcaagattgcagagcattatgcgaacgagactcatgttgcgtttgaacttctgaatgaagtggtagagcaggaaaatgcggaagcgtggaatctgctcattgcggaaacggtggacgctattcgccgaatagccagagacaccattattatatacggcggaattcaatggaacagtgtgaagacattgaagctgttagagaagcccaaggatgaaaatatattgttcacgttccatttctatgagccgttgctgtttacccatcagaaagcacactgggtaccgaccatcagccagaccgaagatatctattatccggaagcaatggactattatcgtacaaagtcgctgcccatcggatatcagggagaagtagtctgcaaggcacagtcacagactatgggaaccgaatttatcacggaaatggtgatggaagcagttactgctgcgaaaaatgccggagtgactttgtactgtggagaattcggtgttattgatcaggctcccgtagaagataccctgcgctggttcacggatgtggataccgtattccggcagtttggtatcggctgtgctgtctggacttataaggagatggattttggacttatgggggagcattatgcaccgatccgcgaacaattgctgacgctttggaaccggaagtagaactgagtaaaaagaccgaaattcatatttgatgaaattcggtcttaagtttatttaatgtcagtttcattttgtgttatactgtgttatatgatttgttggtctccgctgccgcttcggtcggcacagagcagatgtccaccggacatcttgtgtccttgcttttcccttaccagagtccgtaaacactggtgggatgatataacacaagggaacatataaggaaaaactcacctgtcacaaacgtagtgttttcaatagtttgtgagaaatttgataacaaaatataacaattattaaattccttaataaaacaggtgaaatttggtggtgtaggtatgccttaatgtgtggaagtgaaagggaagctgatcagcagcatacacaaaggaattaccatagcagagataaaggggcgagataagtcgcccttttttcgtcggataattcatttctttacgtttctatactctgtaggagttaaggaatacattctcttaaatgttttacagaaataatctgtattactaaatccagtttctattgaaatggcacttacttttttttctgtattggtaagaagtaatgctgccttccttaacctgtagcatatcagatagttgacaggagatgtattcagtacattacgaaacaaattcaaggcagtactgatactcacttccccaactttggcaatatccaaaagagaaatgctttcagggtaattcgaatgtataaactgcatcatcatttgtaaccgtgcaagtgaggaagaattcacattttgagtttctgggtaacaaataacatttgaagttatgagtgcccatatcttttgtaattgaacagatatttgtagttcatttatttcacctctgctaaactgtataagcttttgcatttcagacaaaatttctttctgccattcctgtgaagaagaaaaaatgtaataacccaaagatgagttcagaaagggtaacacaaatttctgatagattaaactttctttcggagcaatcagagacggaagaaagagaaaatttggaattacagcgtcattttcggaatgcattttatgaacaactttggaattaataaatattccctgtccctcggacatgtcaaaattatcttctcctacattaaagtgaactataccggattcgatatatacaaattcaaattcggtatgccaatgccagtcaatacagttaaaatcataatcggttatgttatcatcatagagtttgtatggaaaaagatgagtcccatgtaaagcagtttccatcagtgtatcatcggtttttatacttacaagctttttcttttctttctgcgacatggcagtcccctcctgaacaatctgttttacgatattatacagcataattgcgatattatatagtgaaaaataaacaaaattgctatatagttctatttagccgtaaggagaagataaatgtttgcacaggttgaatttggtttatgtgatgaaaaagaatgtatttctatcattttagataatgaggaacaggtaaatgaatttatgttaatgcttattgaaaagtcatttatagtgaattgtgaaccaagatacgtaggcacgttctatgagggaagtgtttggtgtggagatgagcattatctaagaataacaacaaagagagtttaggaaaaatgatgaagaattataaaaagacaaaattggcgtgttatttgggatttattacgcaggcagttgctgcgaattttgcacctttactatttctgaaatttcatacagattacaatatttcacttggaaacattgctatgatatcaacatcctttttctttacacagcttttggtagatttgttttgtgccaagtacgtggacaaaattggatatagagtatgcattgttgcttctgaagtatgttcagctgcaggccttgtaggtttggcatttttaccggaaataattccatctccgtttattggtattattataagtgtcattttgtatgcgattggaagtggcttaatcgaggttttaggaagtcctattgtggaagcatgtccgtttgagaacaaggaggctactatgagccttctgcattccttttactgttggggagcagttggaactatacttgtttcgaccgttttctttctgctatttggaattggcagctggaaatggcttgctgttatttttgcattaattcctgctatcaatattattaattttgcaacttgtccgattgaatcattagtagaggaaggacagggaatggaaatcagaaaattattttcaaatcccatgttcctgattgccattgtgatgatggtctgttccggggcatcggagcttgcaatggcacaatgggcatctgcgtacgcagaatcagccctaggcttttcaaaggcagtgggagatattgccggaccttgtatgtttgctgtgacgatgggaatttcacgagtgttgtttggaaaagccggtgataaaataaaactaaacagatttatgattggttccggtatcttatgttttgtatgttatttattagcgtcattttcagaaaatccgatcattggacttgctggatgtattgtatgtgggttttctgtaggaatcatgtggcccggtacaatcagcatctcttccaaggaatttccaacaggaggaactgcaatgtttgcacttttagcaatggcaggtgatcttggaggaagcataggtccagccattgtaggaagggttgcggacatgtttggaggtagtattcatgtgggcatgcgcattggactcctgtttccgattacgttgtgttttatgctatttttattcaatataatgaaccacaatgcgaataagcagaaatagctgttatgttcatgtgacagttaaatgttgccagatgaaagaacactatggggagaaaaatgctccttaaagaaaccaacgaatcttccgcatctatccacatctgcatagtaccgtcaagataaagtcgagcatacttcacaggattgtctattgccaaagcattcaaggcacactctgaattaggtgttgtctttaatccttcctctgcctttgcacaatcaatcctcttttctgtaaaattcaaaaagcatttcaagcagttcacacagtccgttcatattatgctataatgtgttatgcgattttgcttcccttattttttcccttacgagggttcgtaaagccttgtgaaacgatataacacaagggaatacctaagggaaagctcacctacagaaaagttagtgtttataagggttagcggggagtttattaataaaatataacagctaatgaaacccttaaattaagtgattatacaatcgggattgcccgagttctttgagtgagatacacttcttgggcgaagggaaggaagaaggaaaagtactttagaggtattatggaatgagtaataaattggttaagcatcaagaatcaaaagaactattaagtggaaagcaaaaggaaattttgttttggatttgtttcattattttaagtatatctttcattacagtcttgataaatatacttttgacatctaaagcatttaatacacaaatggaagagatggtactgggagaagattattatatggaggatattgtgattacaggtaaaagggctgaagatgcttcggctgatacaatatctcagaattatttcttctactacaacaatggaaaagtgaatgattatcacaagcgaatgcaagtaccggaatttgtatattcggaatatgatgtaggagattccatagctgcatataccacagaccatgttagttattcttattacaagtatgggattcttccggatacagagtatacaaacaatgaattaatgaaagtggctggagtattgcttggaattggaatatttttattggctttgtttggggtattaagtaagaaaagaagaactgcaggattataaattttccgttgcaaagaaggctggggaagacaaaggatggaatcaaataaaaagaataaaactataaaacgggatttgccgaataaaggagtaaaatagaaatgaagattcgcaaggcagagaaaaaggacattccaagaattcttgcactgttggggcaggtattacagatacatgcagagatccgtccggatatttttataccgggtactacgaaatacaccccctgcgagctggcagagcacttttatgaaaagatgggaatgaagacaaaagaacggcagatggaatatatcctgtgagccggacggaggtggcaagcatgattaaaattgcattttttgatgtcgatgggacacttctgaagatggggcataaagagttaagtgagcggacactgcatgcgttaacttctcttcgtcagaatggggtaaagctgtgtatggcgaccggaagaggatatc

SEQ ID NO: 11357 - DNA, 1187 bp, Unknown
  gut microbiota DNA sequence
caccatttcccacaatggtgtccataccctcttccatctctgccacctcaccgtcgaaacagactgccttcagatacttctccggatcgtcatcatcgcccagcagtatattgttacggacactatcattgaacagctccggatcgtgtcctaaatatcccaccatgccgttttgctctgccttggtcatcccggataattctttgccgtggaaacagatccttccttcgtaagggtattcacagaggaaggtctttcccaatgtggatttaccacacgccactgcgccggtgacaccaatgatctgtcccggagtggctgacagattgaagtcctcatagatcttctctccgccgggataagcgaagcttacatccgatacttccagcgttcccggctcctgtaccaggctatcgtcctcataagtggtttccttcatcagtggcttgatgcgcttccaggagacctgggctttatgtactgcattgaatagcttcgcggcatgagaagatttcacggctaacttcaaaaaacaggataaaaacgtggtaaaggctgccacatcccatattttccagcctgttcccagcacatttctgctgccgaaatacaggataaacaatactcctgtcatggagatgatccggtacagcgggggaaacgcagtactccagatattggccttcacagcagatgtctcataatcggtaaggttcgcttcataggcccgcctgcgctctttttctctgccatagacacggtaagtgatagcgttagtggctctgtccagtgttgcggcacttaaatctccggattgctccttataagcagctccggtgcgttgcacgttacgcttcatcttttccgccagcacataagataccggtaaaaacagcatgcctaagattgccagccgccagtcatagaataacaacattcccacatatgccgccagtgccacaccggtatcgaagatctctgtggtaaatttccgcataccctccgcgcagtcgtccacatccaggattgccttggtcatcacatttccgacaccctcttcttccagttcggcacggcttctgtgcgccaggctgcggtacaggatctctttcatgtcacgatttacattattggcaaaacgtctgacataaaaacgtttgatataacgggcaatctgcacgatggca

SEQ ID NO: 11358 - DNA, 1339 bp, Unknown
  gut microbiota DNA sequence
gtggtgtatcacagtaaaacaggaaaggagacgagaaaaatggagaatacaaaggatcagtatattggggccgaaatacattcggcacggtcagtgaatccggatggagagacggtaacactggacggagatacggtagtatggacaggggaggaagatgtcctgacaccggaggagctggaagagttccatcgagatgcaatcaaactgatggaagaaagcgaacagcagaaagaggttgccattcagggataagggtgcaattatatataaaaggaacaaccgccccacaaggtgggttgaccaaaataagttgagtagcaaagaccacccttctactggccaaagttttgggtggttttgctgtataaaattacttgaaatgatccgagagtgatggtatagtaaagataaagggaaagccaaagaggcggctaccccaaatagcaaaataactgtttagtactaaaaacagccgtcactattgcagtagtggcggctatttctttttgttatccttaaagatctgatagcacagaccaataagagcaacgataaacatacaaaattggaataaatccgcatatgtaacattcatcttatcgccctcctttcataacgctggagggtgaaccctccggagaggggcagccgccttggctctttaactttcccagatctatatcataccatataaattaaatatcgacaatattcgtccgagtagagcagtatgcttcactcggatttttttattctccggtttccatatgcagttgacattgataaatgaaaaaggaggatacagatgataagaaaaaagcgctatttagctgcaaagatgggattgctggcgctgggaattgcgatgctgctaccaggacaaaaagtagatgcagcagcaaaaaagacgatttataacagtccctatgtgacattcagcccggacggaaaagcctggacaacatgtgccggagaccgggactatacctggtatgatgcggatacccgggtatccactgggattacgtcatccctcagagccctgaatactggggagcattattataaggtcagtcgatatggagagatcccgattggatactggcaggtatcacatcgcccggcacaatgtatccataatggatatccggaagataatgacttgtaccacggaatacagtatggacgccataaatgcttacgaaattataattccggctggatggcgtattgtgcggactgcggagaagtgattgcttatgcgaacatgtatatgtccagggatgcggcaaaatcaatacagtacttagatcttggaagcgaaaaaaatcgtgtt

SEQ ID NO: 11359 - DNA, 893 bp, Unknown
  gut microbiota DNA sequence
tgacatttcttgcatattctacgatcgtcagctgcattcccagacacagtcccaggaagggaactccatgggttcttgcatactgaatcgccaggatcttgccttcgataccccgggaaccgaagccgccgggtactaggacaccgttgcagtcacctaacagttcttccacattttcaggtgttaccgtctcggagtcgatccatttgatatgtaccgtagcatgattggtgataccgccatgcttcagagcctctacaacactgatataggcatcatgcagagagacatattttccgaccagagcgatctgcacttcatcggtgggatgacgcagatcctctaccatcttcttccagtctgccagatccggttccggacaatccagatgcagacattcacaggctacctgtgccagatgctctttttccatagctaacggagcctcatacagatattccacatctagattctgcaatacatgactctgaggtacgttacagaacagagcaatcttatccttgatggactgatccagaggatgctcacttctgcagacgatgatatccggctggatgcccatgccctgcagatccttaacactggcctgggtaggcttggtcttcagctcctgagaagcactcagataaggaatcagcgttacatggatcagaatggcattgtcatgccccacctcatgttggaactgacggatggactccaggaaaggctggctctcgatgtcacctacggtaccgcctacctcgatgatggcgatacgggtctcatcatctgtaaagttgcggtaaaagcggctcttgatctcattggtgatatgggggatgacctgtacggtacctccgccgtaatcaccacgacgctccttctgcaat

SEQ ID NO: 11360 - DNA, 4776 bp, Unknown
  gut microbiota DNA sequence
gccgctggtgttcatttttttgaacctttttatgattccgcgctatcagacgacacttaggaccggtcgtgtattgcagggatatattgtgataagtattgcacttcttttgcttttgctcttgttcaacgcaattttcctgctaatggccaccagtctcaaccgcaacgcgagattacagcaggaaaaccagcttcttttcctgcagcagcaacgctatgagaatctcaaagctgccatcgaagaagtgcggcaggcgcggcatgatatgcgccaccaactgaatcaaatttccgcactggttgagacaggcgatctggagggattgaaaagctaccttgaaaaaaacatttcccgcatcccgaatctcggtatacatttctgcgaaaaccgcgcagcagatagcgtcatcggctattattgtgccctggcaaagcgcgaagacattcccttttgtgcaaagctcgatttgccgcagactcttcccatcgatgagatcaacatgtgtctggtcttgtccaacttgttggaaaatgcgctcgaagccagtatccgcactgcaccagacagacggcagatcaaaatcactgcatatctgcatgccgggcggctacttctgatcgaagttgagaatgcctatgacggcgaaatcagggagaaggacggtgtttttctatcctccaaacgaaagggaaacggcgtcggcatccagtctatccagcatattgcagaaaaaagcggcggtgcaagtacatttgcctatcagaatggtgttttctccgctaaagttatgctctgcggataaatgcacatttctgccggccggatcgctatgatgcatgcagacactgcagagagacatcacggatatcaaggcagaattctacctggtgtcggcgatcgtgtccggggtgagggaagaaggtaacacgaaaggattgacagtaccgtaatgctgagttattaataaaaatgtatcggggacagattcaaaggaagcaggaacgggattatgaataacgatattatatttttaaatccggtgtgtactcacaacatctggggcggcacccggctgaacagagaattcggttaccccattgagggagatgacatcggggagtgctggggcatcagcgctcatccaagtggagatggtaccgtgagaaacggagcctttcagggaatgaagctgtcagaactatgggagaagcaccccgagctgttcggagacgcgggaatggatcgttttccgctgctggtcaagatcattgatgcgaaggacgacctaagcattcaggtgcatccggatgatgcgtatgcgaaggttcatgagaacggatccctgggtaagaccgagtgttggttcatcctggattgcaaggagaatgccacgctggtagccggacacaatgcgaagacgaaggaagaactggagcagatgatccatgagggcagatggaaggaattcatccgagagattcccattaagcccggggatttcatccagatcgatcccggtaccgtgcatgccatcaagggaggaactcttctcttagagacccagcagagcagtgatatcacttaccgcgtgtatgattacgacagattgagcaacggcaagcccagacagctgcacatcgcacagagtattgatgtgatcacggttcccgcaaaatccgtggacaacagtgtggtgcataccgagaagaaggatgatgccattcagcagctgatccggtgcccttactacaccgtataccgtattgatgtggagcatcgcgtggagacctggcaggataagcctttcatcctgatgagcgtggtagaaggcgaaggcaccctgaatggtactcatttaaaaaagggcgatcacctaatcctgcctgatggatatggtaaggtggaattgcaggggaagatgcagatcattgcatcgaccatctagaaaatgaaaagcggctcgccggagccgcttatttttcatcaatcctttcaattttaaacacattcagcgtatccacatccgggcaggcaaagatagcggttcccttcggatttccggggatttctccaccataccggagaatatctacataaggaaacgccacatgcattgccatggggcacaggttgccgcgttctgtgccaaaatcataagaatcgccgattttatgtcccctgtggcagccttttgttcctttttggtcaattaatgtaatctgaattctgggtctgctcattcgtccaatacctccaaacaggtttctaaggggattcccttgaatttatctgcattctccgcatttttcataatcattgtccgtacggcattcattgctttatgtgttgcggtctgcaaagtctcaccgttcaatattttggccataaagatggcagagaagatatcgccggtacccggaaaacgaaccggaatctcatcaaaatcaatttgaaaatacttattttctatatggtcataccccattacagctttattcacggaatcttttacaatcgcactggtgatcactacggactttgtgcccaatgctcgcagtgcatcaatcattttatgatagtcttccttggtgatgccgtctgcttcataggcggttcccgtcagataacaggcttccgtgtaattgggcacaatataatctgccacggagatcagctttcgcatcagttccaccgtttcttctgacatgccgttgtacagctttccatcatctcccatgatgggatctgtgaatacagtgacgcccttagctgcattctcgatgcagaactccgtgatcatctgcgtctgctcttttgatacgataaaaccggtagaaatggcatcaaactgaaaatcaagggctttccatacacccaaagtgttcttcatatactgtgtggtatccagaatatcgaattttccgtaatccaaagtattggatacgattgctgtggggagattgtaagtctcgtatttcagataggacaataccggaagcattgcagataatgccactttgccgtatcccgccagatcattgatcaataacactttttttgccatttgttttctcctgtgttctctgtagtttgccggacttgagttttattatatacacttaacgatttgtgtgcaatatagtataatgagcgcaagagagccagaaagctgctggcagatttctggcgaacggcgaatttgatcacgatagctacaaagcagcgtagagcatcgaagatgcgaatcgtgatataatgaagtcaccggacagtttaagggggattgatgatgaatgatgcatggttagatttcgcaatccgtattcaaagcattgcgcaggcgggactgcaatatggaaaagacaaatacgataaagaacgttatgaagaactgcgcagaatctcggcggaaatgattgctgtaaggacagatattcccgttgccagggtttatgatctgttttgcaacgaaacaggttaccagaccccaaaagtggatacgagagctgctgtatttgtggatgggaaaattctgcttgtccatgaaaacaacggtacatggtcgttgcccggcggctggtgcgacgttgaccagtcggttgcttcgaatacggtaaaggaagtaaaagaggaaacgggctttgccgtgacggcagaaaagctgatcgctgttcaggactggcgtaagcataatgtgacaaactatgcatacggagtggttaaaatcttcgtgcagtgcaaatacgaaagcggtgaatttgaagacaatatcgaaacgaccggcattgcattttttgatgaggacacgctccccgaaaatcttgcggtggaaaaatgcaccagggagcagatactgatgtgttttgcggcactgcaagatccgaatgcaccgacagtgtttgattaaagtgtattaagctgttttgtttatgtgatgaaatcatcaagattcaatgaaaagggggattgatttctcaacccctcataatgtataatctacttagaaaggtggtcggaggtgaaaattccgattcgccctcagttaaatgttagaaaagaaatagcattcactttggacggtgggatgctatttctttttagtattatcgtcaccatgtctgtcgataaaagatattgattaaaaaaatagacaataaaagggtaagttatattatggatacactcagagataaatttttcaaacagcatttattatcggatcaattcctggatctgatcgagaaaaacaagcgccccatggacgagctgatgtcgtattatcagtgtgccatcatggaggtggagacgaaattcaaggtattgaatcatgagtattccctggaatacgaccggaatcccatcgaagggattaagaccagagtgaaatcgtatgacagtattctgcgtaagatccgccggaaaaatatccctatgactatggaaggcatcgaagagaatattcgcgatattgccggagtccgggtcatctgttccttcccggacgatatttatgagcttgcggagagttttctgcgacaggatgatatcacactggtggaacgcaaggactatatcaagaatcccaaggagagtggctaccggagtctgcatctgatcgtgcaggtgccgatctttttgcagaatacgaaaaagctggtctatgtggaagtgcagttccgcacgattgccatggacttctgggccagtctggaacacaagctgcaatacaagaaaaatattccggagagtcaggcaaagttcctgaaggatgag

SEQ ID NO: 11361 - DNA, 349 bp, Unknown
  gut microbiota DNA sequence
ggatattgagagttggttgaatagttgttcaaaaaacttcgtgggtctatagaagataaatttccctgtagatactttttggggatgggtaaaaagcaaaaactaaacaatatgggcctatagcgaaaaattcgcctgccagatactcaatttcttcaaaatgagtacctcagagccgtttttttctctatagacccatattcatctttttatgccttatttgtagcaaatttagtatctcacaactcattttttctgtatagacccaaaacacagaacgcccacagtggacggaatgtcatgccgcgatgtctgtcggagggcgttgatattttcttgaaaagtgctg

SEQ ID NO: 11362 - DNA, 2013 bp, Unknown
  gut microbiota DNA sequence
caagcaatacggatatggatcaggattttataagatacttagtgatgacttaaaaaaggtattaccggatgttaagtcattttcaccaaccaatttaaaatatatgcgttatttctatgaattatatccttgtgccggaaatcgtccacaagctgtggacgattcgactatcgtttttagaattccttggggacataatagaacaataatagacaaatgtaaaaacaatgtggataaggcattgttttatgtgagaaaaacactagaaaataattggtctcgtgatgtcctggtaaattttttagatacggatttatttgaaagacaaggaaaagctataacaaattttgcaaatacattaccttcagtgcaaggtgatttggcgcaggcaattacaaaggatccgtacaattttgattttttgacattacgggaacaatatgatgaaaaggaattaaaggatgcattaattaataaagtaaacaactttctaatagaactcggaacaggattcgcttatatggggcgcgaagtccgtatcacagtgggggaagtagagaaattcatcgatatgttgttttacaatacacaaagacattgctatgtagttgtagaaattaagacaggtaaatttgactcatcttatgccggacaacttggaacgtatgttgtcgcaattaatcatcaaatgaaaacagagaatgataatccaactttaggattgttaatctgtaaagatatggataaagtcgaggcacagtatgcactggaatcaacaagtcaacctttgggaatatccagctatgaattatctaagttgataccagaagaatttaagggaagcttgcctacaattgaagagattgaggcagaattgaaagattaaaatccttgcaaaggaaacatcgaagtatattttcaatgatgcggaggaaaatgaactcaactgacaaattttagttttaaatggttaggaaaattgaggcctgtggagtggaaaagacaaggcttgcgacagaagaattatattagatgaaaaaggcaaagaggaacatagaatgagggcaacaggatgaaaatagaacacattgcactttacgtagaggatctggaaggagccagaaatttttttataaagtatctgggggcgaaatcaaacgaaggataccataatccacagacagactttcgttcctattttctttcttttgaggatggtgcccgacttgagatcatgcagagaccggaaatggtaaacctgccgaaagaagctgccagaaccggatatgcacatattgccttcagtgtaggaagcagggaaaaggtggatgctttgactgcagaattaaaagcagacggatatgacgttgtcagcggacccagaattacaggagacggctattacgaaagctgcatcgttgtaatggaaggcaaccaggtcgaaattacggtctgatgacgaccggattaaaatcgttattcggataggtactgttaataagtgaaagaggaaacagaatgaaagaaaatttaatcagacaaatagaaaattaccccccgtttaatgaacaggaagaaaaggacaaagctttgctcctgggatggatcagtaacaatgagaacgcattttccagagaaaatacagttgcgcatattacggcttctgcctgggtggtaaataaggacagaagcaaagtgcttatggtatatcataatatttataattcctggtcctggatgggaggacatgcggatggggagacggatctgctgtccgttgccatccgggaagtgaaggaggaggcgggaatttccaatgtgagaccggtatcagaggagattttttctctggaatctctgacggtggacggacatgtgaaaaaagggaactatgtgtccagccatttgcatctgaatatcacgtatttactggaggcagattcggaagagcaggtatccgtaaaagccgatgagaacagcggagtgatgtggttctctccggaagatgctttg

SEQ ID NO: 11363 - DNA, 6722 bp, Unknown
  gut microbiota DNA sequence
aaccgatcatacggctcgccgtaaaatccgtattcagattcttcgtcaccagatcacagaaaacttccggataaccgcgggataggagcattttatataattgcatactttgatgagatcttggtttcatatttattctacgccttcttaatatggaagatcacgccgctcttggggtagatccactcgtccttgatcgcaatgtcatagagtccggctctctggatgcaggctccgacattggcagtgctttccttattgagataggaatacatagtgacatccattccgttcttgtatttcagcttgatatggggctccttggtcggatccaccagagtcacctcgaaaatagagttccatacccggggcatcttgaaatagatgctgaccagatgctccccgcttgcctcgttccggtcaaaatccagcttgaatttcaggataaatccgttgctctttcgctctacttcgaactgcgcttcgtcgtcattatctccgctgttgtcaattcgcaagatcggcatgaacaggtcattgatcacatcccgtatcttatccgcgggaatactgttgatgaagtccacggcttccggttccaccaccagatcctcattgaaaatgctctttgtgaaatccgcatcctgtccggtctccagcaatccaccgtccagactctttttatcataggcgaaaccgagtctgatcacatcgcccgcgtagttctcgtctgttcctcccagacactttacgctgaacttcaattcctcatcgatcaggtaatactttccgtctgtggctccggggaaaccggcttttacatattcctcagtcagattcggctccagattgatcgtgtaatcgaacattttccggatcctggcgcctcttgccctgtcaaaatatttctccatattggtagaaagcatatccaccgcatcttcatcctttatcatggaggtaatggtggatttcaggaaagtctttttatcttcatcgctgaaagaatccaggatctccggctctcccatcagcgtcttggtgatctgctgggaggtctctctggcgtaggcatcctgggtcagcttgttgttcagtatatcgaataacagaaatgctgccagcacaccgatgagattccccacgatattgtcgatcaagtcatccaaggtgtaaccgttcttcagtgccagatacgtatatcccacaaataccagcaatagtgcgattagcaccagtaccatagtagcggacaaggtgtccatcacactttttttcttcttttgtttctgattatccatgaatttcctccctcgtaaatacaccctcatagattgcgggcttccgcatgtaatatgcccagaaccggtcaccgtagtcataatgccaccattccgacggcagattggtaaatcccgcatctatcatagcataataaagcaaacggcggttttcacgaacctgttcgtcctctgccccctgtacatgctccggtgcctcaaaatacgctgcacaggtcttatccgtaaaagcatcaaaaccgcatcccataggaagctctctgccctccggatccagaagcgtcagatcaatggctcctccggtggtatgggcgggaggcacctttgtatccggtaccggatccgagacaaatttgcagatcgcagctctcctttttgcctccggcagctcttccagatgaaaatcccggatgatgtccacagaatacttttcaaacaattcatgctgcagtgcaaaggggcgccaggcatcccagatgcggaaccggtaaccgtccggcagattccccgccgctttcaccagcctctcatacatctccttacggacgaagcacttctcttccgcatggtccatatgtaggatcggatacagcattttcacatcccacagatcacagcttttcaattctataaacgcagaatccacaaacgcactgtctatatagcgctccggatcttcaatcgttggtatcggcctcataggatcagcctccttattatttatatttatcatgcattatttttaattcaattctaactcgtatttaactcatttccttttgagttaaaatgaattaagaattaacaactttatacttagagtattttcccccacatagcaattccaaccgaccctctgcttgaagtttttttataactgtatatgcctgtgaaggagttactttcaacaattcaatcacatcatgctttgtgataattccattctgagtatttgccagcttcattactaattcaggatacctaatactgtctatgtctgtctgtcgaacatactgtattgcttttttattctcacgataaatcctttttccaagcatgcaagtgcgattttttccttttccggatgcttcaaccagtcctgactcaatcataaactcaattgccgatctgatcttattttctccaagatttgtcaactcaacaatccgttcaacagtacatcttctttcattattaagaaccgacaaaatcattaacacatatattgataacggttttccctgtcgattttgttcatctgcaacaaattttgcaaatggtaaatctgcttttgctctttgaataaataatttaacagatctgcttgtagattctgaatagtctggccaaggtcttccaaagaggatagatccttcataaattctatcaattcctcttcccgttttctcagctaaaccaattcgcttcattacatctgcaagtgctggattacgtccatgtggttctactgtaagaagattttttaaattaactccatctataaatccaccaggattactaatagtcattccttcatcatctatcaaaacccttaccgcaccaagcatagtataatccctatgacaaaatgcatttaccaaaccttctcgaaaagcagaccagtcaaactctggaattggaattctgaacaaaccatactctgtctctctttccgggttccatgctttgacatatgtctcatagctttcgaacaattccagaagtggtttattactatcctcatttacgcggacagctgtcccctctaaaacctgaaatgcagctttcgctgttggtatcaactctgcaatgcgttcttctttaccaattaacagcatacctgtaactgttggaacatatttaccagcaacatttgtgataagacgcaatgcaatatccaattcttcatccggtaaagaaagtaaagatttttctcctccagatctattctggattattcgccgaagtcttaccctctgattgggatccagatcatctaaagtagatcctgccaaaggctgagctgaataatcaagcattccaagttctgcaagtcgagatggtatctcatatgaatacatcggtattacttccggacttccatccagcttattacgccttcttaatattttccccgatgcagtagatacaacccctcgacttctaggtacttcaattttcaaaacatccttatcctcttccgtaattatctctgccctgacagctataggcggaacagtactattagcgatcagagcggttacccctataggatcattatgctttttatgaacaccagtaattgttccatcatcttcaacgccaaggaatagacatccaccagacgtatttgtcattccaacaatttcttcaataagatcatgatccgggtaacactttaagtcactcttgaactcgacatctaaactttcctctttagggattgtgcgcattgcaatcactcctatcatttaattcaactatagtctaactcgttttaactcgtttgtcgagttaatttttctatttaactcatttttacgaattaatatactatgtgcaatcctgatatttatatgtttactgtcttctcatgaaaatagcgaagcccccgcaggttctcctcccgatcgtaggtctcacagattgctgcaaattcctgtttgccatttcccgtaagtcttgttaaaatgaggatatgaaaaagaaaaatttatgtaaaacgttattaaaaaccatgtgtattgtgctggggatcctcatcctcgcactgttggcttacatcgtctacctctatgccagttattacaggatcgaggacaatcaggaactggtggtggaggcaccggttgacgatactaccacaggtgcggctgcagtgctggctacggatacagaatattccgcagtgacctacaacatcggctttggtgcgtatctgccggattacagcttcttcatggacggcggtacctcctcctgggcggaaagcccggagaccgtacaatatgccataaacggtgcgggagaactggtgaagtcattagacccggattttgcgctgatccaggagatcgatctggatgccaccagaagctatcatacggatgagtacgagatgctacgcaaccttctgccggaatatactaccgtatttgcgcagaattatgactctgctttcctgttctatccgtttacccagccccacggcagcagccgggcaggactcggactgttctcgaaatatccggtgtcttccgccctgcgcagaagcttccccatatccacttccttcagcaagttcttcgatctggaccgttgctacagtgtctcccggatcccggtggacaacgggaaagagctggtgatcttcaatctgcatatgtccgcttacggcaacagcgatgagatccgcaagggacagattgagatgctgtgcaatgatatggcaaaagaatacgaagccggcaattacgtgctctgcggcggcgactttaaccacgacctgaaggcttccgaagaagatgcggagaactgcgagtcctgggcatttccttttccgagaacggagttgccggagcattttgccttctgtctggatctgttgagttctgaggagaaggaagttctttggaacagcgccagaaatgcggatatggaatatgtccccggtgtaacttataccgtaaccttggacggattcattatctccgataatatcgagtgcctgtcctatgagaatatcaataccggctattcctactccgaccatgatcccgtgaaggtggaattcgtgttaaaatagtgtcaagatttacaaagtctgttgacagtgtttgtccttttttgtagaatgagggcacagttaagagggagtagttcccggatggtttctgagagaatggtaacccggaatggtaaccgaaggatacacgaagctgtccggaatgataatcgtcatcacgtccgtcggaccggttattattgtaagcaacgagacttttatcgatcatttttgatgcggtaagagtctctatttttatacttttttatttttatattttttataagaatacgtgagtcaccgcaggaaaggacagcttatggaatacatattgttactcgtaggatttatacttctgatcaaaggtgcggactttttcgtggagggaagttcctccctagcggggatcctgaaggtccccagcgtcatcatcggtctgaccatcgtcgccatgggcaccagcgctccggaggcctccgtcagcatcaatgccgccctggctggcagtaatgatatcgccatcagtaacgtcgtcggctcgaatatcttcaacgggctggtggtcgttggtatctgtgcatttctgcacagctttatgccccacggtgagatcctgaagcgggatatgccgttaaatatcctggtaactgtcgtattatgtctgatgtttttagatggcagcttaagccgcatggaaggcgctgtcctgttgcttggtatgatcgtatatctgggatttatgatctattctgcccggaaaaacagagaagagggcgaacccggcaagatcctctccctgccccgcagccttttgtatattgccggaggtctggctgccgttatcttcggtggtgatctcgtcgtggataaagcgtgcatcatcgctacgaatttcggtgtcagtcagaacttcatcggactgactattatcgccatcggcacctccctgccggagctggtgacctccatcgttgccacgaaaaagggagacagcggactggcgctgggcaatgccatcggctccaacctgttcaacatcctgtttatcctcggaatgtccgcggtgatcagccctctgcatgtcctcggagagtctgtcatcgacaccgtactgctccttggcagtgccattctgctcttcgtattcgcccgtaccggcagacgcatgacccgcagtgagggggctgcgtgcgtgcttctgtatgttgcatatacggcttatctcttcgtgagataacagtgcggctatagacgcacaaaaaagcgcacctgggggaggtgcgcttttttgtgctaatatcctcttccgccttgggaagaatttgcactttatacattattttccgttatacctgctttccaactctgcgaaaaaaactttgtaatctctaccttttccgctcaacatatcttgatagctatccattactttctggcgaactacattattatctactttgctatccgaatcgacaatatgtctgttcccttgagccattacttccatagcctacatcctccttaccttaaagtcaaatccggtctaatatgttcaacggtattctcacgcattccgattttattatatccgactcttcacgtttaatcaacatataatcactgaattcagatctcat

SEQ ID NO: 11364 - DNA, 5220 bp, Unknown
  gut microbiota DNA sequence
gtgattgccacacaggtcttaccaaccagctcttccggctcgtaatactcgtgaataccgcttaaaatggtgcgtttccggtctgttccgtcattcagtgtgaatttcaggagcttcttggacttcggcactgcctcacaggcttcgatcttaaccactctgaaatcagacttgctgaatgtctcaaagtctacatcatctgcaaacaacggctcgattttcaccttggaaagatcaatctgtacgcttggcgcggacacggttgcatcctctgcagaaccatttacagctgctttttcggctttgttttcagccttctttgggtccagggtcttcattgtcgggaagagcagaacatcacggatcgcaggagagttggtcagcagcattaccagacggtcgataccgtaaccgataccgccggtaggaggcataccgatctccagtgcgttcatgaaatcttcatcggtcgtattggcttcctcatcgcctgctgccagtgcagcttcctgcgccttgaaacgctctctctggtcgatggggtcatttaactcggaataagcattacacatttcacgtccatagatgaacagctcgaaacgctctacataatcaggcttgtccggctttctcttggtcagaggagagatctctaccggatgatccatgatgaatacgggctggatcagatgctcttctacgaactcctcgaagaacaggttcaggatatcgcccttggcatgacgctcttcgtagtgtacacccttctcgtctgccagcttcttcgcagcagcggtatcgggaatctggtcgaaatcaacgcctgcgtatttcttgacagcatctaccatggtcagtctctcgaaaggcttgcccaggtcgatggtctcttctgcataagggatcacggtagtaccgcatacttcctgtgccacatagcggaacatgttctcagtcagatccatcattccgtaatagtcggtgtatgcctggtacagctccatcagtgtgaattccggattgtgtctggtgtccagaccttcgttacggaatacacggccgatctcgaagacacgctccatgccgccgacgatcagtctcttcaggtacagctccagggagatacgcagcttcacgtcctcatccagcgcattgtaatgggtctcgaaaggtcttgctgccgcaccgccggcattggataccagcatgggggtctctacttccaggaagccctgtccgtccagataacggcggatggcgctgatgatcttagaacgctttacgaaagtatccttaacatcctgattcatgatcaggtcggtataacgctgacgataacggatatcggtattggtcaggccatggaacttctcaggcaggatctgtaagctcttggacagcagtattacctgggacgcatgtacggagatctcgccggtcttggtcttaaatacttcgccctcgatacctacgatatcacccacatcatactttttgaaatccgcataggactcttctccgatgctgtctcttgccacatatacctggatgttgccgggcagatcctgtacattacagaaggatgccttacccatgacacgtttggacattacacgtccggcgatacggacggtcttgccttccagttcttcgaaattattcttgatatcagtgctgtgatgggtcacatcatatttggtgatctgaaaaggatccttgcctgcctgctgcaggttagccagcttctcgcgctttaccttaagcagctgatgaatatcctgctcctgtacatttgtgttctgtgtatctgccacttttttccactccttactctgtcttacttactcaacgttacttctctggatctccagaatcttatatgagaatacacctgcgggtgtctctacttcaacggtatcgccgaccttatgaccgatcagtgccttacctacggggctctcgttggagatcttgccctttaagctgttcgcctcggtggaacctacgatcttgtaatccagctcttcgctgtattcgatatccaggatcttgacctggcagccgatgttgatcttatccagatctacttcatcctcgactacgacttctgcgttcttcaggatcttctccaactcttcgatacgggcttcaatgtctctctgctcatccttcgctgcatcgtactcagcgttctcggacaggtctccctgctctcttgcttccttaatcttctgagcaacttcctgacgttttaccactttcagatcatgtaactcatcctcatattttctgaggccttcgtaggtcaaaatgtttttcttttcctgcatgataccgcaccttcctgttttctatattttgcgctaccgacactcccggcaactatactagcctaatcaaccgagttattatacccatttttactgatggtgtcaaggtattccaaggcttttcgcgggtctttccactcttttttcatggaaaaataacggatctgcggacatccggacgtgacacggcgttccttttcctccgatgccggaaaatccagccagatgctgcccgctgccagcccgccaccgtagactttgtcactgtcgctaaaatccagcaccaggcagggcgccgtcgcctccagccgcaccctgtcgtaatctgacgtttccggtaacagacggatctccgggatcagcccgtattcgtcttccagttcccaggtcagttcgtcttcctcctcccgatattctctgtccgtgaggtaccatttcacgctgcgcagtgccgccacataccgcagcagcacgtaggacagaaagggattcttccccagcacgatcacatccggccacagcggatgtcccatcacatcttctccgtaccgcagcaaatgttccacccagttctgctgccggtattcccggaattcccttccgtaataaaaagacaggggttctcggcacacaatgtatgtgtggtccggatcctctgtcagttcccgcaattgttcccggagtatttgctccgtctgtttctgttccgtgccatccgctcccgtcactgccgccctgaccagacggtaatcccggaatagatattccgtccgacgaacagtcaccgcctccgtagttttctgcgtttttgcagttttccacagtgcatggaatattttaaaaagttttccccggggagcgtttcccttctgcacaggctgtgacttacataccgctgcctgtgccctctgttccacggtttgtctcaccggatagagatacaaaatagtgtccatgctacagtgtatgcagccggcccgattatatgcacagtgctgcatcatacaaagccatattctatacagccttccgcagacactgctgtacaccgggctcccggcactactcttcatccgggaatatgtcatgcacgccccggatgagctcgtccattttctccatggtgttgatggtctggcggaaatgggcggaatggggcattcccacggtataccaggacagatgcttgcgcatctcccggacgccggtatattcgcccttgtattccagctgcaatgccgcatggcgcaggatcagttcccgcttctccctgttcgtgggtctcgctgggatcgtgccgtctgtaaggtaggataccacttcccggaagatccagggattgccctccgccgcccggccgatcatgacgccgtcacagccggtctggtccaaaatggctttcgctttctcggggctgtccacatcgccgttaccgatgacagggatcttcaccgcatccttcacctgtgcgatgatgtcccagtctgcctgtccgctgtaatactgggctctggtccgtccatgcaccgctaccgctgccacaccgcaggcttccgcgatcttcgcgatctccacggcattgacatggtcatcgtcaaaccccttccggatcttcacggtcaccggcttgtcgatggctctgactaacgccgtcaggatctgctccaccagcttcggatccttcatcagtgcggagccctcgccgttattcactacctttggtaccgggcatcccatgttcagatccagaatggaaaaaggacgctcctcgatgcgttttgccatctccgcaagaatctgcggatcagaaccgaacagctgcaaggaagcaggcacctcgtcgggatggatctccataaggctgtcagtatttttattgttataatagattgccttggcactcaccatctccatgcacaccagtgctgctcccatttctctgcagagcagacgaaatggcaggtcggatacgcctgccataggtgccaggataatgggattatccagggtcacattgccaatctgtaatttcttcataatctctccgtggtccggtatcctaatttatttcccggatactactttcggttcttgtcgtagatgatccgcagtccatccagcgtcagagagctgtcatagatatcaatgctgtcggtctcgtctgcgatggcacgtcccaatcccccggtggctaccaccttcagattggcaagaccgctctcttcctttaccttgcggatgatgtattccgtctgtccgatctgaccatacatcagaccggcctgcatactggtaatggtctcctgtgccagaatagtcttcggcttacggatctcgatattcggcaacttcgccgtctctttccataaggcctcggaactgatgcggatgccgggagctgtgatacctgcggtaaatcttccgtccgccgtgatcaggtcatacgtggtggcagtaccgaaatccagtaccagcacaggtccgccgtatttcacataggctgccaccgcatcgacaatacggtccgcaccgatacctctgggatcttccgtagctaccttaataccgcttttgactccgggccctacgatgagaggcttcgtatgcagatagcggatgatagaactggtcagggaatgcatcacatccggcacgacgctggcgatgatggctccctcgatatccgagatctcaattccgttatttttcaataactgcgtgatcatgatcccgtattcatcggaagttctgggagtctttgtcatgatccggaaagtagctgccagtttttccccacaaaagacacccatggtcatattggtattacctacgtctatgacaaatatcattcgccgtcctcctcatccaacagttccgaaacatcttcttt

SEQ ID NO: 11365 - DNA, 1971 bp, Unknown
  gut microbiota DNA sequence
acggatgaaggcagaaaagccacctggatcgttaagatcgagaccacgaaaaagccggaagcacagctgcttggatctgccatcggtatgaaagtgatggcggatgttccctatatcgtaggactggacaagtggctgggcggtgaactggatgatgcagcaaagacctatctgaaagacttcggcgcagcgactgcttccaacggtgcggtaggtctgtaccatgtggaaaatatcactccggaggctgtaaaatacggaaaagatctgatcgcggaggatgcaaaagtctacgtggtagatgatgcggaacttcagagggtctatgagagctatccggtgatctggaaaaagaaggatgcaaagccgaagctgtgtttcatgggatgcccccatatgagcttacagcagctcatcgactggacggaaaaagtctctcagagcctgaaagaagccggtagagccagagtgtgtattcctaccgtattcacagcggcaactgcggtactgaaaaagtttcaggagaccccttatgcggagacattaaaagcaacgggagtcattacttcctatatctgcccgttaatgtatatgaataatcctctcagcgagaagatgccggtcattacttccagcaacaagctgcgtacctataccagcgcaagatattataccgatgctgagatcttagagcagattacgaagggaggagcggacagatgaaagaatttaaaggaagaatcgtagcctccggaactgtaacagccaaggcactggtatctcacgggggtctgaacacactggcatctttccagaaggcattacagttcggtgataaaaaagcaacctgcggagatcagaataatcccgacctctatggtaaacagatggcgggcaaagccctgtgcctgccgacgaccataggatctaccaccggcggactggtactttactgtgcctgctccatgaacagacagccggcatgtatgctgttttccgaacctattgattccctggcagcagccggagctattctggcagatgtgtggcttgacaatgtgcagatgcctgttattgacagcctgggggaagagttcctggaatatgtgaaggatgacatgaatattaccgtaaaagaagacggtacggtagtagtggaatagttcaaatagctttaagaacagctttcgaaggaaacttcggaagctgtttattattttatgaaaaaacttttatggaaaaacgttgaatgaattttaaaaatctgatttgggtatagaaaccataagttagtcatgcaatggtatactgaataggtatcctcctgcagaaggaggtcctatgccgaaagaagaaaggaaaaaggggacacatttaacttgggatgacaggcatgaaattcagaagggactgaaagaacatcgtacctttaaagagattgcatacattataggctgttcacttgatacggtttccaaggaaatacgcaggcatcgttatcataagttgcgaaacagggatggtatacttcatgcaagcccaaaccggtgtaaataccgaaacagctgcaggcgttgggatgtgtgtaaaaagaagaagggacataagtgcagaattccatgccgggagtgtatcagctgtaataagctgtgtcctgactttgtggatgcaccatgcccaatagaacacaaggcgccttatgtgtgcaataactgccccaagtccttcagctgtctgtttgataagtacctgtataacgctgattatgcccataaggagtactgtgaaacgcttaggaaatccagacagggaatagacatgaccagagatgaactggcagcattggacagtcttgtgagcccgctgatcaggaaaggacagcccctagcacatatcctggcgcatcatgcagaagagattccctgtggggaacgaacgctttataagtatatcagtgccggctatctgacc

SEQ ID NO: 11366 - DNA, 1096 bp, Unknown
  gut microbiota DNA sequence
ccctgactttgtggatgcaccatgcccaatagaacacaaggcgccttatgtgtgcaataactgccccaagtccatcagctgtctgtttgataagtacctgtataacgctgattatgcccataaggagtactgtgaaacgcttaggaaatccagacagggaatagacatgaccagagatgaactggcagcattggacagtcttgtgagcccgctgatcaggaaaggacagcccctggcacatatcctggcgcatcatgcagaagagattccctgtggggaacgaacgctttataagtatatcagtgccggctatctgaccgcaagaaatctggatatgcggagaacggtaagatatcgaaaaagagtgagaagcgttccaactccaaaaatcagctatcgtaaaaaagaaggacatcattattcagactatcttgattttattgcgaaaaacgaaggcatacgagtggtacagatggacacagtggaaggaaataaaggcgggaaattacttcatacgctgttatggccggaaaacaatctgatgctggcatttctgattaaaaccaaagaaatgaagaataccgtagctacttttgactggttggaagagacgttgggaagtgaaatgtttcgggaactgtttcctgtaatactgacagataatggatgtgagtttgcagatccggagttgtttgaaaaaggacatgacggaaagaagcgtaccagactgttttattgtgaatcgagacattccgagcaaaagggagaactggaaaagaatcatgagtacataagatatgtactgccaaagggaagttcgtttgatggattgaaccaggagcaggtgttacgtatggtaaatcacatcaataatacaacaaggcctaaacttcatggttcgacacccatgaagaaggccctgaagtcatttgacaaaaatgcaatggaaaagcttggactggagatcatcccacccgatgaaatctgtctgaagcctgaactattgaaataaataaaacaggcaggaggatacagaaaagaataaacagttgatggcaaccagaagttactcgtgcaaaagacttttggaggcttc

SEQ ID NO: 11367 - DNA, 1660 bp, Unknown
  gut microbiota DNA sequence
tgaaccgggtaacggagactgcggatgcaaagggtgcggtacagaagaatacttacgacggagcagaccggatccttaccgtcacggaccgtctgggcaatgcagagagttatacctatgacccggtgaagcagagcatggtttcggctgctgacagagagggtaacgtgacttcctatgaaagtgacgtaaacggaaggatcacgaaaatcacctatgcggatggtgccacggagacttatcgttacgatcatctgtccggactcacggagacggtcgatgcgctgggagccgtaaccacatacacctacgatggcaacggcaatgtcacgaagatccgccagaccggcgcagaggacctggcaagagagtatatctacacttatgatgcaagaaatcttctgacagagagtacggatccgctggggaacactgtccattatacctatgacgcctgcggcagcctgaccgctgtgacggatggacggggaaataccaccgcttatgcttatgatgcactggcgagactgacgactgtgaccgatgcctgcggcggtactacggcatacacctatgacaaagagggcagagtcctcacggtgacggcaccggagggagatacgctgaaaaatacctatgatgccatcggccagctgacagcacagaccgatgcgctgggaaatgtgacggcctacagctatgaccggatcagccgattgcagaccgtgacggatgccctgaagggtgagaccggctacacctacgatgcggacagcaatcttacacttacgaaagataccatgggaaatgcccatgcctataccgtggatgcggaaggaaatctcctgaaggagacctatcctgatggcgagacagaccgctatacctatgacagaaacggaaatgtggcaacctttaccgaccgatacggtgtcgtgaccacatttaccctggatgcctgtggcagaatcgtgaaagcttccgatacggcaggcaacgagatgacctatacctatgatgcggcaggcaatctgacttcccagaccgatgtactgggcagaacagcctctgtgacgtatgatgctttcggcagagcagtctccgtgaccggtatcgacggcgtgaccacccgttatacctacgatgcttccgacagactgcttaccgtcacggacggggaaggaaaggtaacatcctacgcttacgatgcggaagggaacctgatccataccacagagccgggcaaggcagaatatgcctatacttacgatgccctgaaccggctgacccggaaagtagatccggaaggagctgccacggaatttttctatgacaggaacagcaatgtgatctccttaaaggacggcaatggtgtggccacagattacacctatgacgccctgaaccggctggctgcatacagggacggcaacggaggcacgactgcctatacctatgatgccctgagtcgtctgactgccattaccacaccggaagggctgacggaaagctatgcgtatgatgcggcaggcaacctgaccggcgttaccgatgccctgggacagaccacgacctatggatatgacaagctgtaccgtatgatcacaacgacctctcccatgggagccgtggagaaatacacctatgacaggcatgatgt

SEQ ID NO: 11368 - DNA, 3587 bp, Unknown
  gut microbiota DNA sequence
actcttcgattcagagctacgccaacatttatgaccagaactggctgatgaagggtaatgttatgatcgccccgggcgttgagcgggtggacaccctaaaaaccgccgatggctatgaaatgaagagcatctggagccggaacgatttgcgcgacacggcgatcatgaagctctccactgcaacaggctatatctacggttacgtacaggatttggataccggcatgtggcagtacattattttggactttgcaacaggcgaaaccgtcttcacgatggatgtgtccaacaaatacggctacaataatatggccatcggcatgtacaccggcagcaacggaaatacgctctactgcccgacaggctatctggaactgctgcgtttgcaggatcgctttgtgtacctgcccgagcttccgtaccgtgaggttgatcttgatcaggtggcaagaaatgttctttcgcaggatcagtttgagcaggatggcggtgaaggtacggttgcaagctggcacaacaccgcgaccatctgcaacgtgcatcccaacaccatggtagccttccgcatgaacaacctgtccggcagtgcctccgatctgacgctctacgcctatggtgcagacggcaagctggaaaaggttggctctgaactgtggtcgctcacagacgagaccggagcaaatgtgacggagctgacagacggcgtgctctatgagctgcgcgtgaccgtctccgacggcggtgatctcgacctgagcgaaacagaaaaagaaatcaagctatctgttgtacttggaaaataaatcagtttgaagataaatcagttttgaagacagctatcatttaccggatttttatctgctgtaaacttagatcgtagatgcgatgatctgcatcctgccctgtaattctactttgccgtagccgtcgggcaggatcagatgatcgcccttttttaaatgagtaccgttcagggtgccttctccctttaccacgctcataaggacgaaaggcttatcctgccaggtctccacacggtgttccacatcaatgcggtatacggtgtagtaagggcactgaatcagctgctgaatggcatcgtccttcttctcggtatgcaccacactgttctctgcggattttgcgggaaccgtgatcacatcgatactctgtgcgatgtgcagctgtctgggcttgccgttactcagtcggtcataatcatacacccggtaggtaatatcgctgctctgctgggtctcaagaagcagtgtaccgcccttaatggcatgtacggtaccgggatcaatctggatgaagtcaccgggcttaatagggatctcacggatgaactttttccactttccttcctggatcatctgctccagttcttccctggtcttcgcgttgtgtccaaccaccagcgtagcattttccttacagtctaagatgaaccagcactctgttttgcccagggatccgttctcatgtaccttcgcataagcgtcatccggatgcacctgaatgctgagatcgtccttcgcatcaatgatcttgaccagcagagggaaacgatccattcccgtgtttccgaacagctcggggtgcttctcccacagttctgacagcttcattccctgaaaggctccgtttctcacggtaccatctccactcggatgggcgctgatgccccagcactcgccgatgtcatctccttcgatggaataaccaaattctctgcttaacctggtaccgccccagatattgtgggtacacaccggatttaaaaatataatatctttattcatgctcctgttcctgctttctttgaatctgtccgtgatacatttttatttatactaatagctcaacattacggtgctgtcaatcatttcgtgttaccttcttccctcaccccggacacgatcaccgacaccagatagaactctgccttgtcttccgcatgggtctccgtgatctccacatgtacccggtgttccccatagggcaggtgctctgccaccgttgtcagctgcattttgtctccccaggtctcatcgaaggttccgtccaacacgcacgccgtctcagggttctcatccaccactgctgtggcaatgggtgcaggtccgtccttcactcggcggtattgcacggcggcaccggtcccccggaaagtgaactccagataagctcctttttccccggcgctccatccgtttcggaaaatatccgtgatatctctctgcggtgtcatatcttcttcaaaaccgctcttctccggtgtggaattaaaatattgtagtctcacgcaatgctcataggcattttctgtcagcggagccggaaaaatttcctgcggctcttgcgttttatcatggattaccttttccaggaaattcgtgatcacagatgccatgaattcatgaccaagatcattgggatggagaaaatctgccgtaatcttctctgccggcagtcttccggccgccacagcgggatagatgctgttctgcatactgatgcagggcagatcataatgtctcccgatctgcgcatgatagtatgcagcacttttaccagtatcataatagacattatggatcagcaccattgccggtgcgctcgcactgccataaatctgcctcaccaggccttcgtaggtctcgcagaaatgcggcgtactgtgatcgttcacggaaaactctacaaataccagatccggcagccgcggaagcaggtcttcctgtactctcgccgcgccgaactgggaatcggtagctccgattccggcgttcacataatcaaattccgtattgggaaatacctttttcagccagccaaacgtccttgccgcataacatttttccggatccgtagcggaaaatccctgggtaatggaaccgccgataaagcctaccgtaagccgctctcctttggctgcacgattcataaaacctttcagtctggtcaggttgccccggttcaggattccggcttctttatcaatgatgttccccgcactcttgcggttctcatagatgctgttttccagagtgcaataacgtttcgccttgtttttcagagtcttgctgatccggaaaatctcttccggccggtatcccctggattccagataataaataccactgtaaagtttgatgggaacatccggatatttatccccgatcatggcttcaaacatgatcataatgtgaccgatcttctccggtgctgcttccacgtgattgtccaatagcaataggaactcatcctttttcaaatgacacaccatttcctgtcctttcaggtgtttttgaatgtgcgtccccaaatagtacaggaggctgtttttcacttcctcgctcatcttcgcggaaatcttatcgtaatcccggatgcccagaaatacctctgcatactgaccgtcctgccagggcaggatctgttccagttttatcgaaaagctttccgttgtctccactctggcctgcaattcctctttttccatcatacgctgtctccatcacttaaaaaggacccgctcatcgcgggtccctccagactgtagacaaaacgcttttggtcag

SEQ ID NO: 11369 - DNA, 5246 bp, Unknown
  gut microbiota DNA sequence
agatcaatactgtattgcctgattcgccgctggtggcacggcgggcaagacggcaggggaaaaaggtcgtctattatgggcattccactatggaagattttaagaattcttttatcggttccaatctggcggctcctttattcaaaaaatggatccgccattgttatagacagggagatgtggttatcacaccaacggaatactcccgggaattgttaatgaaatatgatctgcatcgggagatttacgcactgaccaatggtgtggacactgaatttttccacaaaacagagcaggcaggtggacgattccggaaattttttcatcttcctgtggataaaaaggtcgtgatatccgccgggcatctgattcacagaaaaggaatcgaggattttctggaaatggcaaaaaggatgccagacattatttttctatggtttgggggcgggaacaatgcattgattccggcagagatcaaaaaggctgtggcagagaagccggaaaatgtgatctttgccggtttccaaccgtccgggatcctgcgggatgcgtactgtggtgcggatgcatttgcttttttcagttatgaagagacggaaggaatcgtggtattggaggcattatcctgtgagattcctgtgatcgtgagagacattccggtgtatgaagggtggcttaccgacggcgagcaggtgcgcaaagccagcaatccggattcctacgagcaggcagtccgagacatcttgtatgaagaaccgctggaaaaagtaagacgcagaatccgggcaggcagggcactggcggaggaacacagcatgcgggcgacaggtgagaaactgtatcagatagagcagaagcttttgtagacatccctcttgcaaattcagagtctttatcataaaatgagagtaccttacaaaggaggtgcttacgatgaaccttgtaattactatcagtcgaagattcggaacaggagccagtctgatcgcacaggagctgtctgagaagctggaggtgccggtatatgataaggcgtacatagagcatgaactggatggtgacagttatgctacggaagcggaggttattaaggaattggcggaacatccctgtattattctgggacgttgtgcatccgagatcctgaaggatcagccgaatgtatttaacgtgtatgtgtgcgcggataaggaagatcgtattgaacgtatcatgaagaaggaaagtcttccccacgatgaggcaaaagaaatgcttgagaaaaatgatgcggagcgcgccgactattattatgaaaataccggtaaagtgtggggtgatgtgaacaattatcatatgatcctcgataccaccaaactgggaatcgaaaattgtgcggacattctgatccggtattttgagagagtggaaattatttgatagtccggaatgcgaatggacgttacgatttcgagagtatgcagtacgaagaaatcgtttaggatataaatagagaatagattataaacagatgcccgacacggacatctgtttttttgtgaaaaacattttaaacatagtaataaaattaatcaattataaaacattataaaattaaaagtatggttttaaatataacaaaaaatgatatatacaattgaaaattttaatcaaataataaaaaggaataatcactgaataaaatagcctttttcttgaatttataggtatatgacaaaaatgtcacattaaaatacatcaattaacaagataagaatatatcttgcttacagaaatcatgagtgttaagataatgcaatcagataagtgaaaatagtaaaaacagcaggttttgaaaataaaaagtaatcatacggcaggaggatttccatgaacagcgcagacattgcagcaaaatatcagaaaacttattttatgccccccgaggtgacctacgactgggtaaaaaaggacagtattaccaagccccctatctggtgcagcgttgacttaagagacggcaaccaggcattgatcgatcccatgagtctggaagataagctggaattcttcaagatgttggtaaagatcggtttcaaggagatcgaggttggtttccccgcttcctccgacactgagtacaactttatccgtgcactgatcgagcgcaacatgatcccagaggatgtgaccattcaggtactgacgcaggcgagagagcatatcatccgcaagaccttcgaagcagtcaagggtgcaccccatgcagtaattcacctgtataattctacttccgtagagcagagagaacaggtatttaagaaggacaaggaagctattaagaagctggcggtagacggtgcccggatgttaaagaatctggcagatgagactgaaggtaacttcacctttgagtacagcccggagagcttttcccagaccgaggtggattatgcattggaagtctgcaatgcagtactggatgtatggaagcccactgctgactgcaaggcaatcatcaatctacccaccaccgtacaggtggcaatgccccatgtatttgcgtgtcaggtagaatatatgcataagcatttgaaataccgtgataatgtagtacttagcgtacatccccataacgacagaggctgcggtatcagcgatgcggagttcggcgtactggccggagcagaccgtgtggaaggtactttgttcggcaatggcgagcgtaccggtaatgtggatttggtaaccgttgcacttaatatgatgtgtcacggtgtggacagcggactggatttctctcatattatggagatccgtgaagcttatgagaatttcaccggtatgaaggtgcatgagagagttccttatgcgggagatctggtatttaccgcattttcaggttcccatcaggatgccatcagcaaaggtatggcatggcagaaggaaggcaggaccggcaagcgctgggatattccttacctgcctatcgatcctgcagatgtgggaagagagtacgaatccgatgttatccgtatcaacagtgtatccggtaagggcggcgtagcattcgtattgaaacagcagtttggtttctcactgcctgcagccatgaaggaagaagtcggctacctggtaaagggtatctccgacagacgtcatcaggaattacttcccaaggagatctacgcgatcttcgaggaaaattatatttatccccgcagtatcttcaatgttccggagtgtcacttcaagcaggagaacggtattcaggcagaagtgaccattgatcagggcggagcttccagaaccattaccaccatgggtaacggacgcttggatgcagtaagcaatgctattaagacatacttcggtattacctatgaattgtctgtttacgaagaacatgcgatttccagaggttccaactctaaggcagctacctatgtaggcatcgtccatgacggtaagttctactggggtgtcggcgtggatgaagatatcatcaagagttccattgcagcattggtatccgctgtgaacaagctggcagcagagcagcatatcacctccggtagagaggagcggattgtggagatcatcagtttcatccagaagaactacgtggatgtaacactggatatgctggtagataccttccatctctccaaaccgtatttgtccaaatacattaaggaaaaggccggcatgaccttccaggaggttgtaagggaagaacgcatgaagaaggcaagaatgctcttgaaggaaaccaaccagacagtagagaccatagcagctaacgttggttacgagaatgtggagcatttcaatcgcctgttcaaaaaggcttatgatatgactccggtacagtatcggaaacagagtgcggaataacaggagtctattcagcaaattaaatttaggaatggctttttaagtgttgattatcgggtaaacaaagtataacataattttatcattgtataaaaatatgctgaatattgacaatttatgacagtaaagttatactaaagtagtatgtggtcatagaataagaccacaacttatggagggacaagataatgaataacagagagaaagcaaaggcagtacaaaagaaattcaaccagcgactgggaatttattacggcgtgatggcagcaggtgtcattgtggcagccatcggactgatgacacagatcaacgtattgaccctgctgggagtggtagcattttttgcaggattagtgatcctcagctgggtagacgggtataccgagtatgcaaaacgtgttatgacagcaaaagctctgatgggtgaagagatgcccgaggatgtggtaaatgccggtattgaactggtaaagaagcaaggtggaagcctgtctgcacttaagagccagaccagagagttctctcatattttatatcatctgtgccagggtattttcaccggggcagccatgctggagaagatccccggactgaagtctgtatccggtattgcacagagtatgatcaagaaagcttacagaagaatcaatctgttgttagagggttatctgtttgcaaaatacggcgagatgaccaaggagacttattatgacggcgtatctctgttgttacaggatggcaggacttttctggtaaaatccgtaaaagatgccgctgtatctgaattgctggtaaccctgagtgtgatcggtactctggtatttgtagctttgggcggcatactgaaaaatgttgtgtttgttgtattgggcattgcctgtgtggttctgtatgtggtagtaggcattgtatatgacagcaacaaagatttcgatatgttggcaagctatattgagtatgcttccacacatgaagtcaacgaagagtatcgtaacagcctgctggcagcgacggatgccgctactcaggtgaacatggtagccggtgcactgaagaaccctgccgtaaatggtattatgggcgcggccggagcagcagagaagctgtttggaaataaagatgagaaataagaattaggccatacccattcgcagacactgaagtgcctgcggatgtacggttgtcgccgtataaatccaaaaagaaagatacgcctttgtgagcaagttccaaggagctgcgccatgcgcattcgtagacgcgctgcgtctacttcatgtacggctgtcgccgtataaagacaaaaataaaaatacatccctgtgagcaagctctcgggaactgcgccatgcacattcgtagacgcgctg

SEQ ID NO: 11370 - DNA, 3341 bp, Unknown
  gut microbiota DNA sequence
cacgagcaagctctcacggtgttggttctttttatttttgcatggcttgtagcttttaacataatgacaggtctgaaaaacaaaaataggtagaaatatttgtttttttcgattatgatgaaaacatagagcaagagaattcgtatcgcggcatcggccggagcgacaagagtaagaacatataaatggacggggcttacacagtaagcagataggagtagaaaatggaaatgaaagagacgattctgaagactttcgcagaagtatttggagatgcagagggtgccaaggcttattttgcaccgggacgtgtgaatctgatcggtgaacataccgactataacggcggacatgtattcccctgtgcactgaccattggtacatacggcgtggcaagaaaaagaaacgacaataaactgcgtttttattccatgaatttcgaacatctgggtgtgatcgagtcttctctggatgatctggtacccagcaaggaagcgaattggaccaattatcccaagggagtgatctgggctttcggtgagaagggcatgaaagtgacttccggtatggatctgctgttaaacggcaatattcctaacggttccggactttcttcttccgcttccgtagaagtgctgatcggctacattctgagggatttcttcggctttgatgtgaccaatcaggatctggcgctgatcggacagttctctgagaacaaatacaacaaggtaaactgcggtatcatggatcagtttgccattgccatgggtaaaaaagagaacgcaatttttctggatactgcaactttggagtatgagtatgcaccgatccatctggagaatgcgaagatcgtgatcgcatgcagtaataaaaagagaggcctgggagattccaagtacaatgagcgccgcagtgaatgtgagactgcactggcagagcttcagcaggtagtgaagatcaagacgctgggcgacctggatgaggagacctttgagaagttcaaggctattatcaagagtgatgtccgcagaaagcgtgcaaagcatgcagtatatgagaatcagagaacgatccgtgcggttgaagcgctgaagaacaatgatgtgaagctgtttggtgagctgatgaatgcatcccacgtatccctgcgggatgattatgaagtaaccggtattgagctggatactctggtagaggaagcatggaaggtagatggtgtcattggatcccgtatgaccggtgccggctttggcggatgtaccgtaagcattgtgaaggatgaagctattgatacctttatcgagcaggtaggcaaagcatacaaggaaaagatcggctatgcggctgacttctatgtagtagagatcggtgacggccctcagacactgtaaggagaaaagaaaatggatattcaggtattaattcgtaaattagtatcctacggagtacagacaggactggttccggaggaagatgtgatctataccaccaaccgtctgttggagctgtttgaactggatgagctggaagaccgtgacaatgtgaccatgcgcgaggatgaactggaagaggttctgaagggcatgctggattacgcttatgaaaaaggtattctcaaggagaacagtgtggtataccgcgatctgttcgatacgaagatcatgggactgttgatgcccagacccagtgaagtgatccgtcatttccatgagctgtacgaacaggtatctcctgaggcagctaccgactattattataaattaagcagagattccgactatatccgtcgttatcgtatctgcaaggatatgaaatgggtggctcccaccaaatatggcgatctggatattaccatcaacctgtccaagcccgagaaggatcctaaagctatcgccgcagcaaagctcgcaaagcagtccggttatccgaaatgcctgttgtgccgcgaaaatgagggttatgcaggccgtgtgaaccatcctgcccgtcagaaccaccgtatcattccggtgaccattaacggcagccagtggggattccagtattctccgtatgtatattataatgagcactgcatcgtatttaactctcagcatgtgcctatgaagatcgagcatgcgaccttctgtaagctgtttgatttcgtaaagcagttccctcactattttgtaggttccaatgcggatctgcccatcgtaggcggctccatcttaagccacgatcatttccagggcggccattacgagtttgccatggcgaaagctccggtagagagaacgttctccgtagccggtttcgaggatgtggatgccggtatcgtggcatggcccatgtctgtcatccgtctcagcggtacggatactgaccgtatcattgcactggcagatgtaatcctgaacaagtggagagaatatacggatgaagaggcatttatctatgcctacaccgataacgagcctcataacaccatcactcccattgcaagaaagagaggagacaagttcgaactggatctggtgctgcgtaacaatatcaccacagaggagcatccgctgggagtctatcatccccatgcaaagctgcatcatatcaaaaaagagaatatcggcctgatcgaggttatgggtctggcagtactgcctgcccgcctgaagggcgagatggcgcatctgaaggaagcaatcctcgccggtaaagacttaagagctgatgaggaactggcaaagcatgcagactgggtagacgagttccgtccgaaatacgatgccatcactgctgagaacatcgacggtatcgtagagaaggagatcggtctggtattcatgcaggtattggaagatgccggtgtctacaagagaactgaggaaggccagaaggcattcgatcgttttgttaagagcttataatcatatttttgttgaatgtttgttgtacatttgttgcgaggaaaaggaattgtggtgacacaattcttcagactgtagacaaaacgcttttggtcagcactccagaagcgtttttcttgttttcggttcaaaaagtgtgtacttgatcaataataaacacttttgggctcccctttttcccttcctggctatcatctttgccagttttttcagattcatgcaggcaaacgtaagcccgactttcatttccatccgggcttttcctatcatctgtgtatagcggaatccgtggttttcttttgctgttccgaagaggcgctctatggtctctttccgttgcgcatacatttccttcatcccaatcgtatgccggatatcctcacacttttccatgtacggctcccagatatgccgggtcactaccttcacatg

SEQ ID NO: 11371 - DNA, 1518 bp, Unknown
  gut microbiota DNA sequence
ttcctgctcaccttcatataaggaaactgaaaaatctcctatattgataacgacatccatatctatctgtgcatttgttgcatttggcatttcatcaattttgttccttatagccgctgctgtttcttctatacttttttctccgttaaaataatacaacgcctcttcctgcgtaatccctatgaaaggaaggtcactgcgctgcattaccttcgtattatttatcatctcccttacatcctgtatatcctcatcttgtgccgcataaacattttcataggtaccgccaatttcgtatgtcagaataggaagtttctctctttttccatccgatgtctgataatattcctgctttctgctatcactaagctgttgatccagcacatcttgcaatattgagaaattccaattgggagcaatcgttttctgtccttcctcagtaaaatagctttccacaaacttccatgcttcttctttgtgcgtgctttgactgttaatggcgaaacagttgtcaaaaataaatattcttccctttccctctgctcccggaaatcctgtatagactgcatcctcaccccatacggattttttatataaatattgttgcatgtcacctatgcactcaagattgaatggaatttttccttcccgcatcaaaaggtcattcgtttgaaacatcgcctgttgcggtaattgttctgcaatttttatatattgttccaatctgttatcttccgtttccccggaatatcctccgcagattgccccttcctgtaaaaataaataccgtgaaatcataggatcctcttcacattcccgaacggcccgcaaggcttcctcgaaggtaaaattttctttgttactgcaccatttttcttttgttatcaatgtatataacacaaaattcgttggcaacatatacaagccaccatccgctgtcaaaacctgatacgcggaatcaacgatgtcctcttccccaatcacatcacttttctccagatagggaataagattctctattgcgcccttttctctaagcacttccacatccatctcatctgtcgaaaaactaatgatatcaggtccttttcctgtcaaaatatcatcatacaaacgactaattccgtcgcttatattttcttcgtaataatcatgtattgtgattgttattctgtcatttttactattaaaatctgctattgcttcctgtaatgtcgacgctccccctatatctccaagtatgatctccgttttaggttcttccagcacaattgtagcagtctctttctcccatgcagatgttttcgtcccggtgtctatttctccacatcccattaacagcaaagatgatactgtacctacaagcaataatgctattgttttaaaagttttcattcgtaatcccctcgcacgtcatcgcaatatcattctttttccaacaggtaaaaaaacaagcactgctgccacaacttcccactgtataacttaacttgtcttccgtaaattcagaaaaggacg

SEQ ID NO: 11372 - DNA, 680 bp, Unknown
  gut microbiota DNA sequence
aataccgacagggttccaaacagagaatttgtatgcaaaatgtatgcaaatatgatcagagattgctcaaagctcctttctatgcgggtttcagaattgcgtaaaggttcaagtccggccaccagcatcaatttaagagtaggagaaacgttgattttacagcgtttctcctatttttgaatttatcctctataaacaaacaagaatgtcggcattgctgacatccttgtacaatgttgggctagttccattttaattccaattctctgttttgctctttgcaatctgacaaatacagattaattagtgtttgatagggaataccacatttttctgattttgccttgaagaaatcaatggtatcaccatcaatgttaatagtaatctgcttttttacacgctttgcatagggattttttctgggatttaatttttcgatatcgtattccttttccattgacttaccacctttcgttaattttgtagtattgagttgtttcattcttggttgcttttctggcggagataatacgaataacatcatccataccgcgataacaatgacatacaattaacatttttgcgtgatcgcttagccccaacatcataaacctttcttcctcttgtgaatgattgggatcgtcaaacaaaatggcattttcatccgcaaatacagtgct

SEQ ID NO: 11373 - DNA, 2020 bp, Unknown
  gut microbiota DNA sequence
gtgcattacatggtggatgtagaggacggacagaagaccggatttttcctggatcagaagaataaccgtgccgccattcatcgtttctgtaaggataaaaaagtgttggactgcttcacacacaccggctcctttgcattgaacgcgggaattgccggagcgaagagtgttctgggtgtggatgcttctcagctggctgtggatcaggcaacggaaaatgcgaagctgaacggactggaaaatacggtaagcttccgatgtgcggatgtcttcgagttattgccggagctggaagcgcagggcgagaaatatgatgtggtgatcctggatccgcctgcttttaccaagtcccgcaattccatcaaaaatgctgtaaaaggatatcgtgagatcaatcttaggggcttaaagctggtgaaagacggcggattcctggtaacttgttcctgctcccatttcatggatccggagctttttgccaaaacaatccgggaagcttctcatggtgcgcataagcgtctccgccaggtagaattcaagacacagggcccggatcatccaatcctgtgggcagcggacgagagctattacctcaagttctacatctttcaggtcgttgatgaaaagtagaagtggaaaatagtgaaaaaatagtgaaatattaatggaaaaagttctcctttttggatataataatatttgaaagggaggcttttttatatgattaaagtgactttaacgaatgaaattttaagatatattatagaaattgaacagaatagatataaagtatcgtcagtaaagctctccaaaacagttatgaataagcttcgcaaaaattcaaagaaaaaaagttcgtatgcctcgaacaagatagagggaaatcccttgtcggaaaaacaggtgaacgaagtaatagaaagtgatgaaagaaagcattatctgaaaccggagcaggaagtccggaattattttttggcgttgaattttctcgaagaaaaggtgaagaataaagaaaaattttccaagaaacttattttagatgtacagaaactggtggaaaatggggcgtccaaagaaaaaataggtctcagaggacctatgccgcccggagttctgtttgcagtgtatgattccaaaacagggaatccggattatattcccccggaatattgtgacattccgggacttttggatgaattagtggagtatgtaaatactacggatgatcaccctctgatcgtagcagcagtggcgcattatcaattagtgacaatacatccgttcgaagacggcaatggcagaacagcaagactgttatccggttatattatggacttgaacggttacggatttaatggaatcggatcgttagaagaatattttgcatacgatatagatgaatattatgaatctattcagatgggacttccggcattgtattattccggaagagagaatcctccgcatccggagatctggattaattattttctgcgaatggtgaaactgtattcgggaaaagtctgtgacttacagttggcttctgaggaggaagattttgcaggaagtctatcttttctgaaagggaaagaaaaggagctattattgtttttaatgaaaaattatcggggagagtttactccgattgaaattagcagagaattgtcggtaacaaataaaacggttattaacagactgacgatactggtaaaaaatggatttgtgattcctatattagtcaataagagaatccgatcgtatgaattgagtgaatttaccaaagatcatgagaagaaaattataaaagctatcagctaaaagctttcagctttcaaattgttgacgaaaaataacgactggaaagcttatgggggaaacggtatgtcctatttgaatggtaacagaaaactaacaaaggactaaccacacggcagagagtgatcgataaaaatcggttgctcttttttcattgtgaatgagcttgcatgtgctataataaaacaaactaacaaatcgg

SEQ ID NO: 11374 - DNA, 1887 bp, Unknown
  gut microbiota DNA sequence
tacaatgcgtgtcccactttgtcaacacgttttttgatatttttgtaaaaattttgcatgcaattagaacaataatagcaaaaagcaggaaattacagggctttctttacactgatagccttcatggggcacatttcctgacaacagaagcaggagatgcagccttttctcttgaatttcgccttgcgattttcgattctgatgacatgtgccggacagctttccgcacattttccgcatcccacgcatttctccggggtcagctgcggataggatttcaacagtcgggaagccacgaacatgaaaggcttgcgtaaaaatttcggcacaccgttggtaaaatctaattttatggtatccggcttctgaaaaggagataagccttccggaaccggatctcccacaagcgccaactccttagggcgagccagacctttttccagtgcctgacgcagcatgacgatctctgtaggttctaatcccataagttttgcggcgaagcagtcctgggtatagaaatcttttgccgccagcagcatatgcaaaggatgcgaagtgccgccggtgggaccgttaccctccatggcatcaatggcgtcaatgacggtgagattgggagctacggtctgagccagttctaagagcatgttggagaaatcttcgatctccggccagcggtagtgcatctggggcttttccagaccggggatggtgccgaagagattcttgatgccgccggaatagccggtcatggcatgggtcttcagtttacagatattaatgatataatcggcttccacgataggagtgatcaggtggaaactgtgatttttaaatcctgccggacaatttacggtctgtgcggaaaagtccatgttgagttcagcaccttcgcccagagtatccatgccgcatacgtgatatacgtgtttcatggcttcggcattgtagagaccgccggaactttccgcaatggtgatgtgctgcatgccctgctctcgcagccacctgatcacagcttttatgaccagagggtgggtcgtggcgggaaaatccggggatttcgccatgacgagattcggcttgatgacgatcttcatctccgggcgcaagtctgcggcgatgttcaaagcctccatacttttgcagatggcgggatagatcagttcttcgttatattccggtacgatgtgtaatgtctgtatcataatgacctctaaagtggtttattttctatatagtacatgaatttacttgttttttcaatgcttccgtgctatactacgaaatgttgttgagatttgatggaagaaatcagaagcgcatcgcaatgatttctttttttgtgctaaaaaggagtattttgtgagttattttttggaaaatgaagaagtggaaaaagtagaagaggtaaaggagcaggacggtatcgcatcgatcgagccgttgttggataaccgtatcgtccgtgcgattcgtgagatgggttttgagaagctgtctccgatccaggagcaggcgattccctatttattacagggtgaggacattatcggacaggcacagaccggaacgggcaagactgctgcattcggcattccggcgatccagcacatcaatccggatgtgaaaaagttacagaccattatcttgtgccccaccagagaactggcgatccaggcagcggaagaactgcggaagatcgcaaaatacatgcacggcattaaggtgctgccggtctacggcggacaggatatcagccgtcagatcgcgggactgcggggcgtgcagatcatcgtaggtactccgggacgtgtcatggaccatatgcgcagacgcaccattaagctggatctggtgaacatggtggtactggatgaagcggat

SEQ ID NO: 11375 - DNA, 5288 bp, Unknown
  gut microbiota DNA sequence
aacatgggcttccgtgaggatatggagctgatccttggtcagatccccggagagcaccagaccgctctgttctccgcgaccatgccgaagccgatcctggagatcacagaccgtttccagaacgatgcgaaattagtaaaggtggcagcgcaggagctgaccattcccctggtatcccagaaattctaccgtgtgaaaaatcaggacaaggatgccgcctgcgtaagactgttagagtattatcagccgaagctgaccctgatcttttgtaatacgaagaaaaaggtggacgagctgtcggatttattaaaggagcagggattccaggcggaaggactgcatggagatctgtcccaggcgcagcgtgacgcggtcatgaagcgtttccgtaacggtggaaccagtatcctgatcgctacggatgtggcagccagaggtattgatgtggatgatgtggaagctgtcatcaattacgatattccgcaggatatcgagtattatgtgcaccgtatcggcagaaccggccgtgccggcagaaagggcagatcctttacttttgccaacagcagggaaatctacaagatccgcgagatcgagagagtctgccacaccaccatcacggagaaaaagcttcccggagctgcgaaggtgctgaaagcgaaagcagacaaatatctgaacaaggcatgggaattgcatgagcatgaagacattgagctgatgaagagctttttacagcgtaagatggaagaggaaggctgtgatgcactggagctggcagctgccatgctgaaattacaggtcggtgacaaggacgaggagatcgccgcagatgaatatacaaagcgtggcaatcgtttcggggacagaggccggtccggcagaggcgatggtgaaggtcgcagcttcggcagaggagacggaagacggaagcttggccgtgaagacggggaacgcagaagattcggccgcagtgacagagatcgcagagacgatggcagcaccggtttcggtgaggacagaagacgccgcagagatgaaaaccgtgaggatggaagaaaatggggcggctgtgacaaaaagacggctgaccgcaaatactctggggacagagcggagagagaagcgaaaaagagaaagaaacgggaagagccgggcatcggtaacagcttccccaagagaaaacgatcttaatttaatgagaaaacttgtagatttgccgcaaaagccgcagttgtgcttttgcggcaaatcgtgtatagttagggaagaatgcataggcaataacagaaaggtctgcggtatgaaaacactgaaaaaacagataccatatattttgctgggagcgacgcttctgctcctgcttggcttgaatatcatcagtcaggatcactggctggattcagatatggcggcggagatgatcttttcccggatcctttccgaagaacaccacattttttccacgacaaactggtattattccacggaattccgcgtgttgtatacacagctgatcatgggaccgctgtttcgcatctgcagcaactggcatgtgatccgcacgatcacgaacctggtattttatggattgatgctggcttcctattattattttatgaagccgttaaaagtatcccgcggacttacagtgttaagctcctgtctgctgctgttgcctttttccgagactatgatgacgcatatgcagatgggtaatacctacatgtcccacgtgatcctggtgctgtggttcttcggtatgtatctgcggttgtgtagcggagaatatcatgcaaaacgcaaggtcagcctgtggatattctatgtgctgcttgctatcgtctgtggaatgtccggcgtgcgttacctgctggcattgcagtgtcctctggtactgacttcctttttctatctgctgggcggtgaggaatttcagagtttccgaggagagatgacaaaggagcatttccaaactctattttctacggacaggatgcggtattttctctatagtctggcaggggcatttttcgcagtcgtgggatatggcatcaatgtagtgttcatcagtcacaaatacgtattccagacctatggcgccacgaatttcatcgcattgtatcacggtgtgttatttgaccggatccagaatgcggtggggtgtctgctgatgctttttggctatattcaggataagggatttttatccctgcggggtgttgtgacgatggcagccttcgtgatgcttggcatctacggatacgttacggtcaaaagcgggaaaatgcagcgtgtcacgggatttcgcagtctgatcacactgtttttgaaagtcagttttgtactgaatctgtttgtgtttatttttaccaccagtaccatggtgccgcggtattatatcacgatcttcattttcgccctgccggtattgtgtttttatctggaagaggaaaaaatgccctttgacagattggcggtgacggcactgcttaccgtctgcctgctccttggaacggggaaaacggtgatgtctttcctgacggtggacaagaacgagacgaagcgcccagtggcggaattccttgcggggaacggatatgatttcggcttcgctacttataataatgccaatatcatcacggagcttacgaatggtgaagtggagatcggcaatatcggagatcccgagcacctggagtatttcaagtggtcttcgcctatgaaatattatgaggaagggtatcatgccggggagacattcctgctcctgacggcggaggagtgtgcggaatatgcagaggctccggcattaaagcagggcgaaaaggtatatgaggacggcagttataccgtctatgtattcgacagcacggaggagctgatgaactgtgctgtggcgagacaataatgacagagatttagcatattgcagacgatattggcacccggcactggacgcaacgggacagaacggtttggggactggctggttggagaatctggtgagacacagggatgtcggtactttttgaaaaaggataacgtctgcggaaaggttgtaagtatgagaatcggaatgggatatgacgtacaccgtctggtggagggaagagacctcatcatcggcggcgtgaaaataccttatgaaaagggacttttgggacattcggatgcggatgtcctgctccatgcgatcatggatgcgctgttgggagcagcggcgctgggggatatcgggaaacatttcccggatacagatccggcatacaagggtatttcttccataaaattgctggaaaaagtgggcgagctgctggaagagaatcatgtgtttatcgaaaatatcgatgcgacgatcattgcacaggcaccgaagatgcgcccgcatatcgataccatgcgggaaaatatcgcgaaagccctgctgatcgatgtgggacaggtcaatgtgaaggctaccacggaggaaggactgggattcaccggcagcggagagggaatctcctctcaggcaatctgtctggtgactacgccgtttgatcttacggcacaggcgatgcagggcggctgcggaagctgcagcggatgcccgaagagctgataatttcggaaaataagaacttgacaaataggtcgataggatatagactttaattagaacaaggtctgtatgctatcgaccttttataatgtgatgagtgcaaaaaagccaataggattgcataattggcaggcgctggattaagaaggatacaaggaggaatgggaatgtatcagatgacggagacagagtacaaatttgcagagttgatctgggaggaggaacccatcggttccggagaactggtaaaacagtgcgcagagaagttcggctggaagaaatccaccacctatacgtttatcaaaaagctttgtgagaacggtattttcaaaaatgagaatgccatcgtatcttctgtattgaataaggaggagtaccacagagcccagggggaggctttcgtggagaaggcttacggcggttccctgccgaagatgatcgcagcatttatccagagcaagaagctcagcgcagcgcagatcgctgagatcgaagctatgatcgaggattataagaggtgacggaggagattggatgagggagattttagagaaggtatttgggatcgtttgtaacttgagcctggtgggaagctattgcattttgctggtgctggtggcgagactggtgcttcgcagggctcccagatggtgttcttatctgttgtgggggatcgtgtttctgcgcctgtgctgcccggcatttccgcagacacagatcagcctgatcccacagcggctggtaacggaacagacggtgagcaccgcactgacagcatccggagaaaaagcaaccttggaaaatccgaccgcggaagcaatacagatttcaggcatgacggagcagatcgatagtggcgatggcagtcagccggaggcactttcgcaggagtcctctatggtaaccggacagacaggaatgtctgcaacgagcggttcaaccaaggaaatgtttgcaattcacagcacacagatgctgaaaacactggcgggaatcgtgttaccgtacttgtggctgatcgggtttgttgggtttgccggttatcatctgttttcctatctgcggatgtattaccgtctgcgtcagccggaaaatggcgttcataaagtagaagaaggaatatgtgagattaaggggggacacctttcttttgtcatggggatcctgcatccgaccatttatctgtcgtcggagcttgccggggagagcagagaggtagtgttgtgccatgagagggtgcatttgcagagaagagactatctgatcaaaccggcagtgctttttatctgttgtgtgcattggttcaatcccttggtgtggctggcattttacctgatgaatatggactgtgagatgtcctgcgacgaaaaagtggtaaagcttttgggagaggaaagcaagaaggtctattcttatacactgttggaggaagccagcgacggcaggtggagaaaataccgtggtggtacgatctgcgcgctgttatccttcggagaggatcatgtgaagaaccggatccgtcatgtgctggattatcacaagcctccgttctggatcctcatcggtgcggtggcggtgatcgcagcactcatcatctgcctgtgcagtaatccgggaggaaaccgcagtgaggaaaaattgcctacggaagctgcgccgtctgcccaaactgcgccggtggata

SEQ ID NO: 11376 - DNA, 1387 bp, Unknown
  gut microbiota DNA sequence
aaaaattgtgccgtgtggttatgttgctatcctgaatcgtcagatcgccgcccgactctaccttgattacgctgaagccgccggtcattttcagtacattaccgttcaaatccagtgtcacagtacggttgaccgtcagtgtagagccgatatcgatattcccctttagtgtgattctggaaatactgctatctgccagtgcggaagtcagttcctgcgctgtcgtcacctctgcctcaccatttgcgatcggcagtgctgtgtacagtccgttcagaaccgctgcagcttcatttcccgatgtactttctggggaacccggaccctctgtggatgtctggggattcggcatctgttcggtttctgctgccgataccggcgtggagaccagagaaaataccatggaactgcaaagcagcgccgcatagaaccgaattttttgctttttcatgaatttttttcctcccattgttgtgatgcgtttccttttcccgtgccttgtccgcggtgttctctttcccggagtctgttacacagcacagtgatcatgactgctgtggagaaagaaattaccccaaccagcacataaccgccggcgtcttcatgcagcaggatagaaccgtacattccccgggcggtgatctgcgtctggccggctgctgtgtgcaccgttcccacaaggaacgcagacaatgctgtgcacagggcagacagccggcagatcccgcggcgcttcttccggcgatatttttcatgcacccgttttttcaccagttcgacccgcttttctgtatcatacatatcgttgaaaacctcccttcggaaagtaaagtcataaaatacatatgtccttcatctaattaggtacaaaaaagcgaaaaaactctcacctgaaaaccaaattttttcaaaaaaaaggagctgccggcagcagctccgcaaaagacaggattcagttgtgattctgggtaaggcggcgggtgatcagtttccctgccgtcaggatcagcacaggcagaatgtatgcgatatactgtatcgcaccgccataggcgatcagaagattataaattgcatgaaaagtgatggctgccccgagcagaccgcaggttccggcgatcttcagccaggtgcgctgccatacatacgccagtccaccgccgacgatggcaccacagatcacgtgcatggcacccgttccaatgccccggaaaaagataaaggaaaaatgtccggctccgttttgaatcagatagcagacattctcaaaggtggcaaaggaaagtgcaacgatgatggcagcattttttatcggcaccggttcaggctcaaatacaagaagataaaagagcagcggcaggagtttcatcacttcctctaccacagg

SEQ ID NO: 11377 - DNA, 6958 bp, Unknown
  gut microbiota DNA sequence
ctacgtaaccaatactctggcggtcggtctggtcttcatgattcttttcaaaaagactccttactccgacggtctgatcaatctgctgatccagtttttcggcggcagctccgtggatttcatcgatggaccctactgggcgaaaatgttcgtgctgtgcttttacaccatctggatcgttatgccctttaagatcctgatcctgaccagcgctctcgccagtgtgaaccccatgtactacaatgcggcaagagtggacggcacttcccgtttccggatgttcaccaaaatcacactccccatgatctctcccatggtgttctacctgatcatcaccggctttatcggtgcattcaaggcatacagtgatgccgtggcgctcttcggcacgaacttaaatgccgcagagatgaatactatcgtcggctacgtctacgacatgctctacggcgacagcggcggatatccttcctatgcttccgctgcggcgatcctgctgtttgccatcgtcctgaccatcacctgcatcaatctgctggtcagcaaaaagcatgtccactatgtataggaaaggaggtctttgtgatgtctgatattacatctgattatgaaagaatcgagaaacgcacccggatccacggcaatatccgcaatgggatcatctacttttttctgtgtctgtgggcgctgatcgtactgttccctttttactggatggtactgacctccgtaaaaagctacggttcctataatgcggaatatattccgaagtttttcaccctgtctcccactctgcagaactacgtggacgcttttaccactgtttctctgggaagatacctgtggaacactttgtttttcactgtggtcaccactgccattatgctggtggtcatcactctggcggccttcgcgtttgcaaggttgaactttgccggaaaagatctgatctttacattatttttatccctgatgatgattccgaacgagctggtggtcattacgaatttcaccactatcacgaacctggatctgcgtaataccttcaccggcctgatcctgccttccgtgaccagcgtattttatatctatctgctgcgggagaatttcgcacagattccggacgagctgtattatgccgccaaggtggacggtacttctgatctgcgatatctgcgcaaggtcatggtgcccatctgcaagcccacgctgatcaccatcgtgatcctgaaggttattgaatgctggaactcctatgtgtggcccagactgatcaccgatgatccggattactatctggtgtccaacggtatccaggagatccgtgagaatggtttcggcagagagaacatccctgccatgatggctgcagtggtcgtgatctccgttcctctggtggtgttgttcctcgtattccgtaaaaaagtcatggcaggtgttgccagaggaggtaccaaaggatgagtcaatttagcaaaaagctggcactcgtatgtgccctgggcgggctgtccctgtctctgaccggctgtcatgggtccaaggggctgccggaattcactgttccggaggaattcgatacttccagaaactatgagatcactttctgggcgaaaaacgataccaacaagacccagacggaaatctacaaaaaagccattgcagattttgaagccttgtatcccaatatcacggtgaacctgaatctatacacggattacggcaaaatttacaacgatgtcattaccaatatttccaccaatacgacacccaatgtctgcatcacctacccagatcacattgccacctacctcaccggacagaataccgtagttcctctggatgacctgtttgccaatgagaaatacggtctgggcggcacggagcttgcctatgacggtcctgccagagaagaagtcattccccagtttctgaatgaatgctccatcgacggtcattactatgccgtaccctacatgcgttccaccgaagcctgctacgtgaataagacctacgtggaaaatcttggatataccctgccggatgtactgacctgggacttcatctgggaagtctccgaggctgccaccgtccaaaatgcggacggcacctatgtagtcaacggacagaatgtactgatcccgtttatctacaagtctaccgacaacatgatgatccagatgttaaagcagaagaacgcaggatattccacggctgacggcagcattgaacttttcaacgataccaccacggatcttttgtatggtattgccggacatgtaaagagcggtgccttttccaccttcaagatctccggttatcctgcgaacttcctgaatgccgggcaatgtattttcgccattgattccactgccggagccacctggatgggtacggacgctccgctgtcggatatcagcgaggattctctggtgcagttcgagaccgccgtgcggatgattccccagtttgacccggagcatcccgaaatgatctcccagggtccttccgtctgcgttttcaataaatcggactcccaggaagtactggcatcctggctgtttgcccagtatctgctcaccaacgatgtgcagatcgcttattccgagacagaaggttatgtacctgtaacctctaaggcacagaactccgcagagtatcaggagtatctgtccgaatgcggtgcggataacggtacacattatgcagtgaagatggaagcttccaaactacttttggatcatgtggacaatacttttgtcacaccggtcttcaatggttccgcatccttacgtgacgcttccggacagttgattgaaaacgtggtgaagtccacccgcagaaaagagactgtggatgatacctatattcagaaattatacagtgatgtagaaagcctgtaccgtctcggtcagggaagcgacgcctccttcggcaaaaaggaactgggtgccatgccccggacttccgtgatcctgttaagcacacttgcagtcacctggcttctgatcctactgtatgtagggcgggaatatttaaaaaacagaaaaaagtaatttttcagccccattcgtaagatatcttctgatggtatttctcctgcggatggggttctttttgcaaaaagccttgatttatcttgtgtttcaggtataatggaactgttcggtgtctgagcacaccggataaattgaggagatgtctgtgtatctgcacagacccatatgcgccacaaagcgcaggaatggaggattattatgaaaaagaagacacttgcattaaccatggctatggctctggttctgtctctcgctgcatgtggaaacagcaacgccgacgttgctactgaatctaccgctgctgccaccactgaggctgctaccgaagctgctactaccgaagctgctacagaagcttctaccgagggtgctgctgatgagaagtccgagggtgttatgacctatgaagagtacatggctgctgatctcgattctgaagttgtgatcgaggcttatgttcaggctaaacagtcctggtgggaagacaaggctaccctgtacacccaggatcaggacggtgcttacttcatttataatgccgcatgttccgaagaggattatgcaaagctggtacccggtaccaagatcaaagtaaccggttataagaccgagtggtccggtgaagtagagatcgctgaaggtgctaccttcgagatcgaagagggcagctacattgctcccgttaccgatgtgaccgatctgttaggtaccgatgatctgatcaactaccagaaccagttcgtagctttcaggggcatgaccgtagaagctgctggtcaggatgctgacggcaacgacgttgctttcctgtacaactgggacggttccggcgaagacggtaacgacctgtacttcaacgtatctctgaatggtcagacctataccttcaccgttgagtcttatctgtgcgacaacaccaccgatgtttacaacgcagtaaagaacttaaagatcggtgacaccgttgatatggaaggcttcctgtactggtacgaaggtgtgaacccccacatcacttccgtaactgtgaagtaatttcatctggtgaaaatcttattaaaataaaagagttgtcctcattatgagggcagctctttttttactctgcctgtctgaattcttccgttgcctgctgtatggcatcgtaatacaccaaaacctccggcgtcgaaatcatctctcgcatgtgctgcaattctgtctgccagtcggacctgtagagacagtttaattatcttctgctctcccaccattgttttgcaatctggaagccctccatagggacgcagaacctttggtctctgggcggctgcaatgcggtgtccagttcctccatatcgaaccactccacgctctccacttcctctttttgcagggtaagctttttagcatctacaggcttggtgtacatgtagacgaatgccacttcattgtcccggaacatttttccatagaattctttttcgtattgaatatcaaaacatccggcgaatgtaagatcctcctttgctgcccggattcccagttcttcgtgaagttcccggattgcggactcttccggctcgtcccccgcctgaatatgcccggcagaagatgtatcgaaccgccccggaaaactgtctttctcagcggaacgcttctgcaataacagctgggcttttccgtcctgttccctcacgatccagatatgggcggttctgtggcggacacctttttcatgcgcctgtgtgcgttctatggtctcccctgtgggaatgcctttttcatctacgatgtcaaatatttccatggtgttatggctcctttgtgtttctttgcggttctttgggtcactttgtatttctttatatttctgtgttaatgcatctgtactacgatcgtgctgagttctgctccgctatcgtcgctccttcgatggtctttgcgatgatggccgcggcgataacgataactaccgcctttcccttctcaggtctaataccatcagatcgaaatcataatatgttccgtccatcttataatacgccggtgaggtccctattttccggaagccatatttctcatagacatgaatagcgcgtatattatcgcttcggacttccagattgatcagttctatcgcatgttctttagcatacataatgcatttctgtaacagcgcactaccgattccctgcccccattccgacttgaccacagagattccgaattcggcgcggtggctcatccttctggagaatccgcttaggctggcatctccgatgatctctccatttttccatactacatagagaacggaatgttcctccttatttatattctgtataaatttctcttcctcttctatcgaaataggaagcccttcttttccaaaggacagataatctgtctctccacctacctgtgctaaatatgcgatgatcttctccgcatctttcggcgtagcttctctgatatcaaattcttccataactgactcctcttcgcaaggttacaaattttattcataatcaaagatagtcttggactgaatagcgtccccgtattttgccttccattcctgatgagctgcggaagcatcgtatacaggcagcgcctccggatccatctccatctcgatcatcaggtcatgccggttcggtctcggcgtcacattttcataaatattcactgtatggacgccttcgatctgctgcgtccgatcgaagatttcccggatatccgcaagcatctctctgctcgcctcgctttccctggcccatacattttctttaaactttacaatgatcaggtgcttcatatcaatttccccttccttggaatgttttcttataaattgtaccataatatccttttctataggaaatattctttcactattttttccacctgatcaattgacaagggattctcttttgtctcatatgtcagaatcagatttatccctggtataattccgttttcacaatacaattttattttttggcaagctttgtttatatactccggctgatccatcaatccaaaatgttcccaataatatacctgtcccgttttagggtgcctggccgtaaaatccggatacaaaaaagtgttctcgaggacgagtttatcttcatatcgaaagggaattccatttgtgtacaagaccttatctataatagcctctgacttcgaacgcagaaattttccctgtgttccttttacaatcaggttctcaggatgactgccatttttctcatatttttcattcatccaattctctagctcttttttaacagaatgtcttcgtcctcctaaaagccgttcatattccgcattgtccaacattttttccaacatatctttcttacaatctgccttctgcatatacatctggcatgcctgcaactctctttgtaattcttccttacgcaactggtaatatttttttaatgttaatttcttagcaagttcaatttctttcttcggcaaatatatcgtggtattctgattatgaaaataccacttatagttcttattattctttgctacaataagttctcccgcaggcatttccttttccacagcttctatatgacttaattcttccttgatgtactttacacgattttgtatctcccaataattcgcaaacatatgattctcccttctattgttgtattgcatatacccatattttctaagaagcgatggtatttcagtttcttcctgcctctcatacccacacttttcaaatgccgtgggtatcatgccttcttcctgactctcatacccacgcttttcaaatgccgtgggtatcatgccttcttcctgtctctcatacccacacttttcgtgctccatgggtatcatgccttcttcctgcctctcatacccacgcttttcaaacaccgtgg

SEQ ID NO: 11378 - DNA, 84824 bp, Unknown
  gut microbiota DNA sequence
atcatgccttcttcctgcctctcatacccacacttttcatgctccatgagtatcacgtcttatttccgcctcaggtacccacgcaggcgattcccatgagaatcgacagtcactgtcagggctccgtagtccatggtgccataccagggcacccgggcgtcctctaatcgctgcagcgtctcggcatgaggatgaccataggaattgttgcggccacaggatatgatcgcggtggcaggactggcggtggcaaggaactcagtgccggtggaatagccggagccatgatgagctaccttcagtatatctaccctgaactccctctgtccgcgctgttcctgcaatctcctggttgtctgtagcgactgcgattcttgtagcgactgcgattcctgtagcgaccgggattcttgcagcgaccgggattcctgcagcgaccgggattcctgcaacgactgcgattcctgcaacgcctgcaatttctgcgtcaattgccgttccccttctccttccacatccccggtcagaagaatgctgatcttcccaatggcagatgccccacttgcgtcattggctttcctgtcgtctattgcttcctgcttcatcttcttcgcaaatacctccacataaaagcattccgaataggcgttggcatctgcaagggtcgtattctcctctgggtgcagacacaacaacctaagttgactgtctctgatctcatcgccgcattttatgtagcttaccggtatcccggcatcctccgccgctgcaagcagctgctcaaaggtttccctgcgctccgactctcggatcgctggtaggaacaactgctcagcagtaatcccccattcctcaccgttctccatcaattccaatactccattcatatgatcttcatcagggtgggaaacaaatacaccgcgaagagatgagatgccacggctcttgagataaggcttcagcacatattcaccgatgttcttccggctggtgctgccacagtcgaaaagataggctccctgcccagtctccaccacgatgccgtcgccctgccccacgtccaggaaagtcacgcgactcccacaatcaaaatttcctgtgagcaaaccaatcaataatcctaggatcatcacagctgcaatcaggtgcgggactctgttcctatgcatcatctctcccttacaatccctttttctattcctgatgctttcatccgctcctctcgttataagacaccatggggttctcgcagaatgcagcctgtctcccggaacattttcctccccatacgttccccgtttcttccatgcttccacatattttctgccgaaaaccagcagaaatatcccggcataataacaagcaatctgccatctctcaggctgccccacacaccataccgctcccggcagttctccgaatctttcacagatccactcataccaccacaggatcagacaatccaccgtccccacaataccaagtcccggaatcaacgacagaattcctcccgccactaccgcactcataaatggcagcaccaacagattcaacagcaccgaataggccgggatctcatagaaaaaccataactgtacgggcagtgtaaacaggatgactcccacactggcagcaaagcctcctttgaccgcagacaccatacggcgaatttcttcatacgccaccttgcgccagccttcccggtacttgtttctctcataggcggaatcacccagaatatctgccacggtacgaagccatgtcgatatccctttgacttctgactccgcatctgcatccctttcccaacaacccccggaaaacaccggcgtcagaatgcagatccccagcaccgctccgaaagacattaaaaagctcacatcaaaaagtcgctccggttcctgtaagacgagcaatagtgccatcagtcccagccctgtcaacatgtcataagtcctgcccacaaatatcccgagcatctgcaacagatacattccgatggcacggctggcagacacactcatgcccaccatcacaccatatataagaagcagcattgcaccacccactgctgccgccctgacaggtaaccccagtctcttaagcaaccggtatacccccattccaagcagagtaatatgtaatcccgaaatacttaagatatgggcaattccgtttttctgatacagcgcctttacctccgcgtccagttcctccttctccccaagcagcaatgtctgcataacggaggcttctttcgcaggaaaaacttctgcaagcctgtcatgcaacacctgccggaatccatacagtttttcccgcaaaaagctgtacttctcccctgcggccagaatctgtgccttccgtactctgccaccaatccccttggccgcatagtatgcctgcgcatcaaattctcccggattggtcgcggtcgaaaacaaagcaaaagtcccttccagaacgatctgttgcccgatcttaagggttttctcttcttcggttacagcacctgcagtgatcattgccgttttcatattttccagttcacattgtaattttccagaataggaatattcttgatcgttttgaataatagaaattgattttagaataatttcttcagaacttcttgtgtctatccgtcccgtgatcttcaccggacttccgtcaggcggcaggccggtatcttcaccggttcccacccctgccagtattctcatgattgcgattattgtcacgagacacaaacacactgtaaaaagtggtcgtctcattaaattcctttctgcatacgtcttacgcgcctgcaccacagaacggactgtctctgcgataaaacgcaaagcaatccatatccgtaaatatttactgttccaatgtcgtaacataatccaggtttctttcaaacgtggaattgctgaaagtaggcggcacttcgccattgaccagaatctgtactttattgatattgtcaagttctaccagcgaattcacgatagagtaaactgccacttccgtggatacgttatttatcaccgtgaggaaattggaatccagatttacataacagattccatccttagtcagaatattgacgatcttcgtctccggattgatcaccggatataatccctcgatctgtccgctgggaccggcgatcagctcttccactacaaaacgctccagaggtgtattggtggaataatgcttttctctgtatgaagcgatcagtttatccccagccgcattggcaaaatacagctttaccttcaccagttcgtaggtattgatctcgttaccgtcattattgatgaactgatcggcattcatccagcctaccatctccccggcattatcgtacaactggctgtcctctacggtaatgcccacatacttcacattgggcagctgcgtaagcgttcttacgatggccgcacgcaccagcacctccgtggtgggagacagttccgaatacgccttgtctacgttgatcagtagttttccatcttctacttcataatccaggacccggaatcccatatccaaaggtgccttatattccagcttttccggagtcgtcgagagatacctcatggtctcatccaactgttcgtccaaagtcttcgtgttcagatactgttcatgtacctcaaccttcgtctccgctgtattgatataatacatggacattttcttcccagtctggggttctggcgaaccacatccggtcaacaaaaacgacaacagcaatattcctgtcatcatataacttactattttcttcataattcacagtccttctaagacgctatatacattagcggaatcttcaccaggaaacaggatccctgtccttctgtactggtcaccgtaagggatcctttgtgcatcagcaccgcactcttcgtgatcgccagccccagtccggttcctccgatctctctggaatgggacttgtccacacgataaaaacgctcgcagatgtgtgccagggattcctccggaataccgattccggaatcgctgacttcaaaagtaaaatactggtgatccgcatccagtaccacctttacccagccatgatccttgttgtatttgatggcattttctaccagattcgtcatgatcagcgtcatcttaacctcatcaacttccgctactacggggcgaacgctctcaaatacgacttccacatcttttttccgggcgataggacgcagtcttttcaggatcaattctgtcagatcattgatattcaatgatacaatgttcaggtcctgtacctttttatccatcttcaccagtgccaacaggtcggtgatgatctgattctctctatcgatttcggatgtaatgtcttccatgaactcacgatacagctccgcaggagcgtcgtcctgggccagcagggaatccgccagtactttgatggatgtcatgggagtcttcagttcgtgggacacattagctacaaattcctgtctcgagtcgtccagtgctttcatgcgcttcaacagttggttaaaagcatccacgatatgtaccgtctccacataatcaggcacagagatggtctcatcactgaatccttccctcaccgcattgatcgcctgggtaactctgttgaaaggcatcgtcagcactctggacagcagaattgccagcgccaggattgccacgatcatgatcacttccatgatatatgccttgcggttcaacacttccctggcatttacaatactgtcattagaaatactggtcagcatgacacctcggatcgcatcgggattttttttaccgttctcgtccgtggtattggctgtggtatccatgatgggagtagtcatctctatgtaaccgtgctccgggtcgtagtgagagatattttccccctgaaagcacttaatgacttcctcggaaatgatcgtcttcccctcactgatgccgtaggtatctttttccaccttaaagtttttgttaatgatcatcacacggccttcgtacagattggacagcatctccagctccgcattgatgacctctcgggaattgccggtatcctctctgacgccgtggctgctcaaataattgttgctgaccaggtggttcgccaggatcatcaactggttctgcaccaccgtgatccgctgttccaccgccatatcctcataattgcttacgataccgtgccgcatgacaatacaggggaccagtccgatcaccagaatcagcaggaaaattcttgcccgcagacttcgaagtttgatcatgctctccagattttcccatatcgtcgcgaatcgttctttattccatttcttcacaatataaaaacctcatgttcgttcactcagcctcatggacagaatgctttgcctgcaagcagtcacgcatcttctctcctccatgacatgatatacgatttctccgtgctccgcactctcgaaatcgcaacgaccattcgcattccggactttcgtccttcttgctcatgttcgttcactcagctcatggacagaatgctttgcctgcaagcagtcacgcattctgtccatggctgagtttatcattaaaatagtacccgactccccacttggtatggacgtatctgggttcgctggggctcaattcgatcttctcccgcagtcttcggatatgtacatccacagtgcgtacatctccggggtaatccgtaccccacacgagttttaacagattctctctgctgtataccttgtccggattcagcatcagaagctccagtacctcaaactctttggccgtcaggccgatctcttttctctgaatataagctcttctgccatcacgatccagcttcagatctccgctttcgagaataccgccgctctctgcggacgttttcttcggctccatgcggcgcaggatagctttaattctcgccttgacctcgagaatattgaaaggcttcgttatgtaatcatccgcaccgtattccaatcccagaatcttatccatatcatcgcacttggcggtcaacatgatcaccggtacattggagaattcccggatctgctgacagacttcaaatcctgtcagtttgggaagcatgacatccagcaatatgatgtcgtattccttgttatgtgccatctccagtgcttcctctccgtcataggcacagtccacttccatattgtcctgttccagactgaaacggattcccttcacgatcagcttctcatcatccactaccagcactctcttgcctgccatcttccttaacctctttattttacctttctattcccgatgtatgatattctcattgcaccgtaatcctatcacataacttatcataagcattctgtttgatcccggacaccttcataatgtcctccttcgtctgaaaagcaccgtttttctcccggtagcgcacaatgtccgctgccctggatgctccgattcccggaagcgtacacaattcctctgcggatgccgtgttgatgttcacgagtccctcttctgccgccttccccgcagcttccagttcttccgcctccgatgctgtgggaaaatacaatttctgtccatctgtcacgatttccgccagattgacataaaaaggatccgcctccgtcgtcatgcccccggccagttccaatgcctccgcggctcggctgccctcaggcacctcaacgactcccggtgtccgcaccgcaccacagacatagacatacaccgtctgcggctcggccactctggtctctgcagcctgttccgcagcttccagctccgggaattccgcaacggattccccgggtggaatcagcacaatcgcctcatctgctgtcccacagcctgtcacaaataacacgatgcatcccagcaaaccgatcaaacaccaatattttattttcgaaaaaaatttaaaaaccatcatagtccccttcctgtcgttcactctcaggggattgcctctctatgctgtcaactttcattgtactggaattatccggaatttacaagccgtttgtcagcttatttccacttgaaaattatgatacctacgattgccactgccatgccaacagccttgcgccactcccagggttgcttctccacaccgaaccatccgaacaactcgatgatatatgccacagcaagctgggcgatcactatgagcatcaccgctttggccggtcccagggcatccatgctccgaatcaccgtataggtaataaaagcaccgatggcacctccaagcaacatatatttcggctccacctgcgctattttcagaaaggaagtccgctccgtacacagccatgctcccaggcataccagcaacgccgtgaactgtacaaatgcacttgcggtccagattccggaagcctttgtgacctgggtattgaatactccctgaatactcatcagcgctccggagactaaagcaatcaaaaaaccgatcataggattctaccaccttttctttttagtagtagtctatcccaggaccggttctttcattcctgattcgtcaattctctgtatttcctaattgctgcgacatattgtccgccagctgctgcaccagtgtcgtcacatcctcgccgttccacactttggaaaacagtacttccagctgcatccagaaattccctgtctccagcattttcggaagcgatacgctgtccgcatattcattggcgaaaatcgcaagtgctccattatccgcattctccgccgcatgaatgcttgcaggcattttaccggaacgctcatacagtccatccgcatattcttccgacagataagctgcaaaacgatccgcaagctccttatgctccgaataaccattgatcaccgccgctccggtaacagacaaagatctgctctgaagctcggcactgacatccggcatacgggcaattccgtagttaaatgtaagactgccgtccgcttttgcatcctccagccgctttaccacatccgtcgttccgatggtgaacatggtcttgccatcaatgaagtcctggatcacggaatcataggtcacggtatctgactcaatgaagaagaactggttcagcgccttgtatacttccagacactgtatggtctccggattgttgatgttgatatcatttctgtcatcaccgggatcgccgcctacgatcatgtaattacccacgatccagtagttgtaaaagatattgttcacatcccatttcatgacgccttcgacaccctccggtgcatcgaatgtatccgcaatgttcaacagatcgtccaccgtagagggaagtgccttggcgaaatactgttccgccagcgcgtttaccgctgcttcatccgcggtaacctgatctgtggtctgatcctccggaagagaatcttcctcgatgatctcctcaccttctcctaccggttcgtcattgtcactgctgccggacagctctttttccgcctgttgtgtcgcccaggtgcggagataatcttcattgtataccagtgcactggtatcaaaatacacaggataaccaatgattttatcgtcataggtcaccgccgccagtgctgcccgggaaaaatgatccgtatcgcagattccttccgtatccggcacctttgtcgccagacccgccagatatgccttctccagggagtcactgcttaacagatagatatccggtatctgatcggaatgcagtgtctcctgattgaccgcttccagatattcactgtcggaagtcagcaccgggatcacacggaccttgttctgttctccgaaagacactgctgccgcattgatatagccggacagagcttcatccgaataccagcagtagatggtctctttcccccgaaacaactgcagacgttctccggtatcctgcgtctggctcatttcctgcgtacttccgtaaacagctgcagcagccatggcgatcacagctgctgtagcaatcattctttttttcaaaaacataattaacttaaacctcttattcgatacaggtgtccaaaatagcgatcatttcgtccacgttttctctggtaataacgagaggaggtacaaaacgaataatatccgcaccggcattgatcaggatcaatcccttctccaatgctctgttaatgatatctcccaccggatgatcaaataccagaccctgcatcaggcccacaccacgacgttcctgaatacagtcgtacttttcagccagctcattcagacgctgttccagataaggagctacctctctcacatgttctattatatggtcctcttcgaataaatcaagcactttttccacagcggcgcaggccagtgggttgccaccgtaagtggttccgtgatctccggcggtcagggaatgctgtgcaaccttttccgtcatcataaaagcacctaccggcacaccacagcccagggccttggcggaggtcatgatatccggtttcacgccaaagcgctgccatgcatacatgtaaccggtacgtcccatgccacactggatctcatctaagatcagcaggatatcccgctcgtcgcacagatcccgtacctgcttcaaaaattcttccgttgcgggatacagtccaccctcgccctgcacggtctccataatgatagcgcaggtcttgtccgtcacctgatccagcacactctgaaaattattcagatcggcgaatttaatatgaccgatcataggctggaatgcctcacggtacttaggattgcccgtcacggacagagcacccatggttctgccgtggaaagaatggttcatggcaatgatctcgtgatctgtacagccgtctttcagataggcgtattttctggctgccttgatggcgccctccaccgcttccgcaccggaattagtgaaaaagacccgatccatgccggatacttttttgatctttcgtgctgcttcgatggcgggcacattataataatagttggaagtgtggatcaccttgtcgatctgtgctttcagtgcatcgttgtatgctttgttctgatatcccagtgcaaatacggctatacccgctacaaaatccagatattttttaccgtctatatcatacagatacacaccatcgcccttatccagaacgatctggtaccggttataggtatgcagcaggtcagcttccgcctctgcgatatattctttcatggtgtcactcatttttctattcctcctcatcggatacgatcgcagtaccgataccctgattagtgaagatctccagcagcaggcagtgtgccagacgtccgtccaggatatgtacgcggtttacaccgttacggatagcggaagtacagttgtttaacttcggcagcatgccaccgccgatgtaaccgtcgtggatcagtccctctgcctcggaggctgtcagtctggagataaaggtggacttgtcgttgatatccttgtacaggccttcgatatctgtcaggaatgccagtttctccgcatgtactgcctttgcgatcgcgcacgcggcatcatccgcattgatattgtaagtatgataatccttgtccagtccgatgggagcgatgataggcaggtaatccttctccagcatatcaaagaggatatcgggatttacgccggtgatctcacccacataaccgatgtcctgaccgtcggaatactttttctctacctggaggagtccgccgtccttgccgctgacaccaaccgccttgacaccgagctcttccaccatggtcaccaggctcttattcaccttgttcagtaccatttccgcgatttccatggtctcctcgtcagtgacacgcagaccgttgatgaactttgcttctttgccgaccttgccgacccagcggctgatctccttaccaccgccatgcacaataatgggtttgaagcctaccagcttcaacagcgtcacgtccttaatgacgtttttctgcagttcttcgttgctcatggcactgccgccgtatttaaccacaatgatcttgcggttgaatttctgtatgtaaggaagcgcctcgatcagcacttctgcttttttcattacctgttccatatcttttcccattgttctgtccatgcctttccgcagatatctgatccgcccatcacttatttcttccgtatgtcgcgcaccgtcttaggaacgatagtctgcattgatcttcacatagtcatagcttagatcacagccccatgcagtcgcttccgcatcccccatatgcatatccaccagggcggtgacttctggatcggagaggatcttcgtagcctcttcctcgctgtaatcacatgccacgccattaccgaaaatatggatcttaccactcttactctcaaaatacagatctacattttccggatcgaatttagctccggaatagcccagtgcacagaggatacgtccccagttggcatcatgtccgaagatagctgccttggtcagggaagaacagatcacggattttgccagggttctggcatcttccttgctggctgcatggatcactttagtctcgaacagcgccgttgccccttcgccgtctcctgccattttttttgccaggaaggtagtgatctcgtgcaatgccttgcagaagttgtcgtaatcttcaccctctgcgttgatctcctcattgcctgccataccatttgccagtactaacagtgtatcgttggtggaagtatcaccatccacagagatcatgttaaaggaatctactacgtctgcgctgacgcacttctgcaacatctctttggaaatgttcacatcggtggttacaaagcctaacatggtgcacatattcggatggatcatgccggagcccttgcacataccgcctaatgtcacggtcttgccgccgatctctgtctcaatggcaatctccttggaaatggtatcggtggtcatgatggcatgcgccgcatcggaaccggcctctaaggtgtccgccttggctgccaccagctttttgattccagcggtaatcttatctacaggaatctgcataccgatgacaccggtggatgctaccagtaccgcatccgtgggcacgtctaacagttctccggcacattttgcttctgcctcacagcagtccagtccctgtctgccggtgcaggcattggcgattccggaattgactaccactgcctgtgcaaatgcggaatgctccacgatctgcttatcccacagcacgggagccgcctttaccacgttggaggtaaacgtacctgccacggtgcagggtgccttacttacgatcagtgccatatccttacgattctgatatttaatggcagcctccacacctgctgcctcaaagccttttgctgcggtcacaccgccctggatctgtttcatattgggatgctctcctttcgattccgtttctatttattaaatgctgtaatgttctcttcattcaaagtaaaatcataatagttcaggtcttcccgctttgtccagccgatgcatttccagaaagcattaccgatatcgttctgggtaaaagcgatcagactgactttattgatgtgctcctctttcagggcattcatgcagtggaccaccatggcttttcctatgccaagtcttctataatcttctctcacacatacatgatacaggcagccccgtcgtccgtcatgaccgcataggataccgcccactacggttccgtcctccccgacggctaccacactggtgccgggattccggtggataaaacgctccacaccttccctggaatcatcgatactccggatgccgaagccgtgaatggtcatccagagggcgtgcagaccgtcataatcttctatggtcattggtttgatcgtaaactgtttgctcattgatgtatgtaatcctttcgtccttgtcctgtgtctgctttaagggaagcagggaaccagctccaggccttcgctctcgggaagtccgaacagcaggttcatgttctgtactgcctgaccggcagcgccttttacgagattgtccagtgcacccatcataatgatgcgtccggtacgctcgtcaatgacaaagttgatgtccacgtagttgctgccttccacccacttggtctcggggcagctgcccttatccagtacgcggacaaacttctcgtttgcataatatttatcatagatagcctttacctcttcatatgtaggaagtgtgccgtccggttttctcttcagtgttgcatattcggttgccaggatcccccggttcatgggtacgaggtgcggggtaaaattgatggtcacctgacagttgcccgcatagcctaactgctcctcgatctcgggagtatgtctgtgacttgccacaccgtaggctttcatattctcattcacttcgcagaacaggtttggcactttggctcctctgcctgcaccggaagttccggacttggcatccacgatcagggtattcacatcgatcataccttcttttaccatagggtaagcggtcaggatcgagcaggtggtataacagccgggattagccaccagtctggtcttctccgtgatcttgtcacggttgatctcgcagagtccgtatactgcttcctcgatgaactgcggcgacttatgctcgatgccgtaccatttttcataggtagctacatccttgatacggtaatcagcggacagatccacaattttcacctgggaaaggatttcctcggataacagtcctgccaggaatccctgaggggttgcggtgaagatcacatccacctgcttcgccagttcctccagattatcatccttgcagatatcctccaccagctgaaacatgttctggtatacctgataatacttcttatctatatagcttcgggaaccgtaccatacgattttggcatccttgtgattcaacaggatacgtaccagttctcctccggcataaccggttgctccgatgattcctactctgatcatttttttacctcacactcatttcattgcatttctgtgtcatcgaattgcttcgcagcaagccgctcccgcaattctgctttggaactgttcagaaccccattcgcaaaatcgctgctgcgcttttccgatattcatctgactctgaatagttccatgataccactttcttcctaaatgtctactactttttttatttttatgcatgttttttggattgatacgtatatttatgcacttattcatactttttctatgtttttatgcaatataacggaataatattcactctgcttttaccgtacttccttttccgattaaaatctgctacaataagtgtgttgcgcaatgcaatccgcgcatctatttttttagcttctacgagagcggaaatgaggaaattatggcttttgacggcgttaccattgcctgtgtaatatctgaactgaaaaaagaactgatcggcggaaggctgtacaagatcgcccagccggagaatgatgaactgttactgacgatcaaacagcccaccgggcagaagcgcctgctgttatccgcaagtgcttctctcccgctgatctatctgacggaaaccaataaacccagccccatgacggcccccaacttctgtatgcttctgcgcaaacacttgcagaacggccgtattgtgaacatctcccagccggggttggaacgtattgtgcatattgacattgaacatctggatgagatgggcgatctgcgtcacaagacactggtcatggagctgatgggcaaacacagtaacctgatcttctgtaatgacgacaataccatcatcgacagtatcaagcatgtctcctccgctgtcagcagtgtccgggaagtcttgccgggacgtccctacttcattgcacacacccaggacaagctggatgccctgacctgcgatgagaatacgttccgtgaaatgcttgccgccaaaccccagccggtcttcaaggcggtctacggaagcttcaccggcatctcgcccgtactggcacaggaattatgtcatgaggccggtcttgatggggaacgtcctacagcggcactgacacccacggattaccatactttatacggaatcttttccaaaatggtcacttctatcagggaagaagccttctctccatgcattgcctacaccggcacccgccccgtggaatacgcagcggttcccctgacgatgtatggctcgggagcggatcatttggaatcctacacttccatgtccgccctgctggagcatttttatgcggagaaaaatacattaaccaggatccgtcagaaatcctccgacctgcgccgtatcgtccagacagccctggaacgtgatattaaaaaatatgacctccagatggcacagatgaaggacacggaaaagcgggaaaaataccgcatctacggtgaactgctcaatacctacggttacagcgcaaagcccggtgacagatccctcaccgccgtgaattattatacaaatgagccggtgacgatccccctggatcccaccctatcccccacggaaaatgcgaaaaaatattttgacaaatacggcaaattaaagcgtacttatgaggcgctgtccgagctgacctgccaggtcaaggaagagatcgaccacttagagaccatcagcacagcactggacattgccctgaaggaagaagacctggtggagatcaaggaggaactgacccagagcggttacatccgccgaaaaggcggcacgaaaaaagtaaagatcaccagcaggcccttccactatttaagcagcgacggcttccatatttatgtagggaaaaataatttccaaaatgacgaactgaccttcaaattcgccacaggaaatgactggtggttccatgccaaaggcatccccggctcccacgtggtagtaaagaccgaggggaaagagctgccggaccgtacttttgaagaggctggcagactggctgcctactattctaaaggcagggaacaggaaaaagtggagatcgattacgtccagaaaaaacaggtcaaaaagcctgccggtgctaagccgggattcgtggtctattatacgaactactccctgatgatcgacagcgatatctcaggtatcaaaaagctcagcgactgaccagcctatgcatccggcacctaactttatgcatatttatactgtatattttccgatttatacatttatgtgcatattttaatttgttttattcatttttatgatttatttatgcaacttttctgcttgcttttgcgaatataatgttgtatagtaattgtcagagcgtaacacacgatcccaacatctgatgcattacggattgcttcgtgcttttaggcttttgcccctggcatcatacacactataaaacggaggattttatcatgaaggaaaaagtagttttagcttattccggcggtctggatactaccgctatcattccctggctgaaggagaattttgactacgaagttatctgtgtctgtgtcaactgcggacaggcagaggagctcgacggtctggaagagagagccaaggcctgcggcgcttccaagctgtatattgaagacgttatcgatgaattctgtgatgattatattgttccctgtgtccaggctcatgccgtatacgagaacaagtacctgttaggtacctccatggcaagacctctgatcgccaagaagctggtagagattgccagaaaagaaggcgctgtagctatctgccatggtgctaccggtaagggtaacgaccagatccgtttcgagttaggtatcaaggctctggctcccgatatcaagatcatcgctccctggagaagcgacaagtggaacatggactcccgtgaatccgagatcgagtactgcaaagcgcatggtatccatcttcctttctccaccgattcttcctacagccgtgaccgtaacatctggcacatcagccacgaaggtctggagctggaggatcccggcaacgagcccaactacgagcatctgcttgtcttaggcgtaactcctgagaaggctcccgatgagggtgagtatgtgaccatgacatttgaaaagggtgttcccacttccgttaacggcgagaagatgaaggtatccgatatcatccgtaccctgaacaagctgggcggtaagcacggtatcggtatcgtagatatcgtagagaaccgtgttgtaggtatgaagtcccgtggtgtctatgagactcccggcggcaccatcctcatggaggctcaccagcagctggaagagctgatcttagaccgtgatacttatgcattcgagaaggaaatgggtgcaaagttcgcaagcctggtatacgaaggcaaatggttcactcctctccgtgaggctgagcaggctttcattgagaagacccaggaatatgtaaccggtgaagtgaaattcaagctctacaagggcaacatcatcaaggcaggaaccacttctccttactctctgtacaatgagaacctggcttccttcaccaccggtgatctgtatgatcatcacgatgcagaaggcttcatcaatctgttcggtctgtcactgaaggttcgtgccatgaagctgcaggagaacgagaagaagcttggcaactaataattattcggcgattttgtgaataaagctatgaaatgatacagtaagaggtgtctatgatcacaatgcagacaattactgccataggactgatctatctgatcggtatcaacctggcaggcttcattatcatgggcgtcgataaaaaaagagccatccggggtgcctggcgcatctcggaggcttctctttttttaacggcgctattgggcggcagcctgggatgtattctgggaatgcagcatttccggcataagacgaagcactggtatttcaaatacggaatgccgccgatccttgtggtacaggtactactttttatccttttattcaagtaagagttatgctatactgattgtatgatgtcggggtcaacagcccccgactttgatgcctacggattgttccgtgctacgcactcccacaatcctacccaatattcgcatatcgtgggattatcatcccacttttatgctcatatcggggcgggtcctaaggtctttcacccacttatgagcaagctcatatgggcttagaccttttgaccctggcatcattgtatataagttcagtctttcgtatttacagaggaataacatacacggagcagattccggatatctgtctctacgtgtatttgggaggtgtcgatatgcatatagcagtatgtgatgataatgtagccgacagaaaacagttagagcgcttgctaaagcgggaatccgacaaacgtgctgcatctactgggatcatttataccgattcttttggtaattctaccgcactgctgtccaatcccatgcaatacgatgccttttatatcgacatgtgtctgacagaagggaccaccggtacggatgtggtcaatgccctcacagcacagggtgtcaacgctcccattatattatgctgttccaagatcaattacagggaacagacctatccggaaaatgtcatcttcctagacaagcccatcaaagtagcggaactggcacagagcattgaccatgccctggagatcatggcgaaagcagttccccttatcgagcttcgtgaggatgaggataccatctatgtgaccgaaccggatattctctacgctgaggaagagggccgcaatgtcatcgtaaccctgaaggacggccgtaccgtaaaagtcgctaccaccgccatcaatttattctcccagatagaaaatcatcccaccttctttgcccctaccgttagggccatcctcaacggcagatacatggagaagctgggattccgtaaagtcattatgtgcgatgggaaaaagttcccgctgcacagagactgcgttgcttacgcaaaacagcttttggcagagtatcatgtgtaacttgaaagttagttaatgaatctgttttcaaatctccgtagcccttggcagggtataagaaacgcgacacgctcgcgctctgtcgcagagcgtagcggtacataagcgaggaaagtaccctcgctaagtaccgacgtctgcttacggtctgcttattcttatacccagccggggctactggttttttgaaagcttttgtaccaaagtgctccaaaatcgtcaaaaaagtacaaaaacatagcattttgcatttggaaacagtattattttcgcaaagacatgattatccttccgtttggtacaaagaatttaattttttctagttttttgtatcagaaaagtaattttatgccaatttgcgaaaatcatttttaaagcaaatttctggaatattcaagaaaacagaactcccggggcggacagaatgccttccgggagttcgtccggttagccaacgatcattcactaactttcaatattacaccgttacgatcacaccgccgtcattggcgtacatgctgctgacgccgcgggtgtccatgatcaggcaatctctgaactgtaccttatccgtaagaagctttttgatggtctcggcgcggtccggtgcattacaatgggtgatcatcagtgtgcggtgttgggcgtctccgacttcctctaaaatgatctctgccattctgcggagtgccttcttcataccgatactctgtcctctctgcacgatatttcccttgtctcctgccataatgggcttaatgcttaaggtggatgccaccagtgccttcacaccggtcagtctcccgttcttacgcagagtctccagattatccagtacaaaatacgtatgcatattgctgcggaattcctcgatctgttttacgatctcttcaaagggaagaccctgttcctccagttctaccagcttcttcacgatctgcgtctcaccgcagctggcggattcggaatcgacgacatggatctgcttcttaccgtatttttcccgatacagattcattcccagcacggcgctgttgtaacttccactcagatgagaagataatgtaatggcatatacatgttctgcctctgtacaataagcctcccggaacttctccggggaagggcatgcagatctgggacattgaggagattccgctacttttttcaaaaactctgcctgatcgaagctctcatcatcctggattctatagtctcccacttccagtcccagcggaacgatctcaaaccggggatcctgcagatactcttccggcaattcacaacaactgtctactacgattttgaaactcataatatctgtctccatattattaattatttattattttttgcaaaccatgctatgtagtttttaatactacttataatagcacgaaacatttcgttcgtaaagcttttacacaaaatattcatatttccttttttccgtacatcgtttatactatttctatatcgcatgacaccggaacgcaagatacaatcaccggagtaaggagccttgatgatcgcattacagattacatccacgaaaaattttatgaatcacctgctggtagcggatacctttgatccttttcttctggaagaagccaccatcagcaccgccctcaccgtaaccatcgacgggcatatcaacaaggacttctatcctgctgacgaacgaggcgaagactgtattccctgggaactgcagtcttttagcaaaataaaaggactgtgctttgacctgatcaagggaaaacacactcctttgtattttaaatttgtgcttcatatgcagccggataaagccgctgccatgcttacaaaagcccaggtggaccctgacgtcatccgtgcactggtgctgaacatccgctacgatggggaaaaaacggttctcaccaccggatgtgcttaccagaccttcaccatggacaaaagtgccgataccgtctgggacaaggcgctgaaaaaatatctggatctgaagggaatctcttacgaggaactttgatcattccttcatcttcggcttactgagaagacttgccagataaccgaagatcagcgctgccgacgttcccacagctcctgcccggaagcctcccgcaaaaagtcctataaatccctgttcctgcactgcttcttttacgcctttcattaacacatttccaaagccaagcagcggtacgctggcaccggctcccgcaaaatcctgaaaaggttcataccagccaagcgcactgagcacggcaccggtgaccactaaaagcaccataatgcgtcccggcatcatcttcgtcttttccatcaggatctgcaccagcgcgcagatcagaccacccacccagaaagcattgatataatccatcctctgcgtttcctccttatatctgtttatggacagtctctgcactttttcctgaatttatgcgttctttatacgtttactttttgccaaaccggaaccactccggcggaagctgtaccaggatcacagcggcaaatacgataacacagcctgcgatctgtctcggagtcagtgtctgatccgtacttaaaaaaccgatcttataagcgatccatccggaaatggtggcaatgacggattccagactcatgatgagcgctgccaccgtgggattcaagcccttctgacccacaatctgcagagtatagcccacaccgcagcttaagacaccggcatacagcagtgctcccagaccttcctggatctgtccgaaagtcggctgtccccagataagcgccccgatgcagcagacgacaccgcacactgtgaactggatacaggataccaccgctccatcgattctcgctgcataatgatcaaccgtcatgatctgtatcgcaaaagcaatagcacataaaaataccatgatatcccctgcccccaggcgcaatgattctgtcatgcagagcagatacattcccaccgctgccatgccggctgctgcccagaccaccggtgctacctttttcttcaaaaaaataccaaacatgggcacaaaaataatatacagggtcgtgataaaccccgccttgccgacactggtatacttgataccgaactgctgcagggtgctggcaatggtcaggaagataccacacagaagccctgccctgacattcagtttccagtctaattttgctgccttgtctcccgcgatcttccgactgatcagaatatacaccagaataccggcagcgccgatcagagaacggacgccgttaaaagtaaacggatgcatataatccatacccttgctctgggagacaaatgccatgccccagatggtggctgtcagcagaaggatcaggctgtttctcgttgttttcgctcttgtattttccatagttgtattgttcgttccttatatgattcgtcccttattgttttacggttatgtgagcttatcaggaccgttttttatatttctcagcgatctccgccactacatcccgcagcatttttccgctacagtctatgatgagatccgcatatttctcatacaacggggttctctcatcatacagatcccgcagggtctgaccgggctgcagagtcacgcccctggcgttcagatcccccagccgtttctccacttcctcatagggaagcttcagatataccaccgtactgatctcccgcagatgctgcatgccttccggctcgtagcaggcgcttccgccggtagcaatgatgctgttctccagatctaaggacgcattcacatcgctctcaatctgccagaagccttccacaccatattccgtgatcagttcgtgtaataatttgccatgtctgtcctggatcaccaggtcggaatccacaaaacgtcttcccaggcgcttcgccaggacgacacctaccgtactttttccggagcccggcatgccgatcagagtaatattatttttcataagtttctcccacgtatacataagaaaatcgccgcctgcaagcgacgatcttccgtcttattgtctatttattgtaacgttgcagccttccttcaccacattatgtctgccgtttttgctgaatcgctacgcgtttttactgcattatacttctgcaatgacttccacttcacataatacgtttttgggaagggtcttgactgcaacacagcttctggcaggattctcagtaaagtactttgcatagacctgattgaacgctgcgaaatcgcccatgtctgccaggaagcaggaggtcttggctactctggtgtagtcggtgcctgctgcctgtaacagttcgccgatattcttcattacctgctcagcctgctcttcaatcgtagttccgtgaatctcgccggtagcgggatcaatgggaatctgtccggatgcgaaaaagatattgcccagtacgataccctgggagtaaggtccgatcgctgcgggtgctttgtctgttgaaatcttctgtaacataatattctcctctttcttcctataattaattcttccttaaatctgtcatctgcgccttgagctgcctgctacccggcatgttccgaaatttctgcgacatccccggcatttactttgtcatgtctacctccggctcatcaaattccgccgtcacgtagaatcctctggaattctccacaatatccgccacgacaccctcccggttcttcaggcggtagcggaacggaatattcggagacattgccagggaagggtctatcgtatagtaatagttactgggcagaagtccctccgtaaccgtgatcttctgtccgacctccaacagtcccggtcgttccatcttaaattctatcctgcgcattctgactcaccagccattcccggcataatatttttcgccgtttgaggtttattttaccagtaacttacagcgcttgcaagagtgatttcatttctgacctgttgcttttccctatatcaccaccgggctctccaatactaccgcatgtgcaatccccggcacgcttttgccttcattaaaacttgtcttgctgagcagggctccggtggggaggaagaggacttttttccattcgccggattccagcttcgggagaatatatgctgccagagtcacggcgctgcagccgcagccgctgccacctgcatgggtgtcctgggcatctgcatcaaagatctcaatgccgcagtccatgtgcctgccggcaatatctattcccttctcccgtagcagatcgatcagcactgtctgtcccacgcttcccagatccccggtgatgatccggtcatattcctgtggctgcacatgaaaatcctccaggtggcgttcgatggtatctgcggcggcaggtgccatgcaggcccccatgttcatggaatccttgagtccgtagtccacgatccgcccgggagtcatgccggtgatgtgagctctacatttctgattcagccccagggcaaaggctccgcttcctgtcaccgtccagctggcagacagaggtctctggttcccataatctaacggaaagcggaactccttctccgcactggcgaaatggctggatgtcacgcagaccacatgctccgcataacctcccgctgccatcacagctcccagtgtcagcgcttccccgcaggtagagcaggcaccatagactccgaacaggggaatattgtaagcggaaatgccgaaggaagtggcaatgcactgtcccaacagatcaccggcgaagagatacgagacatcctctgctttccacccggccttttccatgaccatgtagactgcatccttctgaagattgctttccgcctcttcccatgtcttacagccgaagagatcatcctctcccaccatgtcaaacagggctcctaacggtccctcgccttcttttttccctacaatagcggcaccggcgatcacacacaccggctgcgccagacggatactgcttcttcccactctctgattcataatttctccttccatgcgataacactgcattcttttttgtcagtgttcccgcattgtggaaaaattatgattctaacagtttagccatgaacatattgtgaaacacaaatcatgctcgcatgattttgtgagcaaatatgttcatgtgttgagcgccggttcatgagcaaaggccgacacgaagtgacggaaaagtgcgctagcacggctttgcgaatggtgctggctaaactgtgatcataaaaaaatctcctccagcgctccgatcactttttgcagcacctcatcctccatatctgaatagtggatgaccaggatcccccgatatctctgtgcatccgcaaaacagtactccgacagacaattcaccagaattccccgctgtctcgccgcccacttgatctccacatcgcttaaatccgtccgcacatgcagcaggaaatgggttccggcatcatcctgatagatctgactgatccgacttaagggtgacttgcgaaacatccggcagatccgctctctctgctctctgtaatcgttgatcagtctccgaatgtgacgttcaaaatatccctgctccagaaaagccgccatggcatattgttcaaaaccggataccgtgcaggaatagaaattcatggtggaaatataccgttccatcagcttctccggcagcaccatatagccgatacgtaaggacggtaccatagtcttggaaaaagtattgatatagataactctgtgattccgatccatggactgcacggaagggataggtttgcccaccatgcggaactcacagtcgaaatcatcctccacaatataacgctccggctcctccgccgcccagcgaagcagctcctgccgtcttcccaccggcatgaccagtccgatggggaaatggtgttccggcgacacgtgagcaactgtaatgcccttttgcttcagctgttctaccttcattccctgtccgtcgatgtccacatagtcccatgccacgccgcccacctcatataatttcgtgatcttgcggtagcccggattctccacaccgaattttgcatttttcccaaggagctgtaacagacggctgtagaggtattccgttccggcacccacgataatatgatccggcgatacctgcatgccgcggtatcggtacagatgctcggcgatcgccactcttaatttttccaccccattaaaaggaactgtcttaagcagagacgtatcgtaatccgtcagggtctgacgcatgatcttcgcccaggtggcaaaggggaacttatcgtattgaatattattcgccgtcagatccgccagatattcctcctcacggaagcgggtcacaaaggaagcatacgctggagcagctgtgttcttcacctccagacgattgacaaaatatcctctcttctcctccgaccggatgtagccttccagcagcagctgttcataggtattctccacggtcttgacactgacctgtaagtgctcggcaaacgcccgcttcgaaggaagtttctctcccgccgccagccgtccgctcaaaatatctgctttcatcgcttcatataagtattcatacatggtttttctgccacgggcagtcaggtcataggtcagcatctggtatcctcattttttctcgttttggttatttaaaagatatcagattttattataatgaactcataaagcaaaagcaagcaggaaggaaaacaaggaggattaatatgggcgtatatgcaatcaccggcgcatccagcgggatcggcgccaagacaaaagaactgttacagcaaagaggacatgaggtcatcaatatcgacttaaaagacggcgacatctgtgtgaacctggccacaccggagggaagacagactgcagtagacaagctgcacgagctgcatcccgaaggtctcgacggcatgatctgtaatgccggtgtctccggtgcctgcggcaatctggagctgatcatttccctgaactatttcgggaccgtagccattgcaaagggcgtctatgacctccttcagaaaaagcacggcagctgcgtagtcacggtatccaacaccatttcccagggtgccggacggaaagatatcgtagatctgttgaataacatcggtgatgaaaagagagtattaagcctggtatcctctatggattccaccaacctctccgtaggcaacagcctctatgtatccaccaagtacgctctggcaagatgggtccgcagagtatccgctacctgggcagccaacggtgtccgcatcaatgcggtagctcccggcaacgtacatactgccatgaccgctaccatgagtaccaccgcaaaaatggcgctgaacgctctccccattcccaccaagtacggtcaggaatgtctgatggcaccggaagagattgcggaagttatggtatttttagcttccgattccgccagaggcgtcaacggcaacatcatgttcgtagacggcggtaccgatgcactgttaaattctgaaaaggtatattaaggaggaacacactatgagacccattgaaaaatatgtagaagctatggaaaataaagattttgccggacttgcagagttgttcactcccgacggcattctgtgtgactattgtaccacctccgcttcccagcaggagtatcatatctacggaaaagaagccattaacatgttcttccgtaataaattcggcttccgccgttactccattttagatgccgaggtcgttaatgacgagcaggcagaattcattgccaattttggtggctacaacatcatggctatcgccacggtccgtgagaccgatgaaaacggtcggatccagagactgaccgtcagaccgaaataaattcacctatcccttattcttttctctaatattgcagtagccccggctgtccgctcggggctactggcttatagaaaatttgattcgcttctgttactccggtgcacttcccgagatcacataattagtcacggcatacaaaatttctccgttatattccactctcgaccagccggaggcttcactgtatccggtacgatgcaggttggtaccattccgcacctgggtacgcacagtactctccccctcgctggtgctgggttctgtccgcagattgatgagttccttcggtgtaatataatcatcacaatccgtgaatacgattactctgccgtcctgagtgctgacacgattcgggttcgacggtttttccggagtcttgtacgcaaggtccgtggtcagatacgctgtcaccgcatataccgtctgcccattgtattccagtctggaccagccggtggaatcgtttctgccggtacggaccagcgtctctccgtttttcagctgtcccaccacatttccttcgtctccggtatagggagtactgcgaaggttaattacatctttggcggtgacggtctcgttcacatctccgaatgtcatggcgtttccttccgcaagagcatttccgtcactattggcattggggatctccgtagccgccggtgcctctgtcggctgtattgttgcttccggggttgctgccggggtcgcctgtggagtctctgtcggcgctgccgtaggctccggtgtggtaatcggttctgtggacacctcaggtgccattaccgtctctgggatatccgtagcctctgtcgtctgtgcttccgttgctgtcaccaatgcgtcgctgtctcccgctcccccgctatggctgcttaatttccatagtggaatgcagatcaggatcgccaggatcatcattcccgcaaacaccgggatcatccatggtctgaaacggaataccgcctcttcatcctcatcaaaatcatcttcttcccggtactcttcatagccctgatcctccgcaggctcatttgcaagttcttcataatcaaagatatttccttccggctctctttccggatctctgttatctttcttatccatgacgcatcctccttccaccgtctttaagctgattatatactctcatcttttgcaaaacaagtctcttttcctgtctttgcaggtatgttatactgatcatagtattacaaaatctgctcaggagtcattccccttatgaaaaataattttgcgaaatggaaaccatatattttccttgcgatcctgctactcagtctgatccctctgatctggctgggacgctacaattatcccaccggcgacgattattattacggtgcggagactcatctggtctggcagcagacaggaagcatcacacaaacgcttgacgctgcctgcgcaggtgtcgcagacagctatcagatctggcagggaacctattcagcgcttttcctgatgtatctggcacccaatgcattttccaataccgcctatcatctggtgactttcgtgatcctgcttttattgtgcggaggtattttttatctgctgtgtcctctgttccgccgttttctgccgggaacttgcggagaatggatcaccgtttcttccattctcagctttctgtgtattcagacagtggaatttcaatgtgacagcttctactggtacaatggctccatgtattacaccggtttctttgccgtgacactgtttttcctcggcacactgtttcgctacctggacaatggaaagcggatcctgttgcttccactactcctgttcgctgtctttttgggcggcggcaactatgtttctcttcttccctgtatgcttctgtcagtaaccataacacttctgttactgttacagaaaaataaaaaagcatatatctgcgggattacttctgtcgttctcctgttgtccttcgccgtaagcgccatagctcccggcaatcacgtacgtcaaagcggcatgtggaagattcctgcctggaaagcgattgcaaaatgtctgttacagggcatccgttatacccttgcctggacgggattgtggtgggtgcttgccgcgctgcttctgctgccggtcttcctgcggatcctgcagaagaaaaacggagcatttttctcccaccctattctgtttaccggttatgcttacggactgttctgctccatgtcctgtcccctgttctataccatgaactccacgggaccgggccgggcggttgccatcgtctattatatgttcctactgatcagttttaccgtattcttctattggatcggctttgtgcttctgaaaatgcaggcacgaccgacccccccggagagaatagaagtctcaggaaagcttaacaccgctcgttatcttgctatggcagttctgttattcagcatcctctgtaccggattgtggcagcaaacttccgccatgaaagccatccgggtactgacagatggggaagccgctgcctacgccgcggaatacgaagaccgtctacttctcctgaatgatccggaggttacggatgtgatactgacaccgtttacgcatcagccggcgttgatctataccggtgatctccccggtgacccggaagatcccaccagcaggaaggtcgctcagtatttccaaaagacatcgctgtatgtcaattacggcaacaactgataataaatgcctgcgtattcagtgtatacaaaaaaggacgtctccggtctccggaaatgtcctttttcttaataattcgtctttattgtccttcgtatttctcgctctgcatccggatcagctccgcatcctcaaagtagttgatacgcattgcactcttcacctcagccagagtctgcgctgccacttcacgtgcctcatcactgccttttttcaggatatcataaactgcgggaatatccttctccagttcttttctgcggttacggatcggttccaaagtctcctgcataacattattcaggaacttcttcaccttcacatctcccagaccgcctctggtataatgcgctttcagttcatccagatctgcataatccggcagatatctctcaaaatgttcctgcccgcagaaagcatccagataagtgaatacggtgttaccttccaggtgtccggggtcgctgactaacagatgctccggatcggtgtacatactcatgatcttggtgcgcacatcatctgcactgtctgacaggtagatgcagttacccagggatttgctcatttttgccttaccatcgatgccgggcagtctctggcatgcttcgttctcaggtaaaagtgccttaggctctaccagtaccggtgcatatacggtattgaacttgtgcacgatctctctggtctgctcgatcatcggcagctggtcaccacctaccggaacagtcgttgccttaaatgcagtaatatcagaagcctggctgatcggataagtaaagaagcctaccggaatgctcgcttcaaagttacgcatctgtatctcgctcttaacagtcgggtttctctgtaatctggctacggtcaccagatccatataatagaaagtcagctcacacaattcggagatctgagactgaatgaaaatcgtagccttagcaggatccagtccacaagacatgtaatccagtgccacttcgattatattctggcgcaccttctcgggattctcgatattatccgtcagagcctgtgcatctgcgatcatgataaaggtcttcttatattcgccggaattctgcagctccacacgtctcctgagagatccaacataatgtcctacatgtagtctgccggtgggtctgtcgcccgttaaaataatcttgtccatttcatcctctcaatccgccgccaaagcagctatacatcattagatttatcataccattttttccacagtagtacaacgggtccgaaaaactttttcctacctttcactctacccgcactcgccgctgcgcagggatttcaccaataacggtatctcgaacaacagcatcacgatccagccgatcatgttggcccacgccagactggcgaagtccatatgcagcagacgcagcatcacgaataccgccacaactctgcccaacatattcataaaggtgctgtacagtgtcaccttcagatcgccgatgccgcggaagaatccctggattccgttggtcattcccggcaggatatacatccaggagatcaggtgcagataactgattccgagagataccacctgcgcatccccatcctcggcgaacagagtcatgatctgccaagccaggccccagattaccgcaaacaaaccgatggaatagaccagctctatcaacaatcctgtctgaaaacctttcttcatgcgctctttgtgtccggcgcccttgttctgcgccaggaaagtcgtcatggcatgtccgatgttctgctgcggcgtataagcgaaatcatccacgcggttcactgcggtaaatgctgccataaccgccacaccctgagtattgactactgactgaatgatgagcttgcccagctgtaagcatacctgttgcatggcactggtgctgccgtagctgacagtcttaccaagcaggctcttatcaaagacccaccactttttcccaaggcataacagtggaatctttttcttgatataaatgccgcacagcagacagcacagaccctcgctgcacactgtggcaatggcacttcccgccacgccccatcgtaataccaccacgaagaacagatctccgaaaatgtttaaaaaagcactggttaccagaaaatacaacggtgtcttactgtctcccagcgcccgcatggtgttcgccaggaaattatagataaatgtaaatatcagtcccaggaaaatgatccgaagatataccgcggcttccggaatcgcagtctccggcacccggatcagccgaagcaccggtgtcgcaagcagcagcatgagcaatgaaaataccacagagaatccgcaacctgccagcatggtggtgctgatctgcttcgacagagtatcataatccttggcaccatactgggagctcattaagacgctggctcccatgcacattccactgatcagtaggatcgctatattcatgatcggtgtggaagttcccactgctgccagtgcctgctctcccacgtattttcctacgatcacggagtccgcagcgttgtaggtcagctgaaacagattgcccagtaccaggggaatcgtaaacgatactaaaggcaacagtatctttccctgggtcatgtcatgtttctctatcgtactcattgcctattgttgtcctttcgttttcattttctctaaggatgggctcttctgtttttctataagtgtctcttcccgatcttgttctgcttcttccatgctgtcctctgcaccggacgcctcattgccgcttacagcgggctggcttctctgcttctcatccatgctgtcattgttttgtgccgcctgcagattccctgtaacagcgccatccgcgtctgccgtcacctccgccacagcaccttccggcatatctgcggcagccgctgccatctccgtctcttctgcggcattctctgcctgcgccattgcaaaatcttccgccggtgccgcaccatctgcgcctgcgctgtatgctgactgcggtgccgccgcgtcattgcttgtactgtctgccattttggagctgttgcgtactgtcacaaacacagcccccatggccacgaagcaaagacaggctgccgcaatgcgggacacatagtatagcggaaatctgcgtattttcccatttgctttccgcttttccacaccttcattctgttcactccgatgcagtaattcctcctctacaccggacagggcacggaacaatctttcttctttttctctgttttgctcgctcatcttctcttcctcttacaagacaattccctgctgttccagatatttctgcagctttttcctcgtgcggaacagggatgtcttcaccgtattcagattcatgccataacgctctgcaatctgggcatactcctccacgaaccagtaccttcgtaaaaaaacattacattcctgttcggagagcgtatgcaggaaaacattgatgctccgctctaactccgctgcttccacaatgctttccgtatcgtgggctgcgggaatacactccgccagttcatccagcgtggtatccatgagtccgcttccccgtttttttgcattctttgtcttccatctatcaaacgataaattgcgggtgattgttcccaaaaacagttccagccggttcggttttttcggaggtatggcattccatgcccgcatccaggtatcattcagacactcttccgtatcctccctgtcatgcaggatatggtaggcaatgctgtaacaatattttccgtaacttttctgcgtctctgcgattgcctgctcattcctcgcccagtacagttccagtatcgctgtatcttccacaggctctctcctttccagaaagggcactgccacaaatatctgcagcagtgcccccatattcttcgtgtatcccgtaatgtccccagcttcctagatctggaacttctttgcattcgcattgagctcgtctgcgatcacattcagctgtacggtggccttccggcaatcctccacgatctctgacagctgatccatcgtcgccgccgtctcctcggtgctggctgcattattctgggagatctcggtcagactgtcgatcttgtccgctacatctgtccggtatgcttcgatatgatccagctcttcggagatcacgttaatctcaccgacgacattctgaacctcctgattcagggtgtcgaatacctccagtgtattgcccagcttctcattctgctggtggatctcgccgactacgccattcataatctctacgctctggttggaattgctgatcaggttctccacgatgccgcggatcttgtctgcggattccttggactggtctgccagaccacggatctcttccgctacgactgcgaagcctctgcccatctcaccggctctcgctgcctcaatgctggcatttaatgacagcaggttggtctggttcgcaatacctgcgatgatatcggtagctgcctgaatcgcctgtgcggactcgttggtgatattggtctgctcctgcacctgatccaccgactgctgtgtatgagagctgatcttcaacagttccttcagggtgctgtccacggtggcattgctttccttcatgttggctgcgctgctactcagtacgttcacactgtctgctgtgcggttcagcgcattgctcatatcgttcatgctctcgctgaccttctgggtgtctgccgcctgagtggtagcgccctgcgcaatctcgttgaccgcggtattgactgcggaaatagactgtccgatactgtcaaaattgctcgaaaaagttccggtgaattcatccatctcttgcatggaactgtggatattggtaatgatccgggagaagcctaccacaacggaatgcaccgctctggcaattttgccgacttcatcggttctgtttaccagcttcgtggagatatcaaaattcagcctgccttcagccacctgatccagattgctgaccacaccaagcagtgctctggaaatcagacctacgactaaaatcgtactgatacagaagatcagtgccagtacatacataaagatcgtattggatctcacaatgccggaatacagttctttcacgtgctccaccgggatcgccactgccagagcccccgctgtcttgccgtcggttccggtaatcggtgtcagatatgcataatatctggtatcccccagcttcagggaagtgtcaaaatattccgatcctgccagtactttggatgccacagaatcactcagtacgatgccggaatagtcaaagcttgctgctgccgcttccttgtcccagaacagtaccacatctacgttggtattgctcgtgaaattctggaaaaagctctgattctctgtaaaattgatctcgcccttgcagagactgccgttctcataacggaagccctccccagaagcgctgtccagattcagctgcatcgcatattccgtagcagccagctcttccttcacaagcgtttccgcggtgttgttgccgactgccttcaatgccagcatcgcaaaaaatatgatgaccagcatcggcatcagtaccatcgcgaggatcttgacgatcagatttgctccctttttccccttgagatctttcatgttgtccagtgagacagtttccccttctgtctgttcctgttttaccgcttctgccatagataaaataacctcctttgtacccttatgacctttgtatattctttctaaaatggactgccgggaacagcccctgacagcttaatagataaaaagattataacgcactccggttgaaaaagctattctttttgtgcttttccctcctgaatgaggtctttgatcacctctccaccgatgatcagccccgccacggaagggacaaaggaaatactgcccggaattgctctccggtcggtgcatttatggacggtgccgggaggacagacgcagcccgtccggcagctggtttccatagtttcgagaggcttcagggaagcttcggtagagtagacaaccttcagttttttcacaccgcgtttttttagctctctgcgcatgacctttgccagagggcacatggtagtcttatagatgtccgccacacggaactgtgtggggtcaagcttattgccggcacccatacagctgatgacagggactccggcctcctttgcgcgcaggatgatctcgatttttgcagtcacagtgtccacggcatccacgacgtaatcgtactgggaaaaatcaaactgatcggcagtctccgggagatagaagcatttatgtcctaccacctgtgcctcaggattgatcagatgaatccgctcctccatgacatctactttgtatttgccgatcgtctgacgggtagcgatgatctggcggttgatattcgtcagacagaccttgtcatcgtcaatgagatcaaaggcgccgactccgctgcgggcaagggcttcgacgacatagccgccgactccgccgatcccgaagacggcgacacgggcgtggtaaagacgctgcatggcatctttgccgaggagtaattcggttctggaaaattcgtttaacatagatgtagattccttttcttataactatatttaactatattgcacgcagctgtgctgtccccctttcatccagcacagcaaacaccgcacggtcagggaaccggatcgtgaaaattccaagtataaaaaaacatgggaacttaaaggttcccatgcttagcttatttttattgttcctactagtatactgggaatactctcgtaagagtatatcacatctttagagattgtcatagagtccctgaataaaatttttcacctggaggttgttctcaggcgtggtatcttcgagggtagcatggatgtagggtttgcgctctttcatgaacttaaggatggaggtgtaatccatctgtcccagaccgcagcctacggatctaagcttcccatcttcgggaataaaatccttcaggtgtaccatggctacatccggtcccagcagatcaatggcttcgtccacaattgctacctgatccttgtaattacaataatccagcagattcaccggatccagaatgatctgaaggttgggcgaattgatctcatccagcactcgtctcgctctggcgggattgtagacaatatgcttccataccggctcgatggccatgaccacacccatctgctcggcatattttacgacgggacgtaagttggtgataaaggtctgcaaagcctcttcaccatggcattcgggtactgcggtataagtctcgttgggagcaccggtctcggttcccaccacaccgcagccaagccacgaagcaaaacggatatgtgccatatagcggtgggtgatcttcgcaagctgccccggatttggatttgccagattcagatagcatccaagcaccgcaacatccacctgatttttcgcaaatacatttttcatatacatggcaagtcccggggtcagtgcctcatcggtagtgggaaactcggtgatcaccttaccgggtgccagatgtccacagacaaagccaagctcatggacattggcaatacgttcctcaaaaggaagctttttcgtatcatgtaaacggattcctaactgcataatttcctccattccaggttcaggtctgatcttcctgatcctgcttatcatcagcgccggatcagctcatctacgccttccagctcgtaagcctctccaacctgtccttcgattctcacgttatccagggtcaattttgcaacatttcttgcaaaaagtcctctcttactgcttttttctacaccatccgacatggcaggtacatcacattttgcatcctcggcatagctgatggagatgtccttcatgtagatctcctcgatcttctgctccggaagtccgtcaaaataagctgctgccacatggcagttggtgcaatccatattttcaaataccatctttttcacctgcggtgttctgtcatccacagggtagacatctctggactggacataggtggtcttgccgtcgggatcgcagaaatagaagcagttgaccacgagcggtgtcatcacatgatccagggtcagattccggaaaatgatgttgcttaaaatcgcatcttttcctctgccgcggcgggtcttgatacgcaggcctctgtccgtatgacggaaaatgcagtcctccaccgtcagattcaccacgccgcctgccatctcgctgcccagagttacagcaccatgaccgttctccatcaggcactggcggatgtggatgttctcggagggagtcttgtgctttttgcccatgtagattttgccgctcttgactgcgatacagtcatctcccagggagaaacgcacgcccaggatctccacatttttgcaggactcgggatccagtccgtcggtgttgggagaatcgctgggattctgcacagtcacaccgatgaatttcagatcgttgctgaaatagggatgcaatgtccaggaaggcgaattgcagaaggtcactccctgtaaagtcacatttttacatccgctgatgaaaaacagtctggggcggaacgcaatgttcatgaccttgggatccttccaccagttttccttagaagcgttgccgttgatcttaccctgtccgtagatcaccacgtcttctgcaccgataccgcagatgatgccggagaacataggtaagggattcccctcccatgtgccgagattgtactcgtcggtctcatcatagctttgtagcatgccggggaatgtggggaatttctctctgtcggtaaatgccttaagctccgcaccctctgccagttcgatacggatgtggctttttaagaacaggctggtaatacggtaggttcctgcaggaaaatacactctgctgttcaccgggcatgccatgatagcagcctggataaagtgggtatcgtcgtgctcaccgtcacctttggcaccgaatctggtcacatccagggtcacatactcataatctgtcttgaaagatacttcaccctgcttttcaccattcacgtaagcttccaccacatatttctgatccggctttaaatcaaacaaggaagtgatggtcttctctgtagtgagggtgggctcaccgtttaatcgtaattctatgggttgttttgtaaaatacctgccgccgtctgcgatctctatagtcacactacgggcagtatgcataatatgtctgatttccatgcgctgtttcctctcgtttctacctcatgcactcctgatatttttccgctaaaagtaaatattccccgcatgccttctgtacggcaccgcagaatactttttccgaagtttcatccatagcgaaggttttcgtttttgcatcataatactgctccagcatacgcttcacggcaccacggaaattatctaaaagctctctgtaattctcatagatctccgggctgatctgctctacggtatgaagcagtgctgcagtgtaatccgcgccgttttccgcggtgaattcgctctccgcatgctttttcagcacacgcatctgcgccatgatatccggatagccttcctttttattctcgttggtctcatatgccgcatatacgggatatatcagatccgcagcctgataaatgttgcccaggcctgcgctctgctgcacggcttccagatcgaaaatgccttcctccgtacggggaagtgccttgatttcctgaattgtcataattcctcctatataacaaaggcgttctcctgcacgtttattgtaacaaaagaacgccgttttgtgtatgatcttttacagagttacaccctgcttgaaaatagccatatcatggaatcctgctgcctcgctgcatacctgcctgccggaagcggtctccactaccagatcaaacaaagccttagtctcctcttccatggtcttatcctctaccagtacgccggcattgaaatcgatccagttggactttttgcctgccaggcgggagttggtcgcgatcttcatggtaggaaccggagatgcgaaaggagttccgcgtcctgtggtaaacagtacgatatgtgctcctgcggctgccagtgcggtagctgctaccagatcattgcccggtgcggacagaaggttcagtcccggagtcttcacggtatcgccatactgcagtacgcccttgaccagagcactaccggacttctgcgtacagcctaaagacttatcctccagagtggagatgccaccctttttgttacccggggaaggattctcgtagatggtctgattgtggctcttgaagtagttcttgaagtcgttgatcagatctacggtctggtggaacagttcctcgttggcacaacggttcatcagaatggtctctgctccgaacatctcgggaacctcggtcaggatggtggtgccacccttggagatcagcagatcggagaagcgtcctactaaggggttcgcggtaatgccggacagtccgtcgctgccgccgcatttcatgccgatgaccagcttgctgacgctgatgggctctctctcgaatttggatgcgtaatcgatcagacccttgatgatctctacggagtctgcgatctcatcctcgtgctcctggcacaccaggaatttcacacggttctcatcataatcgccgatataaggcttcaatacatcaatgttgctgttctcacagcccagtcccagtaccagaacaccgcctgcattgggatgattgatcaggtctgccagaatcttacgggtatgctcctgatcgtcgcccatctgggaacaaccgtaaggatgagggaatgcaataacctcttccacactgcctttaacgaatgcattggcctgctttgcgatggctgttgccacgttgttgacacagccaacggtggggatgacccagatctcgttacgaacgcctactttaccgtcgggacggttgaagcccatgaaggtcacatcttccgtcttcttctcctctacgggagtgggattgtaggtgtactccaacagatcgcccaaagcggtcttaacattatgagtatggatccagctgccctctgcgatgttctccttggcattaccgatacggtaaccatatttgatgacctcaccgccctcgggaatgtcacagattgccatcttatgtcctgcggggatctcctctctggcggtaacggtcttagaaccgtcaccgacagagactgtgatcttctcaccggcaggaatcgtatttaatgctacgactacattatcattgtcattaatctttaagaaatcttgcataatgctgccctcatgccatttgccttaatatcatccaggtatgctacgactgcatcggtaagtccgggaaccttgttcagatcctgaccgaagaagtcttcattccccaggaaggaagttacgaacgtctgcgtatccttctcacagttcgctgcgaagaactccagaactgccttgtcatccatgatgttgtattcctgaccgtctctgtgaccgatcagagccttatcgcggatctcggtaccggtatagaaagccatcagtgctgcgatggagaaggtcagatgagcgggaagcttaccggtcttctcaacatagcctaacaggctgggcatacatcttgctctccacttggatacggaatttaaggagattgcaagcagtgcatggtctacgtaagggttattgaaacggtttacaacctcacctgcgaactgcttcagctcctcctccggcagagacagggtagggatcacttcgtcataaatggtcttcagcatgaagttacggatatcgtcatcctgcatggactgtcttacgatgtcattgccgcacagataggaagccagtacaaaggaagtatgtgcgccgtttaagatacgaacctttctctgtttgtaaggtttctggttgtcagtgaagataacaggaagtcctgcatcgggaagagggaactccttgctgatatccttagcagactcgataacccacagagcgaacggctcaccggttaccatgatgtgatcttcatagcccagcttctcccactcttcctgttccgtggcacggggataaccggtaatgatacggtcaaccagagtagaggtgaatacgcatgcctcatctacccactttttgaattcatcgcccaatccccacagctcgatcagctgcattacacacttctttaacataataccgttgtcatcgatcagctctacgggaagcattaccagtcccttgctcatgtcacccttgaaagtctcaaatctgtgatataagaacttggtcagcttgccggggaaagtcttgggaggctctaattcaaacttatcggtatcatcatatacgatacctgcctcagtggtgttggatactacgaaacgtaaggtatcgatctcggcaagtcccatgtacttgtcatattcattataagtgtctactgcgtctgcaacgctggttacgattctattgatgatcttggcttcaccgttcacattaccgcgaagagatacagtgtactggcagtcctgcttgtggaacatatccagattgccgaactcgatgggtttgatcagaacgatgtctccgtcgaacttaccctgctcgttagcgatatcgatcatgtaatctacgaatccacgtaagaaattaccctcaccgaactgtacgaccttgataggtctctcctttttaccggtctttgccttgtttaagatatccattttgtcctccattctacgcttagcgtatcctatctgcaccgtcttacggcactctgttacctgcacttacgctccccgacacgccttgcaaacaaatctaaattgtaggaagtttatgtaagtactttcataaatcattttacttcaaaaaaatggtttcgtcaatcaccaaaaacagaaagttttattttcatgaaaccaccgattttatcaacaatatttcactttgatatttttttggcatatgagaagttgaaaaagtatcttgaaaaaaaagaagtctttcgttataattcaaatatagctttttgtgtaactacttacagttttcttacaaattctgttacatagaagcagagaggaagccacagatgacaatttatgatatttctgagaaggccggtgtctctattgctactgtttcccgcgtgctcaacggaagcaacaatgtaagcgagaaaaccaagaaaaaagttctagatgtaatcaaccagtatgagtacactcccaatgcgtttgcccgaggactggggctcaacacgatgaagaccatcggtattatgtgtgccgacagttccgatctgtatttagccaaggcgatctattatatcgaacagaagcttcgtgccaacggctatgacagtatcctgtgctgtaccggttatgatctggctaccaaagccagctccatgaaccttctgatcaccaaaaaggtggacggcattatattggtaggttccaactttatttatgaaaaggaagaagacaacaaatacattacagatgcctccgcgcaggttcctgtaatgctgttaaatgcagcgatggatgctccaaatgtatacagtgttgtctcggatgattttacttccatgtatgacgctaccatggagatgatccgctccggtgtggaagatattctgtatttctataattctacttcctacagtggtaagaaaaagctggcaggctaccgtgccgccatggaagaaaagggacttctcaccaacggaagctttctgcagctctatcagggatcccacgaggatattcccgccatggccgatcagttgaaaaagctccatgcaaaaggaatctctttccacggtgttatcgccgctgacgattccctggctctgggtgctctgaaatacggccgggaaatgggacttcgcattccggaagatctgtccattatcggttataataattccatgctggtaagctgctgtgatccggaactgaccagcatcgacaataaattagagacgctctgccagcatctgatcacaactctgatgggtgtcctggaaggaaacgagatgccgaaaaagactgtgttctccggagaactggtaaaacgcggcaccacaaaataattttttctttacagcaatgacagcaatggggtagctgaaaataccctttagtatatttatggaggattttaaaatgaaagcatttatggacaaggactttctgttagagactgagacagccaggaaactgttccacgactacgcagaaaaaacaccgattctggattaccattgtcatattaatcccaaggagatcgctgaggatcgtcagttcgacaatatcacccaggtatggctgggcggtgaccactacaagtggcgtttcatgcgttcctgcggtgttgacgagaagtacatcaccggtgatgcatccgattacgagaagttctgcaaatgggcagagtgcctgggcaaagctatcggcaaccccttattccactggagccatctggagctgcagagatatttcggttacaatggcgttctgaacaaaaacagcgctgacgaagtatggaacctgtgcaatgaaaagctccatcagccttccatgagcgttcgtaacctgatcaagcagagtaacgttaccctgatctgcaccaccgatgatcctatcgattctctggagtggcacaagaagctggcagcagatgatactttcgatgtaaaggttctgcccgcatggagacccgacaaggctatgaatatcgagaagcccgattatctggattatctggagaagttggctgctgctgccggcatgaccgagatcaactcttttgcaagcttaaaggaagctctgaagaaccgtatggcatttttcgcatccatgggatgtaacgtatctgaccatgctttagagtatgtaatgtactatcccgcttccgatgatgagctggaagagatcttcttaaagagactgaacaagatggttctgaccaaggaagaggaactgaaattcaagaccgccttcatgctgttcgtaggccgcgaatatcataagctcgactgggctatgcagctgcactacggttgtaagcgtgacaacaataccctgatgttcgagaagctgggtcccgataccggttacgactgcatcaacaactacgctccttccgctcagatggctgacttcctgaacgctctgatcgtaagtgatgagcttcccagaactgtcatctacagtctgaatcctaacgacaatcaggctatcggtaccatcctcggatgtttccaggattccaccgctgttgccaagatccagcagggttccgcctggtggttcaatgatcacaagaccggcatgcaggatcagatgatctccctggctaacctgggtaatctgtccggattcgtaggaatgctgaccgactccagaagcttcctgtcctacaccagacatgagtatttccgccgtatcctgtgcaaccttatcggtaactgggtagagagcggcgagttccctgcagattacgatactctgtccgagatcgtaaccgatatttcttacaataacgcaaagagatacttcaagttccctctggcataagagataaaacaataaacccccggtgatgagccgggggctttctttatttattgaatcacgaggttggagtatcccatcaggctctcatccacagcatgtgcagcttctctgccttcgcggatggcccatacgacgagggactgtcctctgtgcatatcgccggtgacgaatacattttccacactggtctggtattttccgggagctgtttttacattggtgcgttcatttaattccacgccgaaagcatcagcaatgtatttctgggttcctaaaaatcctgcggcgatcagcacgatctctgcatccagggtctgctcgcttcccgcgatctcctgcatcttcatgcgtccggtagccggatccttttcccaggacagcttcacgatcttcacagctttcagattgccgttcttatccttgataaattccttgactgtagactcatatatcctcggatcatgtccatagaccgcaatggcttcttcctgaccgtaatcggtcttgcagaccttcggccattcgggccagggattattctctgttcttttgtccggtgccttgggcatcatctcgatctgggtcacagattttgctccgtgacggatggaggttccaacgcagtcattaccggtatcaccgccgccgatgataaccacatttttccccttggtctccacatattttttatcttcaaaattcgaatccagaaggcttctggtattggctttcagaaaatccaccgcaaaatagattccctcggcatctctgccaggagcattgatgtctctgggattagaggcaccgcatgccagtacgacgcggtcaaaatcatgcaaaagcttggaggctttgatgtccttgccgatgtcggttcctgtgacaaaggtgacaccctcttccttcataatattgatcttgcggtcaatgatctgcttttccagtttcatgttggggatgccgtacatcaacagtcctcccacacgatcggaacgctcgaatactgttacctgatgtcctctctggttcagcagatctgctgctgccagtccggaaggaccgctgccgatgactgctacctttttaccggtgcgtaccacagggggcttggctgccgcatagccctcgctgtaggcgttttcaatgatggcatattcgttctccttggtggagaccggatccccgttcagtccgcaggtacatgctgcctcacacagggcaggacacactctggaagtgaactcggggaaattgttggtcttcttcagacggttgtaagcctgctgccagttgccggtatataccagatcgttccactccggcaccagattgtgcagggggcatccgctggccataccgcagatcatcatgcccgactggcagaacggcacaccgcattccatgcatctggcaccctgtaaacgctgcttttccttcggcagatgctcatggaattcattaaaatgctgtattctcttcttaggatcttcagccacgctgacttcccttttatattccataaatcccgttggttttcccatgactctctccattctgcagacgcatcggcgtcggaagaatcgcgaactaaatttcagatttagttctgcgataaactaatttgtggcgcccgcgacacaaattagtcgtgtgaaaagtaatcttcaggattgcttttcacactggcctcccatttactttctggtgttggcatagaatgcctcgatctgtgcctgctctgcgctcagtcccttttcctccatctgtacgatggtcttcaggactctctcatagtcatgagggatgatcttcttgaacttaggcagatactctccaaagttatccagcacttccttaccctttgcagagttggtcagtgccacatgctcctggatcatggatttcagctccaacacatcatatttggatgtgatctcgctggaagataccatttccttattcagacgcttatacagatcgttgccttcatccagtacatacgcgatgcctccgctcataccggctgcaaagtttttaccggtgggacccaagactaccacacgtccgccggtcatgtattcacaaccgtgatcacccacaccttcgactaccgcaatggcaccggagttacgtacgcagaaacgttcacctgccacaccgttgatgaatgctttaccggaggttgcaccgtacagtgccacattaccgatgataatattttcttcagccttgaacttgctgccctgtgggggatataccaccaacttaccgccggataagcccttgccgaagtagtcattgctgtcgcccaccagctccagggtcaggcccttggggataaaggctccgaaggactgtccgccggcacctttacacagtacatgataggtatcttcttccacgtcatcgcccagttttctggtgatctcacttccgaggattgtaccgaaggcacggtcagtgttgctgacatccacttcgatactgcgcttctgtcccgcatcgatggctttgcccagctgctttaacagcaccttctcatccagtgtcttctctaactggaagtcatatacctgcctgggatcgaaggttaccttctgcttgctgccctcgtaagggttgcttaagatctgggtaagatccacttcttcctggcgctcggtcagatgctcttttctcttcagcagatcggtcctgcccaccagttcatctacggtacgcacacccagggctgccatgtattcccgcagctcctgtgcgataaatttcataaagttttccacatattccggcttaccgcggaagtttttccgcagctccgggttctgggtagccacacctaccggacaggtatccagattacatactctcatcatgacacaacccatcgttaccaatggagcggtagcgaaaccgaactcctcggcacctaaaatggctgcgatggctacgtctctgccgctcatgagtttaccatcagtctcgatgcggactttgttacgcagtccgttcatgatcagggtctgatgggtctctgccagtcccagttcccagggaagtccggcattgtggatggagtttctcggtgccgcaccggtaccaccgtcataaccggataccaggatgacctgggctcccgccttggccacaccggctgctacggttcccacaccggcttccgataccagctttacggagattcttgcctgggtgttggcatttttcagatcgtagatcagctgcgccagatcctcaatggaataaatgtcgtgatgagggggcggagagatcagggacacaccgggtgtggagtgtctggtcttggcgatccagggatatacctttcctccgggcagatgtccgccctcgccgggttttgctccctgtgccatcttgatctggatctcctgtgcactcaccagatagcggctggtgacgccaaaacgtccgctggctacctgcttgatggcggaacaacggtttaagccgtccgggcctacggtcagacggtccagatcctcaccgccctcaccggaattgctcttgccgtgcagatggttcatggcgatggccatggtctcatgggcttccttggaaatggagccataggacatggcaccggtcttgaatctggtcacgatggattctaccggctctacttcctcgatgggcacgccctttttcggatagttaaagtccatcagtcctctgaggttcttgatggaatcttcgtcattgaccatggcggtgtactgcttgaacatctggtaatcaccgcgtctggtggattcctgtaacatatggatggtagcgggattatacagatgctcgtcaccgccgctacgcatcttgtgatgtccggggctgtttaaggtcagatcgtttttcagtcccagaggatcaaatgcctgagagtgcaggtcgtctacctgctgctcaatatcttttaaggtaatacctcccacacgacatacggtgttggagaaatacttactgataacttccggcgcgataccgatagcctcgaagatctgggaaccctgataggactggatggtgctgatacccatcttggatgcgatcttgacgatgccgtggaggacagcattgttgtaatcatccactgctgcatagtaatccttatccagcatattgctctcgatcagctccttgatggtatcctgtgccagataagggttgatggcgcaggcaccgtaaccgagcaacgtagcaaaatggtgtacttctctgggttcgccggactccaggatcaatgcgactctggttctcttcttggtgcgtaccagatactggttcagggcagatacagcaagcagggaaggaatgggcacatggttctcatccacgcctctgtcggacaggatcagaatgttcacgccttctctgtaagctctgtccacttccacgaacagtcggtcaatggcacgctctaagctggtgttcttgtaatatacgataggtacgacttctaccttgaagccgtctactttcatgttcttgatcttcaagagatcagtgttggtcaggatcgggttgttgaccttcagaacgttacaattcttcggagtctcctccaggatgttgccctcggtaccgatgtatacggtggtggaggttacgatctcctctcggatggcatcaataggcgggttcgtcacctgtgcaaacagctgcttgaaataatggaacagcgggtgattcgtcttactcagcacgggcagtggcgtatccacacccatggctgcgatagcttcgctgccgttctttgccatcggcagaatgctctgcttcatttcatcgtaggtgtagccaaaagccttctgcatccgctggcgctcttcgtaggtgtattccggaacacgatagttcgggatatggatgctcttcagttcggtcagattgttgtccagccattctccataaggctgtctggaagcatatttttccttgatctcctcgtcatcgatgactctgccctgtacggtatcgaccaaaagcatcttaccggggcgaagtctttcttttactttgatcttcgtgggatcaatgggaagcacacctacctcagaggacaggatcagcgtatcgtcatccgtgatcatgtaacgggaaggacgcagaccgtttctgtccagcacggcacccatgatatctccgtcggagaacaggatggatgcgggaccgtcccagggctccatcatagtagcgtaatactgatagaaatctctcttggtctgggacattgctttgttgttcgcccagggctcggggatagcgatcatgactgccagaggcagctccatgccgctcattaccaggaactccaatgtgttgtccaacatcgcggaatcggaaccggtcttgctgatggcaggcagtactttgtgcagctgtcctttcagatgctcggattccatgttctcttcgcgcgccagcatcttatcggcattgccgcggatggtgttgatctcaccgttgtgtaccatcagacggttcggatgcgcacgctcccagctggggttggtgttcgtggagaaacgggaatgtaccatagcaatggcagattcgtaatccgcactctgtaagtctgcaaagaaggtacgaagctgtcccaccaggaacattcctttatatacgatggttctgctggaaagagagaccacataagtatcatcggaagactgctcaaatacacgccttgcaatgtaaagtctgcggtcgaagggcagacctttttccacatcgacgggctttttcacaaagccctgcatgatataaggcatgcactctactgccttatgtcccagcacattggggaaagtaggcacttcacgccagccgaggaattccattccttccttttccacaatgatctcgaacatcttcttcgcctggttgcggcgcagctcttcctgagggaagaagaacatgccgacaccgtattctctctctccgccgatatccatgcccagagcctttgtgactcttgcaaaaaatttgtggggaatctgggtcagaataccgacaccgtcaccggtcttaccttccgcatccttaccggctctgtgctccagattctctacgatcttcagcgcattctcaacagtagcgcggcttttctctccatgaatattgacacaggctccgataccgcagttatcatgctcaaattcttcccgatataacggtgccttgggcagctcctgttttacatcaaacatatagttctcctttccgggttttttatttctctcttcttaatctgtctgttactattcaggacctcattcgcaagaccgtaatagtaacaaaaaaggtcgcaatgagactctttcgagcgcctcattgcgaccttttctgtactatacacctatttttctcatttgtaaatatagatttttctacgaattgtcagataatttgtcaattctattatttgcacacctgttatctggaaattgtattaattttctctttaaaaatgtatttccgacacaactttttgggggttctcccctatttttcctgtttccggccatacgccttgctcatcagtttctgatacattgcagaaaagtgtttactctctgccagtgcagtgcgaagaggtgccagtgtcagtgccattactgcccgatagcggaacagttcgccgggattcatgtattttgctgtgatctccttatgttctgcagcgctgcgcttcaggttctccttggtctcagagtagccgccgccctcgtaggaggacacggtaagtcccagatactgcatgggtgctttggcacgataatagcaccagaggaaatgttcgtaatctgcacggatcttatatttgggttcatagggcttctgtctgcacaggtctgcagcataaaagcaggactgatggcagggaatgttgcggtagcagacgaaaccggtgatgcgtggtggggaagatatcttcgtctctgtcttcgcgctgtaggtatcgccgtagtagatgcccggaagtttcgccgggtactgttccatgaactgtgcggtgtgggtcagaacttcgtcgtcatagaagaggtcaccgcagtttaggaagagaatgtagtcgccggtcacatgggagactgcctggttcatggcttcgtagatgctgtggtcggattcctggtataggtggatgcgtctgtcctcgcgcatggtttctatggagccgtcgcggctgccgccgtccttgacaatgatctcaaagctcgggtaggtctgggacaggatgctgtccagagtctgattcagtttaggacctgggtttaagcagactacgatgatgctgaatttcatatgttgctccttttaagatataatatctccgcagtcgagaacagggcaaggaacgcggcacgttcgcactctgtcgcagagcgtagcggcacgtaagtgaccaaagtacggtcactaagtgccgacgtctgcttacggcctgcttatccttaccctgttttcggctgctgggttacgttgtccatctttgtatatcttatcaagtatttggatggtgacaaatgtacttttttattgcttaaaatatatttttctgtttgtgaagcatcccgagggatactgctgccactgtcaggaaaatcacgcatacaggccagctgacaaagccggtgacggcgatggcggtataggacaggcagtaggcgaggacgttggatgccacatggacaaagactgccattttgaactctccaaagtattcgtaagcatatgccatcaggcagccgatgaggaagccgtacacgccctggacgtagttcatgtggtagacaccgaagatcagggcggacagggctatggcgagtttgatatccatgaatctgcgaaggtatccgtagataactccgcggaacaggagttcctctgctatgggggagatgaagccgaatacgaggattcctacgataaagtgtgcggaatattgctgggctgccacttcggtataagcttcagacttattggtcactcccaggagttcaaacaggagattgcatccgatgacggcaccgatggtagccacagtcagtaagacatatttgctctttccctcttttttcaagtgacttaagtgcatgtcctctttatttttatcaatgagcatcttcgctgtggaccatacggcaatggcaccgccgatgaatccaagagccgcaatgatactggagacatctccggaatagccgttatatgcaccggtctcatcccttaggatcagcagatctaccagtccaccggaagcaccggactgtgccagctgatacaacagtgccagcagcgcatactgcaccgcattgcgcaccaggataaacatcaggaacgaatacaccatggtccagattctctggtacatgggatttttccttttattgtcgggattgctgttcaccagttcctcgctgccgcgaagcagaaatttttccagttcttccacggattgtacgatgtagtccgcttttgcttcctttaactcttccttgcttccgtagccataagtcacgcccacgctctccacgcccaacgctctggctccttccacatcgaactttctgtcaccgatcatatagacctgcgccggatccacgggattctctccaaagagctgacgcagggtttcctgtaccacctgatccttggtctctcttctgccgtccagttcactacccaccactacagaaaaatattttttcagatcaaaatgttccaggatgcgctctacgtatacctggggcttactggatgccactgccaggaaataccccttcgactgaagcgttttcagcatctccggaataccgtcatagacctcattttcaaaaagtcccgtatcctgaaagcgctctctgtattttgccacagcttcttctgcctgttcggcggtgaaaccgtagaattccataaagctgtcacgcagtggcggtccgataaagggttctagcttgtccagatccggctcctcgatgccaaaggagtgcagtgcatactgcacacaggtagtaattccgattttaggatctgtcagggtgccgtccagatcaaacagcagatatttcttcattcttataattcctttttctttctattcttatatgttccgcagatgattagaagctacggatcttgtctccgtcatcctcggtgtttttcaatgccttgatctccacgtcatagcccacattagcattgacctgcacatggaccacatctcctacttttttgccaaggagcgctttgcccaggggggactcgttgctgatcagaccttccagggaattaccgcggacggtggtcacgatcttgtaatcctcttccgtgccgtcatcgataaattccacggtaacggtgttgttgatacctacctcatccgctgcggagttctcggagatgacctttgcagtcttgatcattctctccagataacggatgcggctctcattctgattcttatactttttggctgcatagtattcaaaattctcactgagatcgccgtgggctctggcttccttcacgtcctccaatgccttgggacgtaccaccagcttgcggtactcgatctcatcttccattttcttaatgtcagtgggtgttaattcgtcgtacataatataatccttctttctacagctgcatcgcatagatcactgccaaagacagaatgatctgaatgatcgcaaaacggaatacggtctgtgtattggaccaatcccacaccttacgcacatgatcgtgcaggggggtacgtacatttttcaaaatatggatcttcaggaaacgaagcagggacaccttaagaagtcccagtcctccgtccaggatcagcaccagtgccaatgggataaacaggagcgggcagccgctcttcaaaatggcgatgctgatgaacaatcccatggcccgggaaccggcatcccccatcatcagcttactgggtgtcgcattgtaccacagatatcccagaatacatacggcaaataataggatcaggaaggaataggtctcgtcgacctccttcatgcggtctacaatatagatggacatgatggtaatgatcgacagggttccggacagtccgtccacaccgtcggagcagttggtcacattcacggaggtccataccagaattaccgtgagaatggcgaataccacaggcggcagagtgaactttacatggaacagcgccagttccaccacgttggaattatatttcagaaaagtgatggctaccagtgccgccacgcacagatctaagaaaccttttttgtactcaccccatggagtcttggaagcatcgtccagaaatcccgtcatcatgcataccacgatcagcagcagatagatcaccagctctgcgcttaaaagcgaaaacagtagaacagatgccacaaatgccaggacaaaaataattccggcgcctctgggtttccccgcggacaattttccatcatgggcaaattctcttccggcatccttgggcagatacggacttaatttcgccgttgccagtaccgtagcaccaaaagcaaaaagaattccaaaaaaagcaaggagagaactgcttccctccggcaagatcatctgtaacatacgaatctccattcctcacaacactctcatgctgtattttctgataaatttcataactgtccgtcggggtcttcgtggaatgaacgtcccagaacagttacaaaacattttaacacaaatataccggaatctcaaataatttccacaacagttcagtcgaactgttgcatttgacagtcccctcacggtggactactatattcttatgaacactttctaaaaaatagccataaaaggagaaatgccctatgatgatccacaagattgaaccgcataaatattatccggaattccgaaatcaggagccaaagccttccgattatctgctgttatttgatggggagaaggtatatctgccctcccctgcagagaatgctgttgctgcggatgcttccatgaatgcagatattgtgaagcatcctcaggtatatcttcctaccttcgaggaggttcataaattgcttggtgtaaaacagcccctggaacgtttctttttggattgcgaatatctcttttctattgatgacagggcattcttccgcaagaccgcggaggacgccggtgctctcatgctcccggaaaatgacctctatccttccggtgtattccgtaattttgaaccggaatatctggcgttcgccgggatcacagccacccagatcaaccgtttccgtctggaccggaagttctgcggccgctgcgggcatcccacaattcacagcaccacagagcgggcctgcatctgcccggagtgcggacagattgaatatcccaagatctctcccgcagtcattatcgccatcgtggataccatgcggaacaagatcctgctgacacgctacgccggcggttcctatcgtcactgggcactggtggcaggctttgtggaagtcggcgagaccttcaaaggggctgcccgcagagagatcatggaagaggtcggcctacaggtcagtgatctggtctattacaaatcccagccctggtccttcagtgattccgccatgatcggcttctttgcaaagctggacggtgatcccacgattactttgcaggaatccgaactcggtgaagcaaaatggttctccagagaggatgtaccagacctgccctccactatcagtgtcggtcaggagatgatcaccttattcaagaatggcggggatcctttatctcaataagcggcacttcttcgccacctttaccagcagatatcccttcgggaagctgcgaagctcctgctccgtgatgccccgcatcaatatcagcatgacaaaatagactaccgcagcgatcatgatcgccggaatgacagagatccgcatggacttcgtcaccatatacagaccttcgtagattgcccaggctgccgctcccataaacgcggaggcgaacgccggaatgacaaaagtcttgacgatctcctgtctatagcctaccgctcttcttaccgcccactggttcagcacacacatcataccggaatacagcgtattggcgatggcaatgctgtacagatccagactcgtgaacatcaaaagcaatactgctgccaccgtctgcaccactagcgagatccccgcattgatgatcggggtattgactttgcccagcccctgtaaaatggaactgtttaatgtcgacaatgcataaaagataaccgacaatgacaatgtcatcagaagggctgctgccaggttcagttcctctgccgtcttgttcgtgaacagcagactgatcaccggcttcgctaatacaaaaagtcccacagcacagggaatcgagatcaccatggtagtcttcactgccaatccgatcttctctctggctcccttcacatcccgggctgccatcagctgtgctacggaaggaatcatagcagatgccatagcagatgcaaaggctatgggaatattggacattgtcagggactgtccggagaaaataccatatttttcataaatagataccgtatccagattacgaagggacggataccatttggtgtagatactgttgttgaccgtactgcttaagttatatacagccgtactcaaaataaatggggtcaccaccagtgtgatcgtcttgaatatctgtccgtaggaatccacatgttcatgcctgtcacgctgcactctgcgcaggatcattccacgattcagagcatagactcccgccataaaaagcaacgccactaatacgccgacgccggtacccagtgcacttcccacggcaccgtaggttgctctcatcacctgccctgcctgatccgccggaacctccatcgttcccataaacatttggatcagaagatatgccgcgcctacgctgactaccgcattggcgatctgctccaggatctgtgatacggaggtctgcgccatgctcttatgtgcctgaaaatatccccgcagaacacccaggataccatagacaaagatcgtcggtgcaaaggtacgcagtactgtgactgctgctccggacacgaataatcccgctccgaaaaacagaaaaaggctggctataccgccaaccaccagtacatagatcatggctccgtggaacaatctgtgggcgttgcgatattccttctctcccagcttctgtgcgatagctttggaaattgccgagggaatactataagaagaaatcaacagaatgatcgtataatagttatacgctgactggtaataaccaagtcccagattcccgatgacactctgtaaagggcccctgtaaaggagccctatgattctgctgatgattccggctgccgccagaattcccgcctgcatgataaaattgttcttggaactgttcttatctgccatatgttatcttaccttatttcagttctttatccgatcagccagtcatacatctcctgatatttcccggcagataccttccaggagtagtcagtggccatggcacgatccacgatcttattccactctctcttcctgtcatagtaaatatgctccgcatagcggattgtattcagcatctcgtgtgcattgtaattcgtaaagctgaagccggtaccggtgctctcatactcattatagggctgtacagtatccttcagtccgccggtctctctgacgataggtacggtaccgtagcgcagcgcgatcaactgactcagaccgcagggctcgaacagggacggcatcagataagcatcacaagccgcatagattttatgggacagtgcatccgaataataaatgttggcagacaccttgtctccatacttccagtcgaaatgacggaacatattctcataacgttcctcaccggtgcccagtaccacgaactggatatcatcctgacacagttcatccatgacataagcgatcagatccaggcccttctggtctgtcagtcgggataccagaccaatcatcatcttcttatcatctacgcgaagtcccagctcttcctgcagggcacgcttattcttcaccttttccttgcggaaattcactgcattataggcttttacgatatttttgtctgtctccggattgaactctccatagtcgataccattgacgataccgcgcagatcatgacttctcgcacgcagcagtccgtccagaccctcaccgtagaacggcgtcttgatctcctccgcataggtatcacttacggtagtcaccgcatccgcgaatacgataccgcccttcagcaggtttgcatccttataagcctctaacttgtcagaggtaaaataatactccggcagtccggtaatgctctgcaccgtcttcacgtcccattttccctggaacttcaggttatgtatggtgataacggacttcatgttgcggtagaaatctccaccatggaaacgctccttcaggtatacagggatcaggcctgtctgccagtcatggcaatggatcagatccggctggaaattcaaaagcggtaatgccgacagcactgccttacagaaatatgcatacttttcgatctcatatctgggatcatccccataaggcttgaaaccaccaaaatagctctcattatcaatgaaataataatgcaccccggcttcttccgcttccagaacacctacgtacacattctgccagttgaaatccatgtagaaatgtgtcacatacttgagtttatccttcatctcctgcttcatacaggtatactttggaataaacactcttacatcaaaatactccttgtcaatatacttcggcaaagatcctacgacatccgcaagtcctccggtcttgataaaaggtactccttccgatgcggcaaaaagaatttttttcatgtaaaccctccacatatgctacggcttgtatttcaaaatatagattgattataccatgtttacgattcatagaaaagagggcagcgataatttacaaatcttttagagtctgtggttttgcctcagtttctgtaagaaagtcggatcctgtcagcgatcaacgcgataaattccgaattggtaggtttgcctttgcccgtgtcgatcgtgtaaccgaacatggcatccagggtctccatgcgccctctgctccaggcaacctcaatggcatggcggatagcgcgctctacgcggctgggtgtggtctgaaaacgcttggcgatggtcggatacaggatcttcgtgatggaactgatcatcgccggatcctccaccgacatcatgatagcttcccgcagatactgataccctttgatatgtgccgggactccgatctcatggatcatatccgtgacatccttttccaagtcatggatgacttcctgggtctgttcctttttttctgtcgcttttactgtgctgtctttggcatttttcgtagaaggaaccgtgatcataatttggaattccttgttggcattcatcagatcccccaggattttgtatactttttcattatcctttgtagttgtaatgtttaatttttccattaaactacctccatgactacaaaactacttttttcacgtaccgttctattataaatagatatgcgtcatggcttcaagcagaacccatcgcaagatttttccaaatttcgcagtataaaaaaggtaaaaaaaggcgcccggaatgacccggacgccaataagagggaaaatgtataagtagaaaaactacgagtaaagcaaattaaattaatgatgctctgccagagtgtgaagtgcttccttgatggctgtcttcacagtctcatcctgttcctcattcagtctgtgcagcagataggtcttggcatattcggtaccgatgctgcctaatgcttttgctgcttcgacacggatcttcggatccggattgtcgatcatgtgggcaatgctgttcacgctgtcctcatccttgatccggctcagagcttccagtgcggctaccaccacggtgtcatcggaagagctcagatatttgatgatcttgtcggattttcctttctcctgtaatttctgaatcttacttaaatcatgttgttccataaacacgcgcctctttctttctgccagcgcgggggcggtaaaatcgtctccggatcatcactgtatgtcgcctgtggtgattggcttctcttgataatgttatgataacaccttatttgtcagaaaacaattatagcaaaatgaaggatttctaaaaattctataacctgctactcttttgctcaaataaatcacatctgtattctaatgtcctgtagtccaatgccgatttcacatatcccgcagtcatatcattcattgctttctgcttagctccttgtattcactttgttggaatatacattcgggaaatcctctcgaagccattccacatattcatccgaaatactgtacaatttgaatgcttccattatacttcctttcttcggtataaaaacaaaaagagagcaaatattttactatctgctctctcagaatttaagattctccacttatatggcaggagctctcccgagtttaaaatcttccacttatatggcaggaactctcccgataatcaattccttatctgttaatcattatatgctttcttaatgaaaaaagcaatgagtattttagcagtggatctttcaaaatcttattattttctcccaattataataacatgattacttgctcctaaaaccgactgttcacggcatacactataatgatagtcgcaccaagttttgaactgattttcatcccatttgtcaaccttttgtgataaaagaggagctaaaccatcttgggcgaaatggtctacaatttttaatctatatctttggtaaattgattccatttcttcttttgatgagtaataagtatctgtccaaaagcatttctcatcatcatgcttcagcacaccagtttcaataagttgcttcgccaagtgttcatccaaatatttttcattgctcgtagcaatatattgaaaaacatagtatcttggaatgtacgcagtaaccaaaagcccgcctttccttaacactcttagacattccttcatgcatttttctctctgctcttctgtaatcaaatgataaaatggtcccatattgagaacaatatcaaatgaatcatctgcgaaacaggacatatctgtagcatccaaaacagaagtattcatatgataatttttattggtaagagttcgattaataatgtctatatgccttggcgtaatatctgtagcagttacatcatgccccttatctgcaaaccagaaagcataaattcctgttcctgctgcacaatctaatattttactcttggtgccgataatctcatccaaaactcttgtagttgttacaaattcaattcttcttgcattatttgtagtcaaacgattttcctctttgtaattctcgtaactgtcaacaacataatccatcactaattcctccgattctattatttttatgtattaaaaaagctaccctccttaaatttactttaaggacgatagctgatagcttcgtgttaccaccttaattcatctatatctcgcaatatagaccttagcaagtacggaaatctctttcgatactctgacgctataatgggcgttcccagtgtagcctaataaatatctcactcggtacacggctccaagactggttcaatatttcttcaatagagttttccaccaagcaactcctctctgtaatttccaaaatatttactatctctcttcatcgctttttaacatagtagattcataattattttttgtcaagacatacaaaataaaaattattaattattgagaataatatctattatatctttctttcctttagtgtacaatcccctattatcagcatacttactttccagttcttccttcaccctctgatactgcaaagccatattctcattatcatttagataatctctgaaatgaatataatttttccactcagttccgttccatttcacaatatgaatatggtgtgtcctgatatccttttccatatcacccattacataaagaatctgatcttccacatccgaaccacgataaaagattccttccttctgtaactgctcattatatgacattattttctcaaaatcagttaccccaacagcaatatcaataatcggttttgctttaattgctggtattgctgtacttccaatatgttgtatatcaacagcatcatcacctaatatagattttagttttttgattgtttgaatggcagcctcatcccactgtttatcatgtggttcaagctgcactgttcctctttttaatcctaatgacatagcaatctccttaatattacatcacaatttcactatcaaaatattgcccctgaaaataaatctgctgcctaatctcatcttttgaaaacatcattccgttaggtacaactacccacttttcttctatatcatcttttctatgaacaatagccataattttacctgtaaacttgtctactggctcatttacacctaatatataagcgtcctgctcttctccatctggtgccataactccttcaatgtaaccataatttataggataatacatatctttatattctggatgataacttcctaatggtctatcgactgtgacagttactgttgctccgattatagaattacttttaacccgtaaatacttttctatcaatttcggctgtatcaacggatatgtccagttctcaggcaactcatccataagcacaactttctccatttcgctatgtaattctttcgcaaactctgttatctctgcaaaacaaagcagtccaaatgtttcttcaccggtatcatttactctggtcttacctgtcaccgaatatacgcatattggttttatctcaaatttgatagctccagtctcttcctgcaactcccttttagctgtttctaaaatatcctctccagcttctctatgccctcccggcacttcataggtatctctttctttatgcttacagaatacccacttgccgttgctctgtgagattattactgcaaacttcaatagttcatcattaactgtatcataaaattttacttccatcacatttttccttcccattctatcataaactcattaagaaattcctgcattacagcctgtctgtgttctgccagtttctttccctcagtcgtattcatcatgtctttcaacaagagcaacttttcatagaaatgatttatgcttgtagaatcttggttattccaatactcttctttgttcattcccattttaggttttatttccggatcataaatctttcttcccctactgccgccatatgcgaatgttctggcaattccaatagctcctatagcatccagtcggtccgcatcctgcacacactttccttctatggtatcaggtacgactgaatcagttcctgcgaatgaaacctcatctataattttgcgtaccgcctctatccttttaccatctattttgttaattgtcataaaatcaactgcatttttcttggtagcataattgtcgggaaaaagcttaatatcatccacatcatgtaacagagctgccaactgcactgttttaacatctgcattttcctgttttgcaattttagtagccagtttatatactcgtatcgtatgataatagtcatgaccactactgtctcccgaaaatataccttgtataaatctcttttcattatctgtcatattttctcctaatcaacctaacaaagcaatatattgatttatgaaagtcattactccacccacaaatagagccaacctagagccattcgataaaacaaatgccggaaacccgcataaatacaggctttcggcattttaatccgttattcaaactcggcaaatccgaagatattactaaatgtatttgtttagtttccatctcttttctgccgttattttatctctgttacatatattattttggctcactgattttctgttgctaatttgttgccataaaatctatattatcctgattttggagataccctgatttcaaaaggggagtctatttcccccttgaaaagcacctcgctctccccctactgtattttttctttagaatggagagtcagggagttgccttttttgatattggttgaaccatcgcattagcttcgcgttgtttcgtattccaatcacatatttcaaaattttcattgtaccatcttatattggacattccatatacatttcccatttttaatccttgataatatgcttgtccatctacaatcgttccatgatacatgccattgaatttgcttccattatatagaccaactagttgcggaatccctcctgtatgcttatccttgacattttttacaatatcacaaaagcaatggaaataatttctacttgtgctttcgttatttccatttttgaacctcaaaaagttctcatcatattcttttttcccacttccatctgaaaaaaggttctttgacttcttaaaatcagtttgtatttttatgttctcccatattattccattccaaaagtatacgttcgcatcaaatattctttttttatttcgccctatatgatatattttaataattccattattaagtttgtatgctgaatgtgctcttttgatttcattaaaaataatctcacttctatcttgataatccatatctgctgataacagcattcccacatcacacatacttgttaagcgagttaatatctgatatgtaaataatgtttctccacaataccctaatatatcaggagtattttttaatgcaaatgtcttttggctataatcataaaagttcctattatcagaaattctactatcactggctatatatgcagaacatgggcctctctgatcacaagccaaccatcctacaattaatgtcatttttactaattcctctttgcaaatccattctaaaaatccataaactttatgaacttttagagtggatttgcaccactatcttttatcatctgataaacgtcttactcttagaccactagaaccatgttcagtattattttatcactcttgcccccattatacaacatatttccaacttgagcacttgtcccaccacgttttttatactatactgatatcatcaaatcgaaagaaggtactctcatgacaaaacaggaaatcagcgagatcaaaaagctgttcaccccgaaaaactgctccatcacccggatctgcggatgctatgtggatggagagaagaataaaaagacggaattaaagcaggcgtttctggcattgccggaggaagaaatgttcaaatacttcgagattctgcgtaagagtctgtccggcaccatcggcaaaaatctgctgaatctggaattcccgttaaagagtgaaacggagggcggcacgcaggaattcctgctgcgtctcagagatagccgtctgaaggatgatgcattgcttgagcagttctacgaccgcatcattgagtcttatgaatatgtgggcaattatctgatcctgctgattcacgatgcctacgatgtgccgggacgcaccagagacggtatcgagatggaggatgcttccgatgaagtctatgactatatccttacctgcatctgtcctgtggatctgtccaagccgggactaagctacaacgcagtggaaaacaccttccagaaccgtatccgcgactgggtggtaggtatgccggacgctgctttcctgttccctgcgtttaatgacagaagcactgacctgcacagcactctgtactattccaaggatgcggaggaattaaaggagaactttgtggatctgatgttaggctgtcctcttcctctgtccgcaggcggtcagaaggaaaccttccagtcactggtggaggagaccctgggagatagctgtgatatcgagacggtgaaaaatatccacgaaaaaatgaatgagattgcccaggaacataaagaagatcccgagcctgtggtattagataaaaatgaagtaaagaccatttttgccagcagcggtgtagccaatgaccgcatggaggtcttcgaccagtgtttcgatgccactgccggtgaatccacctccctcatgatgaccaatgtctacaatccccgcagttttgaggtaaagacaccggatgtggtcatcaaagtcaatcccgagcgcacagatctggtaaataccaaaatgatcgatggcagacagtgtctcgtcatcgaactggatggtagcgtggaagtcaacggcattgctgtccgggccgccggaaacggagcatctgacaattccatagaagattaaaatacatgaagtcaggggcttttgcccctgactttgttgcctacaaattgttccgtgctgtgcactcccacaattctaaccaatcatatacattgcattatgatgctctcacactttggatatccgatctgagagctattcagtgacagcgtataattatctgccattccccatttctgatccgtataaaaattgtagttcgttctgcgccttttatctgtatcatttatcatctttacagcatctgattcactgacattgtatagtttacagatgcgctgtaccttttccggcatattgccgtgtatgaaaacattcagtacatcatctctgctttttaagataaaatccgcatttcttcctatgatcacacaactttccttttcagcaatttccatgatcacttttctttgtgcctcatacactatgtcctcgatcgatttcccggtaatgtcacgtcctgtaaaggcataggcaaacatacctttcttaggagataactctgcattttcctgaatatatttcggtgacagtcctgactgctctgcgatctggcctatgatatccttatcataataagcgataccaagtttttgggccacttcttcaccgataaaacggccgccgcttccaaactctctgctgattgtgatgatcttttttgtcatagctgtttcctccttaatctaagctttctactttgttcctttcgattttctttaaaaatacatatcctgccagacatgctataaactccgtaatgggaaatgaccaccagatcagagaaactcccgtctgtccgtttcttacaaaaatggagaatatcccggcaagcggtaatataatgacaagctgtctgagcagtgaaatcacaagggattccaagcctccgtccaatgcctggaaaattccctgatatgccacattgatccctgcaaaaataaagctgatggaaataattctcattgctccgataaaatactctcttgactgtcctgcattaaataaaatagcaaaagcccccgggaatatttccgtgatcgccactcctataaccataagcgcaatcgtatatagcaatccatatctgatgccatcccggattctctgtttactatgcattccgtaagcaaaagcgatgatcggcgtgatcgcatctctaagtccgaaagcaagaaataacacaaactgctgtaccttatagaacaatccatatgctgtctgcgccgaaggactgaattttaaaatcaggttcatcacataaaccatgatagacataagtgcctgtgcaataatggccggaagcccaatcgcatagatttccccgatgatcccaccatccggcttcatatatttcacaccatgctcaaattccttattgcattttatgtggaatacaaacaacagtaccgcagacgcaacctgtccgatcacagtggcataggcagctccctttactcccatttccggaataggaccgataccataaatcataatcggatccagaataatattgaccactgctcccacgacctgaccgatcgtagaatacagggaacgtcctgttgcctgcaactttcgatgcttttttcccatttccctgtccaagtgttctcgcaagcagcgcatttgtccctactccggttccgattgcaactgctaccataagcatctggaccgggaacaccagcgtaagtgcattaagcgcagactcacttcccgatctcatatttccaacaaaggcgctgtccacaatgttgtaaactgcctgcaatgccatagataatatcatcggtattcccatcttcaccatgagcttatttaccggcatctccttcatcttgttactttctgccatcttcatttcatcctccttgttttgtttttttgcacaaaaaaagtgtgtgctcaccgcataagctggacttacgctgataagctacacactttttattgcattatatttttattttttcaaaaagtcaaacaattttttcagggttgactttattccctgctgccatggcaggtaaaataaatcacctgatactcttttgcgatctctgtaaggaaccgcattgctcccttggtccggttctcatccagattcacaaaaggatcatccagaatcaaaaacggcttctgttcctcatacatggcttccaccaaagcaagtctcatacagataccgatcaggtcacggttgcccagactcagatatccgatgtctcggggcatattgccttcaacgacctgcaatctggtattggcatccatctgataattttcgcattccgttcccgtgagaattctgtaatatttccggaacccctgcatgacaggttctgtatattttgcagtgaacgaactctttgcctgttccaacagattttttgtcattccaagcaattcatattgtttgagtccttcctctgtcttctcctgcaacgcttccagctcttcctgcatattttccacattatcccaggattcctgtaagtcggaaagttgtttctgatagctgtcaatggtctgaaaacgttcttccatacgctccgaaaggacctgcatttcatctgccagactttccagggattcctctccctccgggaccttcagtgccagaagtgccggaatgtcctctttcgcttcaaacgcttttatctcctgctcgattctccgatattcctgtaactccttctcataatcctttctatgactttccagttcggccaactgttcttccggatgctcctccggaatcagctgcaacgacacaaaatagtcttttacctgttcttccagcgcttcgtatttctgtttttgctgtaaatatttcttttgtttttccagtaaaagctgcctctgtctgcactttcccgccagttcatgcaatgccgcaagataattttgtgtttccggtacttctccgtattctgcaaaaaactgctgcaaatctttctgcaatgcggcaattctcgcagtcttttcatccgatccgtcctgcttctgccgctccaaaagtgcctcgtaatcttttctcttattctgcagttccacaagccaggaggtcaattccagtccttcccgaagtccccagcgagtgcagaaatcctccatctgtccttccgctatgctgacctgtgtctcaagttcttccatttcctgttccaaataggaaagctctgtattttctcccgtttggactttggatctgcctgctgtaaacaacagtgccgctgccacagctgcaattcccagtacgatcaggactcctccgatcactccctgtcccaacaggatcacagcaaaaccgccaagcgctaaaagaatgccaaaaagcaatagcatttttttccttttacctgcttcttcctgctcccgtaagcatctggcatcttcctgtgcctgtatggattgcagggttttcctctgtatttctttcgcctgcagaagactttttccttcattgcggttcgtccaggcattttttacactgtcgatttccgcctcctgcggcattccttccgcaaaatatccggaaagctcctctaaccgtctgctctcttcccctgacagggcattttttcttgtcgcgctttccaggctctcaagttcttgtgcttcagcatatttttcttccaaccgggcattgtccgccatgggaaaattgtctttacactgcgcctgttcttcctctgtcaggcaatagatttccattgctttgcggacagaaatcccctgattgcaaacggccgttttttcacgtaattcttccccttttggtatcacgccgttaaaatagctttccgcttcttttaaagtctgctgtctctgtgccatttttgcacgcagatccaggtacttctcttttttcgcctgttgatccttataaattcccagtttcttttgtctctcctgcagttctgtcagttccgcagaaagcttttctctctcctcgatcgccgcctttttccgggtatcaatactttccatcgtattctgtatctcctgcccgttacggatctgcgtcttcagttccgtaatgcggtccttgctctgacggagcgatccggtcttacgagagggtgacatgctgtttaacagatcgttcaaccgcttgtccgctgtctcaaaattattgatatcgtccgtattctccgccagattcccgattttggcattgatgccgtccgtaacaaaggtctcgcagtcattctgtgagatgaaaatcgttcgttcaaaggatcctgcgtcgatccggaacaactcttctcccagattttgtgtgaaatctctgcatggcagatttgttttcgtatctgtcagctgaaattcatcttctgcgcttttacttccgaaggttctgcggacagaatattgctttccttcactttcaaattgcagttctccgccgtagacgcccttttgccagggactgtatctcttcctctcattttccagcggatctctcttcccttcattccggaatccaaacagcataacgcgtaagaatgcagccagtgtgctttttccccagccgttttcctcacagacggtgttgcagccatctgtaaaatcataggtaaagtcacttagttttccgaaattctcaatgtgacatttgatcagtttcatgcgtccaggatctcctctccggccagtgcctgcaatccgtaatgtatcactgtcgccttgtcctcttccggcagatccgctctgcccatgacagtacggataaactctccctttaaggacttatcctttgcaaaagcagcataatccaccagatacgcagagttgtccttaatcttcacaaaataaaaaaggtggctgaactgatgtagcagaaaatcaatatccttttcactttccacatctattttcccgaccagttcatacttgatcagacttttctccgggtaacctttcccggctgtctcatctctcatccgttccaggatttccgtcgtggattcacaaccggtaatatccaccggaatggtatagagcttccgggatgcgaaaggaataaaagtactgtcaattgtacctgtcagctcatcaatgtcaagcatcacaaaaccatgttctccgcattcgtcaaaccctctgccctccagacagccgggatagcaatagacgcctctcgcatccagacgctcttttttatagctgtggatgtgtcccagggcaagataatcaattcccttatttttcaatgccgtcagatgaatgatctccgccttatctctcgcactgtattccgattcctgcccatgcagaactacaatgttgcattgatccacatccagtgacagcgtattatatatgcttccgctgttttccggtgtcagttccaccccggtaactgcaactcccttacctgaggtattctccgtccctgaaagttcatagcttgtccagttgttcccgaatagatgaagattctccggaagttccgaaagactggacgtaaagcttccttcgtcatgattcccctgtaaataataaaaagctatttggggatgtccctgaattaagtcttttaccacattccgggcggtagcggatacgtttttcgtatcgaacagatctcctgcgattatgatcgccgacacgccctgttctgccccgtatgcaaccatattctgaaaggtggtcaacaattccgtcttacgttctctcgctttttctttggtcagatttgcactcattttggaatccagatggatatccgcacaatggatgattttcatattgctgcctcccgcattaaccctgtagcacctgttgcaaaagattgtaacgatgcagaacctcattcgcaaaactgcatctttgatgttctcgttttgcagacatattcattatatacgaatctttgttcgattacaacaaaaacgtatcggtagtgagacattcggtctcgttttccgatacgtttttttaagatggtgaatcacctgtgtttatgactatacctgcagtctgccggctgtaatgagtttaccgctttttctgtcaaataacagaatatcttctccaccgatctcgaacttcacttcctggccgatcttgtaagcggtattgccgaagaccacgccggtcaacaggaaatcaccgatacgaagtttaatcgtggattccatacccgtgggcatggcaccgtagatcacgccgtccagtcctgcgccatcgtgtaattgcagggcttcgggacgtacaccgatgacaaaatcctcgttggtgatcacgggagcttcctgcagtgcataatcatcctcgttcactctggcaatatgatacttgaagacttcatccttgttggatttctccacagctttcttatcctgcattttctctttgtgacgggctgcctcatcagcttcgttcttatctctctctgcaaaccatcttagcagatccagatgttctttcggaacaaactttgcctttctaccgtctaagatcgtcacatccaggctgccgttttcattctgcacacccttagcttcgataaaattaatggaaggatttcctacgaaatcagccacaaacaggttgttgggtctgctgtacacagtcagcggtgcttcatactgctgcaatacaccgttgttgatcagacagatcttcgttgccagtgtcatagcttccatctggtcatgggttacatatacgaaggtgcttccggtctctacatgcagacgctgcagttcatatctcatttccagacggagtttcgcatccaggttagacagcggctcatccatgaacagtacctggggttccggtgccagtgttctggcaatagcaactctctgctgctgtccaccggacagttctgcgggataacggttcatgaacattccgatcttaacgatacgagatactctgcgtaccgccaggtctatctcttccttggaatattttctgaccttagttactaccttgccaccggatacgacttcgaatttctcgttaagctcttcccctttttccttatgacctgccaggatgctgtccagcttggcagtcagttcctgcttcttttgttttgatacactttctttgtctgctgcctcgtggagtttgtaattatacagctcctttgcagtatagatagaaatggtataattatcgatcagcttcaggtagaccatatccaggtctaattttccctttttatctctacattcctcaatgagttttaccagctctcccggattctccagtgccttgatcatactttttaaagctttggcatcctcatcgatcacgggaagttcttccttgatattgcccagtccgaaggagatgttctggtataccgtcatgttcggccacagtgcgtagttttggaacaggaatccgacttttctcttatttgcaggaacattgattcccgcttcactgtcgaataccacccggtctccgatcttgatctgcccgctggtaggggtctccagaccggcgatcatacgtaaggtagtggtcttgccgcaaccggagggaccaagcagagtgataaaggaattgtcctccatatccaggctcagatcatctaccgcatagaattttccccaacgttttgtaacatgtgttaatttgatttccggcatagttatttacctccgataccttcatccaggctggacccggtcagtttatttaccaaagtgttaaagatcaggatcgttacgatcaggatcaggttgatggcgctggagaatgcatacagtcccatctcatcgaaataatccagtgtcgtggagaggataaagccctgcgtacataacagtaagaacagagacagctctcgcagacaggtcataaacggaagcatatatccgttgataatggaagacttctggatcggaatgatgatccgaagcattctcttgtaccagggaatatcctggatgatggccgcttcctcaatctctcccgacagctgcagcatggagttcagtgcacttctgctggcgaaaggaatgtacttgatcacgcctgcgatgatcaacaatgtgtaagtgttgaacaggttgatcttgtcattggagaacaggatgaagaaagctgcgcccactgccagggacggcatcaggtacggcaggaatgccacaccattgacgtaattcgcccacttgcttctccggttcttggatactgcataaccgatcagggtgccgatcgtacctgcgatcagagcacagcagacagcgactaacattgttcccttgaatgctctccagatcagcggattgtggaggataccgggctgtccgtacagagcaccggctccgttgttatccgtcagccaccacttggtggtcagagcgctggaatccatggtgtacaggaaactataatctcccggattcggaaggaaagtctccagtgcgaaggacaggatcgggaaaatactggtgaagaaggtgatgacgatcaggatgaccgcgatcagatatttcccgacttttcctaagttgatcttggagatctgtccggatttaccggtaaccgtcgtataatttttacggctctttaagctcatctggttcattaacaggatcgccacaccgaagatcatcatgatgatggcaagaatactggcttccccggtatacttggagttcatggagatgtacttggtggacagagtggtcagtcccaggtagtgaggtacgggataacttcccatggcgcttccgaataccagcaggatcgtggaaagaatcgccggtttgaccatgggtaaagtaatacggaacatggtcttccacttcggtgtatccagaatcgtcgctgcttcctccagattggcatccatgttgcggaagatgccgccgatcagtatgtaggcaaagggggcataatgcagtcccaatactactgcactggggaacagccccaggcaccaccatttgggcatcgtaatgtgaaagagcgaagccagcagtccgttggaggttccggtgactgcattactgttgaacacattctgccataccacagccagtgtccactggggcatgatgtaggggaaaataaaaatggagcttaaatattttttacattttaaattggttctcgtaattaagaatgcgaacaagccgccgaacaaaatggagatcaggcaggtaaaaactgccaaaagaacagtatttaacagcggtgtccacagatttgttctcgccagtttactggtgaacagatccacatagttggcaacggaatatccgcttgcttttccggtaagatgtgcatcgatggtgcccggatggatcttgaaggtatcctcgacgattgccacgatcggcgccactgtggtaaaggaaagtacgataccaaacagaagcagaatgatattttgtggcttggagaaatacgtcttgatcttgttcagaacaatcaccatcttgcttgttttttttgtggcactctgattcatggttaacctctcttcccaatacaagcttttggtcctgtaaaccatccacccctgcgaataagaaaactgctacttacatgcaggcatgatgtagcagattttcttattctgacaggacaaatagtcacttttttatatcatatatcactcagcagtatacttcggtaacagctcgatccagcttcctaccgtgaaggatacggatgcacagtactcaggatcttccagcaccagttcgccatcggtagaccaccagtcgaagcctctgtcattcttgctctcgtatacaacattaccgttctcatcattaccgccggtgctgtgctgataggtagcttcgattgcctttgccacttcagggttagcggaataaccgcccatgtctttgccccatgcgctgaagccgtcttccgtacaggtcatgtatgcgatgaaagcacatgcagtccaaggcagcgggctgttatcagtaacgaacaagtaatgacagtagccgtagccaccaattcccttatagccatcctgataagcggcaaccttgatattgttcacagatacacctgcggactcttctacggagcgcagtttactgtatactaacagtccacactgatcggtagcggaatcggataccagtgtattacagataggtccatcatcggtctgggcattgtagctgcctacccagagcttgatccatgccagggcatatttaccatcagcgcctaagcctaaatcatttgcctcggattccatctcatcaatcgtgggctggaagtaagcctgctcatcagcgggtaatgcattgaaagcatcctttaacatggctgcgtatttgtcttcggtcagcatgtacaggaaattcttacctacaacctcggaatcaatatccatgaacaatgcgtgagttccttccgctacgaagtcccagcagttgtcatatactttatctccggtacagttgtattcgaataccttattcagcgtctgtaatgccagataaccgtccaccgcatctggtgtggttccgttagcctctgcccattccttgggaatgaacgtatccagtattccggtctgtgtcatcttggattcgatctgattaccatcctggatcagggtcattgcgaaggttccttccggcttcagggaatcagcggtcagctgttcaaagatcttgttgttcttaggctgctgccagtcaaattccatgctgtaagaaggatcaatagactgcagatactcgatgaacagaggaagtgctgctttaccacggctggaattacctacaccgtaaaaggtcttgccgttggattcttcaatggccttctgtgccagttcctccatggtcattccttctgcctgtttgatgatctgctgagttgcagtaagatttgcgtcgtcggctacctccggggtcttggtctctgccaccgtctcggttccggctgtctgtgtgttatctgcgcttccagttgcctggttctgggtctcgctgctgccgcatccggctaacataccaacactcagtgcacagatcataagtaacgatactactcttttcttcatatgctgtcctcccttgaaacatatagtttgtataacccttcatggtccacgtacttggaatgggatgtttcccacttccgttctgatgattctattatacgttgggaattcagcaatttgtataaggcaaaactgttattattttaatatttctgatactatgtatagtttttccgatattttatcgtttcttttgtgcatctttgtggttttacatgcttctatcctggtattcggagggagtaacaccaacaatcctcttaaagctgctggaaaaatgtgcaacatcacgatagcctacctgttctgcgacttcatacaccttattccggcagtcattcaacagtttcatggcagtgcgcatacgaactctggtgatgtatgccgccaccgtataatccgtctcccttttgaaagtatgactcaaatgtccttcactgatccccaggtgctctgcgatctctgccacacacagttccggatccccataatgagcggaaatatagtctacggctgccatgacatatttactcttgtcgcctttatttaagaccagttcgggaagcggctcctcctttctgttttccaatttttcctgtgtcctcttacgtttctccagtgcattgttcattgcctgttccagttccccgtctccaaaaggctttaacagatagtcactggccaataatttcagggcgctctgcgcataggagaattcactgtaagcagttaaaaagatcacactgacatcattgccttctgcccgcagttccttcagcatttcgatgccgtccattttgggcatacggatatcgcagatcagcagatccggatgatatttccgcacggcttccagtccttcgatcccattgccggcttccgccacgacgacacagttcagtgcctgccagtctgtctccatcacgattcctctgcgcaccagcatctcatcatcgatcacgatcactttgtacatcgtattactccctccattgtctcttcccgttttctgtatattccccactatccggtaaaaattcctctctgtccgttgctctgtatcggttcctcaggcttctccgtatcttaccggcaatcgtaatgtcactttcgtaccgtggacttcgccttcctcttctgttcgctgtccgtccgtagggttttcggcgtttaaggtaagactctccatatgaatgccgtattcttccccataggtcagccggatgatcgtgtccacattggatactccgatatgccccaccagctgctcctgtcttctgtgattgatggcatccatccattcttcaggagcgccacagccgtcatcggttacttcaatacacagaacatcttcctgttctgtgatccgcacaaggatatttccttcttcactctcctttaatccgtgcagtaccgagttctccacgatgggctgtatgatcagctttgggatcacgcactcttccagtccctcctgcagatccacggtgtacgagaacttatcattgaaacggatcttttggatatctacataacagttcaccagttccagttcttctttcagatagatgaactgtctcttggagatactggtcctaaggatcttcgccagtcccgccgccatggtagcgatctccgggatatggttggccttcgccacccatttcatggtgtccagtgtgttatacaggaaatgaggattcagctgtgcctgcatcatggcaatatgggaagcattgagttccttctgcttctccaccttatcctgcacgctttgctccagttcgttggccatgatattaaagttccgggacatctgtcccagctcgtcctctctgtcagagacgatcctgacagtaaggtctccttcctgcagtgtacgcatggccgtattcatccgttcgataggacgggtcatatttctacccagccgggaagccaccagaacgcacagaatgacactgatggtcagcatcacgatcaacacactgtacatggagttcaatacttctgttgaaaacacgctgggacaggacaatgcagtatacaatccactgtctcccagcggctggatcagcagttctccggcacgatatgctcccagcagcttatgaccaaccatgagttcttcccggatctgctcttcctgcaggttaccattatcataaatggttctccagaaggggtccatgattgctacctccgttttggcatttcccttatcatgaagtactttttcaaaattttctgcacgcatgctgatcacaatatagccttccggtatactgtcttttcccataagttttcccgctgcatacaataaaatattgctgtcattcgtatctgcccgccgcagcaccaacgtctctttactatcctcgactgccttcaggataccccaatataccggcagatctgtcttggcacttccctgtgccgtagtgtaaatacattttccgtttttatcatacagatcaaattgggcatattctctgtaatccgtcacttcccgatagaattgcaggtaaatcttgctcttcgaccaggtgtcatcttctcctatctgctccacgatccgggtgttagcatttatattctccactaccatctcgaactcctgaaacaattccaatatgccagcatctatctgttccgcctgctctgttacttttttctcataatcgctgttgatcttggtctccatagtctggatcagggataccccaaaaagcaataacggcaataacgcaactacaccgaagcagaccagcaactgtctgtgaaacgactttttaatccactttttcatctgttctcccctgtaacgtctcccatgtgttcagaattttttccttttcctgagaagcccaatgaatatcataatcgatcgtttttaattttgtctgctccggtgctgcatactcttccatatcattgcggacagttctccggaaaaagacttcctccaccagtctctgtacatcactactgacggtaaattccagaaataatttagcattttccatatgctttgcgcccttgacgatcgctgtagcgtccggtatggcactggtgccgtccgtggggtagatcactgtaatatctgccccttccagaatcttttgtctcgccattccctctgtggtaatacctaccagtctggttccggcattgacttcctccagtactgctacagatgagggtgacaggtaaccatccagtgcaccggtaaaatcctccagcgtcttctgctcatcctgatccgatacctgaagcatcgtacagagtgctgtataactactgccggatttcgtgggatctgcgaacgcgatctttcccttccaacgatcggtctgcaattcctcccaggttctgggagccgctacgggatagaccagtttattgttatagataaatacagtcggtagcacagaaaagggcgtataggcatctccctccgtgcgatactgttccgcaatttggtcgattttgctgaccttataaggttccagatagtctctgcactcctcaaaattttcaacacctccaccgaacatgacgtcaaaggtaccgggtgcatcctgttgtaattcatcaaaaagtgccaaagtatctcctgctttgagctctacaaaaatccctgtacgttcctcaaattccttgatgatcggttcgtatacatctgctttgtgagcggtatagacgatcagttttctgtcctccgggatctgatagaccgtctcttcggacttgctgcagccagtaagtaacaggagcgccgcagtcagtccggacagaacagatattcctgctttatgttttttactatacgaagtcctcataactttgcccttatctttttcgtttgtttattttcactgtattgtttctgttatctctctggtttttcgattttgctcccggctgccgtctgttgcagtctccgcatccggtcgtactgcccatacattttttgcacttcgttctccaggatgtagtagtggcggatgtatgggatcagcaggatcaggatcactatggggagtaataaggtaaaaaggctgtcggagatcacacttaagacgatcgccagcatctctaacaacgcaaaagtcaccgtaacgatcagatggatcaaacgctcatgctggaaaaatcccacctgcacaagatgctccttaagcttgtcctgaaccatttcctgcatgggctgttcctcggtatccgttttctttatgtcagttttctttatgtcagttttctctgtgtcagttttctctgtgtcagttttctgtgtatgcgtctgcctctgtacagcctgcgttgagtattcaccgtgctgtgacaatgtctgcacgttctgctccatttctgtcagccattcatctatctgttttcgatattgcaaaatgcgctgctccattattttccccaccttcccggtacttgtattactccatcatagctattctttcgtttttcgtcaatgtgccataaatacaaataattccaaaacataaaaaaacgcctctatgcatacgcataaagacgttttccttcatttcaaacataaaaatggggcctatagggctcgaacctatgaccctctgcttgtaaggcagatgctctcccagctgagctaagaccccataaagattaatgaaaatctttagcgacccagatcggactcgaaccgacgaccttcgccgtgacagggcgacgctctaaccaactgagccactgggccatatttattatttatcttatgaaatggaactgctttcagtggaccttcggggactcgaacccaggaccgaccggttatgagccggttgctctaaccaactgagctaaaggtccgcaaccctttcgggactgatctgtgatcagatgactccaacgggaatcgaacccgtgttaccgccgtgaaagggcgatgtcttaaccgcttgaccatggagccgcaatatttattttcttatgaaaaaactccccgagtagggctcgaacctacaacaactcggttaacagccgagtgctctaccattgagctatcgaggaaaatgtctttgcgtagcaagaccatttaagaaaatgctttgcattttccgtgcattgccaagctacttataaagggaattttgttccctcaaaaccgaacactgaaatctaatcttttatatcctaacttccatcctgctttcctatccaaaacctttggtcaagccctcgaccgattagtaaatgtcagctgaacacattgctgtgcttacacc

SEQ ID NO: 11379 - DNA, 123409 bp, Unknown
  gut microbiota DNA sequence
tacaagttactttcctgtgggaatcgactatggaatgccaggcgaagcgctactccgccagatacatcttcaagcttccttccacggcatccatggcttcctccacactcgcctgcccgtttaggtatgcctgcaggctctcggtcagggaagtctcgatctgagtgtcttccttaaggcacagggtggctgccttgcacagctccatcagatggttcgcggtctcctcagagtaagatttgatggcgaattccacgctgctgccgtcgatatcataggtggtataggcttccgccttgctgcggtctgctgcagcctgcgtctccaacgcttttgcattgacagggaatccctcataggtatccacgctctgtaattcttcggacagggcaaaacgcaggaagtcttttgcagtctccacatgctcactccggctgttgattccaatgaccatcttcggataaaatgcattttccatggagaccacattggcattcaaaagctccgccactgcataaggcatcatcgcctcattaaagccgtcggtctcctgaagtaccagcttcacatcagaccccagatcccagatattcgctgcacggccttcttttctggaaggcaggataccgcagttatccgcaatcttcttcaaatcttccagccagggacgtaaggtatcacgattcacctgacggttctgtaaaatatcatccacgatcaacggatagaactcttccaccagttcgccgcaggtacggtctcccatataactctccgtctttccggataccgcctttgcaatagcgtccatgctgctcatttcctccggctgcacatccctgccgacagctaacaataatccgaattgcagcggcaccgcataccgtcctccatccgcctcttcataggccgttgtaatgttggaaagcagggttccgtcctcttccatgggctgcaatatctcttgcagatcaaacagcaagcccttagaggcatacgtgtccagtttcagatggtccatcactatgagatccggtccgttgccggaggtcagggaagtgttcagatcctgatatatctgctgataatccgcatttccgctgtatttatccgtcatggagattgccgcatccacatggatcagcacctccggatgctgcttatgatactgcaccgcagcctgctgtaaaaagaagctctcctccacggtatacagcgtcagttcctcggtcacctctatcaccgcatcgggatcatatcgataaatcattattttgtccccgctctcacttccaaaccacgcgtatacactgccatccgacagtgccacaatatccctgcaccattgatccgacagagaaaaaccggtatcgattccctgaagcagcttctgccagttggtattgcccacgtcgcagcggaagaatccgtctgcatccgccgcatagactgtgccgtcttccagcacgctgaaataagcagagctgtaactgtcctgggaaaagggaatcactcccttagcttttgccccattgcttccgtccagctgcatctgcaacagaccgttcacattcccctgttcatccgcctgtgccagatacaacgtatctcccacagcactgacccacttattatccgacagactaccattgtctgtcaggctgtcgctctcctgactgcttaccagacttccgtcctgtgccagtacaacatccagggaaaaataagacagtcccactaacaatccgtcctccgtcattgtcacatactgtggcgtatcatagaaccgatagccatccatatccataggctccagccacttctgtggtgtaatatccagcgcactgccgtccgcttccttccacagatgtgcggaagagctctcctcgtcccggtaacagttgccgtacaggtactgattcccctccgcatcctgcaacagtgtaaaactgtcactgctctccagactctctccctcgggaagcgccttcagccagtccttcgtcacttccgtcagagtatctccttctcccagcttccattcctccagagtggtctgtccttccgatcctcctgccacgagaaaatgtaattcatcacccgaacggaagatctggctgatatttttgtccttccattcctccggaagtgagagttccgtctctacatatcgtcctttctgcacttcctcaggtgacgctgcaatctgctgatcgttcttattcccacacccggtgaacagtcccatgacgatcgccatacaggttgccagtgcgattcctttttgcatgttattgttattcaaatagtttctgttttgcatctttctctcccattctgctgtgtcgtttcacaactttttcttacaggaaaagtatagcggtttcttttttaagataacagcaggcaagggttaagatgcctttaccatatgattaagattttcttaacgcaaaacggaaccggcacaaacgccgattccgtcttctccgggaacccttttaggaattcaatatcttcataaattcttctccggtaatggtctctttttcatataaatactgagacagttcatccagtttagcacgattttccatcaggatctgtcctgccttctcatgctgttttttcaccagctccacgacttctctgtcgatggctgtctgggtctccatggaacaggtcagggaggaatctccacccagatactggttcgtcacagtctccatggctaccatgtcaaaatctttgctcataccgtagcgggtgatcatgcctctggcaagcttggtagcctgttcgatatcgttggaagctccggtggtcacagacccgaaggcgatctcttccgcggcacgtccgccggtcagtgtggcgatcttattctccatctcttccttgctcatcagataatgattgccttcctcttccacctgcatggtataacccagtgctccggaagtacggggcacaatggtgatcttctgtaccggtgcggaattggtctgcttcgctgccaccagtgcgtgtccgatctcatggtatgccacgatccgcttttccttatctgtaaggatggcattctttttctgataaccggcaatgactacttcaatactctcttctaagtctgcctgggttgcgaacttacgtccatctctgactgcccggagagctgcctcattgacgatattggcaagctccgcaccggaagcgccggatgccatacgggcgattttattgaagtctacgttatctgcgactttgatcttgcgggcatgcactttcaagatttcttctcttcctttcaggtcgggaagctctaccggcacccgtctgtcaaaacgtccgggacgtaacagtgcgggatccagactctccggacggttagtggctgccagaatgataacgccgttgttgccttcaaagccatccatctccgttaacagctggttcagagtctgttctctctcatcgttaccaccgatctggccgtcacgctttttaccgatggcgtcgatctcatcgataaatacgatgcagggagccttttcctttgcctgtttgaacaggtctctgaccttggaggcacccatacctacgaacatctccacgaattccgaacctgacatggagaaaaagggaacattggcttctccggctactgccttggctaacatcgtcttaccggttccgggagggcctactaagaggatacccttcggcatggaagcaccgatctctttgtatttgtcggggtcatgcaggtattccacgatctctgtcagattttccttcgcctcatcctctcctgccacatcggtgaacttgataccgttggaagacttcacatagaccttcgcattgctcttgcccatgcctcccatgccgaacatcatggagtcgccgccggcttttttcgccatctgacggtacatcaattgtccgaagccaataatgatgatcaaaggcagcagccagctgatcagaaagcttaaaatcggcgatgcttcctccacgatctcactggagaattttgccccgctgtcatacagtctctgcgttctgtccggatcatccatcagaccggtcttgtagatggtcttgtcatcttttgccgtgaatacgatctgattgtcctggacctgtacctcatcgatctgtttatcataagtcatctgcataaaagtgttgtaatccacttccttcactgcccgctgtacgatctgcggtaccagaagactgttgatcagcatgatcgccaccaacgcgatcagatagtaaaagataaacggttttttattaggttgttttacttcctgcatataggattccttcctcattcttgtaagatggtctaaaactgttgtaataaaacaatcatagctattttgtgccggacaatcaatatttaatctgttaccttattctaaaaaaagaataaacttcagcgtgaaaaaggctacgttttctcagatttgtttcttttccttctccctaaaaagagagacaatgagactatgataaaggagggagcgatgatgcgtcatgattcgggtaaagtgttgagccctatattgaaatatcttttgaaattactgtttgtctgcctgttgctgggcattctgtattatagcttcaaggattccatggaagatatgatcacagagctttccaaagtctccccgcaggtcatccttgttctattcctcagtgtgattctctatcacctctgcgaagggcacatcacctggctgatcgtgcataaaacacacccggaatatccccgcctgaagggattctgtaatgctttctactgctctttctataagacagccactctgggcagcggttccggcatcgcaggaatctattacctgagcaaagccggtatcccggttcccaatgccaccggcatgtactttttccaatatattgtccacaaggtctctatggcagtctatagtctgctattgtttttggcaacctatggatttattcatgcttcatttgccgattatcaatgttatatcctgctgggatttgcaggagtctgtgtgattgcaggagttctgttagctgtcgctaccgtaccctggatgcagactgcctgtaatctgctggccaaccggttccgtgcaaagcatccctccttggaggaaaagctcaccggtgccggacataagcttgccctgctacaggcggaaagccggtctctgttacaggatccaatattgctgcttcgcctgttcctgtgcaatgtattaaagttcactacctggtatatcatcccctggatcgtgttctgcaattctcttgggggaggatacggcgatctgcctttttctttcctgcaatgttttgctctgacctctctcagccagtcgctggcgggtgtcatccccaccccggcggggatcggatctgtagaagctgtctttacattgctgttccggcgtctcctgccggaggccaaagccctgtctgccgtgcttctctaccggttcaccaccatgctgttaccctgtgccattggtgcctttttcgtactgggtgagaggattgtctctttacacaggaaaaagagaacggcagactaatatactttcctaaaatctccacgcaaaacaagccacaacacagtattctgtgtcgtggctcttattatgttccgttattataaaaaatgataagtattactttttctgcaggaaatcaggaatcttcagagatttctcttctacagagcttctgatatctgtaggcttatgaataccgggcaccggctgtatgggtctcggagcctgtcctccctgtccctggggtgtcgtaggagcggtagactgtatattcattcccttcagagaactgggagtcatatgggaagcaggttgtctgaaagcaacacctccgcccagacgattctgtaccacactgttggccttatcttccagaccggtagcgatcacggtgatcgtacagctatcggacttggactcatcgtacatagcgccgaagatgatattgacatcatctcctgccagttcctgtacatagcttgctgcatcggatgcatctgccagagtgatatctccggagatattgataatgacatgggttgcaccggaaatggtagtctccagaaggggactctctactgccatcttcacagcttccattgccttatcatcgcccttgccctcaccgataccgatgtgagcaatacccttgtccttcataacggtctgtacatctgcaaagtccagattaatgacagcgggaacattgatcagatccgtgattccctgtactgcctgctgcagaacttcatctgccttcttcaaagcttccggcattgtggtacgtctgtccacaatctccaacagcttatcattgggtatcacaatcagggtatccacgttctctttgatacgctcgataccgtttaaagcatttaccatacgtgcctttgcctcaaaacggaaaggcttcgtcacaacaccgacggttaaaatgcccatttcctttgccagcttggccaccaccggagctgctccggttccggtaccgccacccataccacaggttacgaataccatatctgcacccttcagagctgcggaaatctcctccgtactctcttcagctgccttctcaccgatctcaggcttggctcccgcaccgagtcccttggtcagcttctcaccgatctgtaataacttcggagctttgcagagctgcaatgcctgcttatcggtattcaccccgataaaatccactccggtaattttctcatccaccattctatttacagcgttatttcccgcgccgcctacaccgactacgatgatcttggcagctgtatccgcgtcattcgtcttaatctccagcaaggttagttcctccttttaacctttttcaacttcacatagactatcatataatcattttacaaatttagcaacctattttttcaaaatgtttcacaaatgtttcacgcatccggcttgaacgtaaatttcccttttccttcctcataattttccatctgcagtgttccacttttcccttccagttgctccaaaaatcccggcaacagctgcagcttgtcctctaaatggctgttatcactgcccatggctactttgatctgtccgaagtagatggtgatctctccggaagaatggaaataaatcttgtccgcaatcaactgatatttattcagaagctttgtcatgtccatgatcccggcaaacacttccggattctccaccggaagctgttctcccaggacgatatgattaaaagtcagtcctgtgatctgcggtactccctgggtccggattccggaactctccaccacgtatccatccttgtcaaaatacatataagtatccagatatttcacgtatcctgccagtgccttttcatacactgtgattttaatggtatccggagccagaatcgatacgttcatgacatccacaaagggaacatcctgaattcctctgtcacggtacttcagtgacagatacagggaattattccccagcggtcccgacatcacgatctctttgatctcatcctctgtataatgcacattgccctccacatatacagtacggactgtatatacggagtgcaatgcgaaaatgcctccgcccagtattagcagcaaagcgcttatgatcactatttttctgataacggtacttcggtctctatacactggtaatacgtgctcctaattctctgaaatctctgcagatattttcatatccgcgttctataaaatgttgtcccgtcacgaagctctcaccctccgccgcaagtcctgctaaaaccagtgctgccccaccgcgaagttcacaggcgtccagctgctctccatgaaggtgttccaccccggtgattaccgcgtgctgtccgtcttttaagacaatctgtgcacccataaggtttaagggttctgcaattcgaaaacggttctcgaaaatattctcttcaatataactgattccctctgccatggtcagtaccgccatcgccgccgactgcagatctgtggggaattccgggtacggtccggtctgcagatgcccgatactcttgggtctcaccggtgcctgtacgaacaatccctcttcggagacggtacattgtgcccccattctctccgcagccacagtcactgcttccatctggctccagggtgcctgatttaacagtacgctcccgccgcagccgatacagccaaacagatacgttcctgccacgatccggtccgtcggaactgtataccgggttccgtgaagatctccgccgccatggatgataagttccggacttcccatcccttcgatcgaagccccacatgccgtcagaaattcacaaagtgcaatcacttccggctctctggctgcaccggtgatcacagtatctccggtggcttttaccgctgccagcaaaatattctccgtggcgccaacgcttgggaatttcagtgtaatctgggcaccgtgcagtttttttgcccgtgcggacaaaagtccgtcctcttcgaggaattcaacacccatctgttccagtgcatgaatatgcagatcaatgggtctgtcgccgatgacacatcctcccggatgttccatggtcacataaccgcatttgccgagcaatgctcccagcagacacagcgatgagcgcataccggtaatggcttctccgcgcattcttcttgcctctgctctctcacagggcaggtcatctctgcctcccggctgtacccggatcccattctcctgccagtgtaccatacatcccagttcccgtaacagatgtacgaaccgatgcacatcctcaatcctcgggcaattctgaatataggatacttcattggtaagaagcgttgctgccaaaatcgggagtgccgcatttttagacccttgtatgcgtacctttccctgtagcggcatgccgccctgtatgcggattcccttcatacagcaccatccccattacataagatattcttatcttatgccccgggatgcggtttcgtaccatgtcttctatagttcttttaactggatcctccgggccacacttaagaccagcccgatctccgccaaaaggaacagcgccgaagaaccaccgtaactgataaacggcagggagattccggtattcggaatggagttagtcacaaccgcaatgttcaggatcgcctggatcgcgatgtgtcccataacccccactaccagcatggcgccgaacaggtccggtgcattgttggcaatgaccatcatccgccacaacagcataatgaacatcagaataatggcaaccgctccaaacaatcccagttcctcacagataatggagaagatcatatcgttctgtgcctcaggcaggaagcttaacttctgcatgctctgtcccagtcccttgccccagatgccaccgcttccaatggcatacagtgcctgtaatgtctggaatcctttgtcctgcgcctgactctctggattcagccacgcctggattctcgccagacggaacttgccaccgatcttatctcccatctgtactaccacaaataccagcaatgccgctgttgccaccacgcttaatcccatgataacgaattttttgtaatcgggacttgccacaaataccatcaggatggcaatacccataataatgatggcagaacttaagttatccgtaatgagatatacacatgctgcgattggcagtggtgcgcccatcataatgaaaaagcctttcatggtacgcacgctttttcccatcttgcacaccagacttgccaggaacaggatcatacacaatttagctacctcagccggctgcagattgaagcccgtatggggaataccgatccatcttgtagcaccgtgggagctgatgccgagtggagtcttcaccaggaagatcaggatcatcgacactacatatcccagcatagcgaaccgttcccagaaatgatacgggatattagcaatgatgatcattcccaccagaccgatgatattggcaaccagctgtttcttcatataaaaggctgcatctccataggtatcataagcctcataggaactggcggaatagatcatgatcagaccaaatcccagtaaaaacagcacaataaaaagcaggctgtagtcaaaaaagtattccgattgttgtttctttttacgccttctgcgagcttctgccatgcctgcttttactccttatttctattttctataacattattgctttttattactttttaatctgccagtccacggacatattccttgaaaagctgtcctctgacctcatagttcgggaacatgccccagcttgcacaggccggagacagaagaaccgcatctcccggttctgccagttccgtacacagcttcaggcattcctcataagtatccgcgaaacggatcttatcgaagccatgctttctggcacactcggcaatcttctctctggtctgtccgatgaggacgaggcattttaccttgccgtcaaagctgtcgatccactcgtcatattcgctctgcttgtcataacctccgccgatgagaaccgtaggcctgctcatggctttgatgccctgaatagcggcatcgggattggttcccttggaatcgttgtaataatccacaccgcccttggtggctacgaactcaattctgtgctccactgcgtggaacccgcggatcaccgtaaggatcgtctccatgggtacctgcataccctctgcgatggcaatggctgccataacattttccacattgcacaggcctaccagattcatatctttatgaatatccatcagctcgtgttcttcaccgtttacgctcttgatgatcttgtcaccacgcagaaaataaccgttttccagttcctgatgggaggaaaacaataccggagtggcagggcatcttcctgcgaagtctctggtgtaatcattgtcataattcagtacgcagatatctgccttcgtctgctgggaagccactgcttccttagctgccacataggcttccatggtatgatgtctgttcaggtgatccggtgtgatattcaggatcgccgataccaccggatggaatgtatgtatggtctctaactggaaagaactgatctctcccacagtaacactgtccttcgaagtcttatctgcttccagagtatagggattaccgatgttacccaccacgaaagtcttatccttaccgaagtgtgccttcatgatctcaccggtgagtgtggtggtcgtcgtcttaccattggtgccggtaatggcgaccactctgccctgctccgcaagaaatcccagttcgatctctcccagaatctgaacacctctgtctctcatacggttcaccagcggaatatccgtaggtaccccggggcttaatactgctgcctgaatactcagctccacattttcaggaagttctccggcgatgcaggccgcccggcttccctccgggagctttgccttcagatcttcccctgtcaatttatcactgctgtcatacagaaccacgtctgcatggtttttctccaataatactgctgcaccgatcccgctgatgccggagccgatgaccagaactttacgtccttctaacatttttctaccatacctttctgtactttctgtaaaagtccatcagttcattataacgcattcgcggcgaatggggaagagaaaaatagaagccctccaacatatatatgtcagagagctccggttcattccgttatttctgtaattttataacacctattccgggttccccgcctatgttctgttccacgatcacatagggacctctcattccgtaaacataatcaaataccggttccagccgctcttccccgtgaagtcccatcaatccgtattttctgactgtcatccggtcgtcgatatatacatacccggggattgcgtcgtattccttattatattccgtcacactaataaaaaagcgtgagtccccggagaagatcatctctcccttcgtatccataatacagtacaatcccttggatacaaaagccatgccgtcatggaattcccctgccagtactcttctgccttccgtcgcttcataggggtaaaaatcaatctggatttctccttttgtatcaatgtatgcccactgctctccttttccgttgtgatccgcatccttcaccgcggcgagtccctcgttgaaatcccccacttcatcgtattggcacgggatcacacattgccctgcttcgtcaacaaaaccccattttccgtctttttgaactgcggcatacccttccgaataatatctggcagcatcgttaggaatattgttgtacttgcaggatgtgaccaatatctccttctccagatcccacactccccatttgtcgctcccattctgtacagcaaccatgttgtcattcacaaaacgaatatcttcgtattgtcccggttccaatacccatgaccattgcaggcttcccacgtctccattatcaagaaattctttgtatatggcttccatattttcatttttcaaagcgcatccggtcaatgtattcatcagaaaaataattgccgccatgcacagatatcttttttcataggattgttgtcccttccgtttttttacagaatagcacaacattacatcaaagttgcatcataacaaaaagacccccgggaaccgttatctgttcccggggatctttcgtctgtcattgtttacgcttctacgatcaggtatctgccgtctccgatatcgaagacttcatcggcttccagaatctcatcatccacagcgccgtccacgtccatgccggcttcatcgaaatactcgatgacatcatccacggaatctaccacgactgccatgcactcttccagaaaatcttctgcttcatccagagtctctgccacggcttccggaaaaagctggagctgtttgtccaggaagcattccagtaccgcatcatcatattcacgcatactactacctccaaattcttacgaaaatgtcttatttattctcataataatatggatatgtagttacgtcaattagtaattcgatgtggatgtaaattgagagtttacgcgagcattgagccgcgcataggcatagttaaagacagcgatgggcgcttgcgcacaaatcgctgtctttacttatgccgtgatgcggcgaacgccgcgatatgaaataagattggcagcgccttttgctgacaatcttatgaatagcgtggctcattgcggagaactgccaataaatgtggagcgccctttgcgacacatttatgaattgggggcatggctcgtaacgtaggattgccgtagaccggacaagttccgcctgtacccattcttttgcctcagtgtgggcacaggagataggatcaagctagtctgtacccttcttccgcctcagcgtgggcacaggagataggatcaagcttctctgtacccttcttttgcctcagtgtgaatagtttatgggtatgagaagcttgtttggttgctgatacccacactatgaaagtttgagggtatgggaagcttgttttgctgctgatacccacgctatgaaaagcttgagggtatgagaagcttgtttggttgctgatacccacgctgtggaaagtttgagggtatgagaagcttgtttggttgctgatacccacactatgaaaagtttgagggtatgggaagcttgttttgctgctgatacccacgctgagaaaagtttgtgggtatgagaagcttgttttattgctgatacccaaattgtgaaaaccggaaggtataacaagggaattatatattccagaaggcctgcggcaggcgttcgccgcatcacggcaaaagtaaaaaccgtgatttgtgagcaagctcccaatcacggttcttattttgcctatgcgtggctatgctttcgtaactctcaattattcgcaatacttcagcagatccagcggctgcgcgataatggcgtccgcgtggccttcttccagttccttgcggtcacggaatccccagaggacacctacggtgaaggcgcctgccgccttgccggtcttcatgtcggtagcggtatctcccatgtagagtacttcgtctgcggtgaggccaaaacggtctaaaatccggaagactccggcgggatcgggtttgatgggcacgccgtccacctgtccctgcaccacatcaaaatagtccttgccaaacaggctctcgatgacatccaaggtggcatggtggggcttgttggaaagtaccgcgatcttcataccacgtttcttcaactcttccagcagcttggggattccttcatagggcttcacctgatacatacagttcgcctggaagatctccctgtatctggcataggctgcctcaaaatgggtaagtttcgtatcgccacccttgatcagtgcccgctttaccagattggcggcaccgtctcccacaaaatatttataatcctgtacagagaaggggccatagccgaattccgccatggtcttgtctccgctgtatttcatgctcatgatagaatcggataaggttccatccagatcaaaaattactgctttcttcattctgttctcctacactaatctcaattcatgcagttcctgatagactcttcccacgggaagccctaccacattattgtaatcgccctcgataccgcggatatatctggcgcagaatccctggataccgtaggagccagccttgtccatcggatccccggtatccacatattcccggatctgtgcatcggtcataggataaaaatgcactgtggtcttctcatggaaagtcagcgtcttcctctcaccgttttcctcatagaggatcgtcacgcctgtgtatacctcatgtcctctgccctgcagcatagtaagcatggctgccgcagcttccgtatccgcaggcttacccaggatcttaccgtcgcaggcgaccacggtatcggctcccagcacaagggggtctgtcatagtagtttctccacttttctgttccggttcacaaacgccacaaccttcatgcattcggtcggcactgttatccggagcctgacagacatcactacctgcaagcttctcccacaccgcttccgccttctgcgctgacagttcttccaccactttcgcaggctctgtggatgtgatcttttcctcggtctcgctgaccactacatcgaaatccagtccgatctgtgtcagaagctcccgcctcctgggggaggcagatgccagtatgatcttcttattcatgatgtgtctccgggataaaagttctgctttcgatggcagattctcccgcagcctcctttgctttttgaatggcctccaggcagaaagcatcctgggagttgaacagctgctttcctctcttgtcctgcttctcatagctgccatccggctgtaagatcgaagccttcacattatccttcagctgactgttcaggatatgtagcaattcctccttcagctccgggcgatctaccgggaagaggatctccacacgacgctccagattacggggcatccagtcggcacttccacagtagatctcataatgatcatcatttgcaaaatagaaaatgcggctgtgctccaggaaattaccgacgatggagcggacactgatattctcgctgacacccgggatacccaccttcaggcagcagatgcctcgaacgatcagttcgatcttcacgcctgccgcacttgcctcatacagagcacggataatatccttgtcgcagagagagttcatcttcgcaatgatatgggcattcttgccctccagcgcataatttttctcccgttcgatcagatgcaggaacttatccttcagccataacggtgccaatgccagtttgttccagaacaacggctcggaataaccggacagcatgttgaacactgccgtggcatcctctccgatgcgttccgcacaggtcagcattcccacatccgtatacagctttgccgtagcatcattatagttaccggtacccagatgcacgtatctgcggatgccgtcctcttctctgcgaactacaagtgtgatcttggaatgggtctttaatcccaccagtccgtaaataacgtggcagcctgccttttccagcattctcgcccagacaatattgttctcttcatcgaaacgggctttcagttccaccagaaccgtaacctgcttaccgttctccgccgcctgtgccagcgccgctatgatcggagaattgccgctgacacgatacaacgtctgcttgatggccagtacttccgggtctctcgccgcctgacggatgaaatccaccaccggcgtaaagctctggaacggatgatgtaacagaatatcacccttgcggatctcctcgaaaatattacagcctgcgggaagtgccggcgactgctgaggttcatacctcggcgtctttaaatggtcaaaaccatccagtccgtagattttcatcagtaccgtcagatctaaggggccgtcgatctcataaatattctgtgtctcaatgttgagttcctttttaatgatcttcagcagccgtttatccataccgctttccacttccaggcggatggcttcgccccactgacgcttctttaactgcttctcgatctcttttaacagatctgctgcctcatcctcatcaatgcttaagtccgcattacgcatgatccggaaaggatgggcacagacaatatcataattcaggaacagtttatccatgttccgttcgatgatctcttctaacagaatgatcttgcaggtcttgcccttggacgggatccgcactacacggcttaagacgctgggtacctgtacggtggcgaattccagttcctcgtcgctgtttttcttccgcaccatggctccgatgttcagagacttgttgcggatcagcggaaacggtctggaagaatccactgccatgggggtcagtacgggatacacattttcctgaaaatactgatccacatacacagcttcctccgctgtcagctgttcatgctctctgatgatatgcagaccgtttttctccaaaagagggagtaaggaacggttataagtggaatattgcagatccaccagttcatggattgccacatgcagcgcttttagctgctctgtgggagtcatgccggcgatatcctttttggtatagcccgcattttccatatcctttaaggatgccacccggatcatgaaaaattcatccaggttagatgctgtaatgcttaaaaatttcaaccgttcaaacagagggatgtttttatccctggcttcattcaacactctgtggttaaaaagcacccagctgagttcccggttggtataatacttgggatcactgaaattgatttccatattgtcctgctgcctcccttaaaatttcttcttctgccggatcaccggtgtgatgctgtatacttctttgaaaaattctgtattcgtctggaagaatcctctttccaaagtaatatcttcctggctatctattttcaggatcagttcgttatcctgcagtacggccttcacacccttcattttctgtttgtggctgcggtccagactgtttgccagtcgcaatatagctgtcagtttcgctaccgttaaatagctctccttatccagtccctggggacgatcctgtgcctgcccataatacacgaaattactgtgattaaaacgcaccacattagctacgatctcacgctccatatgggaaagtccgatcatctccgtcgccatgataatatcataggacgcttctccgatattgatcatgctgatatattttccacagtcatgcaagatcgcagccaggcgcagatacaaacgctctctctgacccatgccgtggacttttttcatactgtcaaaaatcgtggtggtgatatgttccagggtatccgctcttctggtactaccattgtagcgtttgctgatattcattgcgcaggcgataatatcctccgcaaaatcatgctctccccggagtaatttattctgctccgcatattcataagcgataccatcgcacaatgtgacacccggtgcccagatcagcgccgctcccatcagctcggcaatgcgtttggtcaggaccgtactgatatacacaagagggactttttcctccgcaatatccatccgctttgcaagctccgtggttcctctggtccgaagtgcctccatcagttggtaaaacgccttactgtccaccatggcatttccgtctccccgctcatgtgccttccgcactgcccagggtgacagataatcatccacgataatgatatttttgatctcacgatccttaagatacagctttttataatcatccagctgtgccgtagccagttcgtccaccagctgctccatctgggtactgcccgcattcagatgattcaacagctcctgtaaacgtaatacaccaaggcgtaagttctgggtcgataccagagtatccttgtcaaacagggagatctgaatacttccgcctccaatgtccaaaatcgccgtcttctcctcgatgatcctgcggaacgtctcccctttagaggcaatcgacttgtaatccaggaatctctgctcggagttgcttaagatctctacccggatgccggtacgctgctcgatctgatcctgcaggatcagggtattctccgtctcacggatggcactggtgccgtatgccttataagcgatcactttataagattccatgatctgtgcgaattctttcagggtatggcacagatcatccattttttcattgctgatcttcccattggcataggtatccgatcccagatcgattctctgacggatacagtcgatctcccgcatggtatttttccccgaaaaatcaaatattttcatggtgagttcgaaactgcccacatcaatggcagcgaaagtttttacactcatagggttcctcactttcctaacaggtaatcaatgaactgctgggcacttcttccggacaatccgccgtgagacagttcccatttattagcctccagtaaaagttcctcttccggcatctccacatgataacgctccgccagtgtctttacgatattctggaattcctttttattgggagcgccgaagtaaatagtcacgccgaaacgatataccagcgacagcttctcctgtacggtatcactggtgtgcatatcctcgcgggtctcttccttgtcactgtaattttcgcggatgagatgacggcggttggatgtcgcatagatcagaacattctccggctttttctccagtccgccctcgatgactgccttgaggtatttgtactcgatctcaaattcctcaaagcttaggtcatccatgtaaataatgaatttataattgcggttcttgatctgactgatgaccgcattcaaatcctggaactgatgcttgtagacttcgatgatccgcagtcccctgtcataatattcattggcaatcgctttgatgcttgaggatttaccggtgcccgcatcaccaaacagcagacagttgttggccttttttccattcacaaatgcctctgtgttgtccaccagctttttcttgggaagctcgtagcctaccagatcatccagcttcacgtgggcaatatttaaaatcggaacgatatgtactccttcctcatcatgggtgatacggaaagacttgtgcaggccaaatttaccgacaccgtattctttatagaactgggtcagtgtggatttcatatcttctgcggttccgtctgcgcagaacttctccgccagctcacagattctggcgcagatccgtttattataaaccttgctctcctgcatgctgctggcataattttctattaaggaaaattccggtaccttaagtatctccatcatgggagcaaaatcaaaatcatagaattccttgaaaatgcagatatcatgcagcgccgcatcgttgatggagccggcaatctctccgcggatctcacagccgcagctgtagctgttctcgttgttcaccaaaagatttgccaggtaacaatgccacagattcccatgaaatccgtaattacccgccaggtcgatcaggtcatggatacactcgtaaaacagtgccgccatgtcctctgtattgtaatattcatcatcgtaatgggacatgagaaatgccatgtcatacagcagttccccatcctcaaaatcacgatatacgattagttctttttctctcatatgtctaaccttcttgtcttatgttttaactgttcagagccatgtaacgattatcgaatggtcgtcggatgccagcattcgtaatacttagtaattgcccaggatcttcatgctgcgggattcttcccgaagtccccgcagtgcgtttttcactgcgctgtccgcaaggttcccctcaaaatcgatgaagaaacgatactcccagttccggtcgggaatggggcggctctcgatcttggtcatgttcagattgttgtaaataaaatgggacagaatgtgatacagtgatccgctctcgtggggaatctccaggcacagactgatcttgttggcatttttacggaagatcttctggttcgtcacaatgatgaaacgggtggaattgctgtcggaatcattgatcccttttttcagaatttccagtccgtaggtctctcccgcgtattcgctggcgatggctgcctgggttttatccttttccttcgctacttttaacgctgcgaaagcgttgttctgcatactgatctgctgccagtcatgctccgccagatatctggcactctgcatcagggactggggatgggaatagactcttttgatctcttccatcttcgtcccgggcagtgccagcagacaatgctcgatgggaatgacctgctctcctacgatataattctcgaattctaccagcagatcatagatctcattcacgattccggcggtggaattctcaatgggaagtaccgcgaaatccgcgctgccttcatcaatagcactcatggcatcccggaaagtttccacatggaaggcattgacattttccccgaaaaatctgcgcatagcagcctgggaataagatccctccgctccctggtagaccactctggcacagtcggtttccagttcttccacgccgataaaaggaagtcttccctcacttccgtgggcggctaacagctggtactgaagcttccggctcatggacatgatctgttcaaacagttcttccacgccgtggctgttgaaatcgttgtgggtcagtgccttgacaccggcgatcttctcctgctcacgttgcttgtcgaatacttttttccccgtctctattttatattctgccacctgtctgctgacatccatgcgctcctcatagagatccacgatctgcctgtcaatggtgtcgatctgttgtcttaactgtgataaatccatgctgttctccttaacttaactgatatctgcgaattgctccgctgcaaagcagctatcgcaattctcaagcattcggaatccgctgattccaaacgtaactattcagaatagttacattctatctcactttttccttgttcgcaagcaagaagcacggtataatattagatattacacaaactttacattccatcttgttggaaagaaggttaatacatgaaagataaaaaaacattgttgattttaattccttttcttctgttcgtactcatcgttggcgcacttgccatcgtgggcgaccggatccccgacaatcccccagagacggtaggcaataccgcgggcaatctgaacaattccggttacttctgtgagtacgacggaacggtgtattttgccaatgcttacgacagcaacaccctatactccatggatccttcggaacagaatatcaaaaaactgggcaatgcttccgtgaaaaatattctggccgggggaaaatatctttactactaccaaaccggagcttccggggatgccggtatcggtgccctgcgcaccgttcgttcctttaaccgctgtaaattaaacggtacggatgtgaccggacttaccagagatcccatcgtttccgcccagttggtgggaagtaacctctacatcatgacctcaggcgataacggacctttattttaccgcatgaaaatcgacaaatccgacaaaacggatctggcagattacgagatcaatcccgcctgtgccgtgaacggtaccatctattacaacggtactcaggaaaatcattatctctatgcgctgaatacctcgacggacagcatctccactctatgggacggcaatctgtggtaccctattgcacagggtgactatatctactatatggatgtggaaaataattacagactctgccgttattccctctcacggaatgaggtggaagtcctgaccgaagagcggatcgactgcttcaatgtaggatacggctatgtatactatcaggtgaacggcggagaggcatgcctgaaatgcatgcgggatgatggcagcgattcctgggtcattgcagagggcaattatactgccatccatatgacttcccagtatgtttacttccagatgttcggagagacttccacctggtatcattctccgctcggaagtcagagttacagtggattcgatggtgccagggaagctgcactaaacgcattcaaaaaataattgtattaccggacagcaagagccgcagacattccgcctgcggctcttatttttcgttcctgttgcaaattattttcagccttcttcgatatgattcagaccctgattcaggatcgtgatgatatggtcatctgccaacgcataaaaaatcgtcttgccatctctgcggtttttcaccagatccatctgcttcaatacccgcagctgatgagaaatagcagactgggacatgcccagcagcgtggcaatatcatacacacacatctcagagcacaacagtaccgacaaaatttttaatctcgttgcatctccaaacactttgaaaaactctgccagatcctgaagttcctcttccggcggcatcttctcatcgatctgtcttatggtctccggatcagcggagaggtaactattcttctcttccatcgtaatctccattatcattgctgtatcagcggatgcctgccgcacctgctgttatctacggttgactatatttactatacactatttctgagaattcgacaaatggaaatattgctgcatcccctctgtcatggtaatcgtccccgcatggtcgatgaacagtccttccgcatcatatttttccaaaagcttctgcccttcctctgatcctaatacaaagcaggcagtagacagagcatcacttaaaaatccgtcctttgtcacgatggtaactcccgccacatcgctgcgcgccggggagccggtccggggatccaatatatgatgatatctgacaccatccacttccacgtaccgctcataatctccagaagtggatacacagtacccgccatccagcgtcagcactcctacactttgcgaaggctccagcggatctgtcaccgcaatctgccaggtgccgccctccggcttatttccgtaggttaaaatgctgcctcccacagagatcacggctccgcttacctccggatattcctccaggatcttccggatctcatccagtgccaccccttttcccactgctccgaggtccaactgcattcccgccggaatactcaccactgtactgttcgtccgctgttccaatatcacctgcttccagcctgccaaagcgcatgcctgttctatttcctcccgctccggaagttcatagtcctgcgggtcatctgctgccgcccaggtatcaatgtcccacagtcggctgagcttaccgatgctcacatcaaaagccccacctgtctgttccgagatctgcaggcatcgtttcagccagcctgccatcgcggcggagacctgtatcggtcccttcccggcagttgcattgatcttcgccacttccgcactatccaaccgccaggaaagttcctgttgttccaggtcgtttagtttctgcaatacaacctccgttaccttttcatctgtttttccgttcgttgcagtcggggaatttccggtgacataaacagtctgggagatcacagttcccatggcggtatctatgctattttcgcattcggtctgctgtccgcagcctcccagaaaaagtgccgggatcattgcaaaaagcgttgccaggcgcaccgcccacggcattttcaaatacttcttcattttttacattccttttgctatactgttctcatcgaaaggagttccttattcctatgaatgcttccatgaatgatcgaaaaaaagcagttctccttgcagcagttctgcttgtaatagccatcctttgcggaatccggatctatgcggtctcccacagttccaccggaaacggtcaggcgctctatgctgacatttatcaaagcggtgaattacttgagaccatccgtctggacacagtgactgacgaatatacctttgaagttccgggagagggtggcgcctcgaacaccgtctgcgtccgtccgggcagcatcgccattatctctgccaattgtccggatcagatctgtgtgcatcagggatttatcagcacctcactgcttcccatcacctgtctgcctaaccggctggtgatccgggtcagggaagaggctgtctgtttggatgacacgacgctcgtcccggacggtgtgacctattgatagaagatccttttgtctgcaccgcgtttatgaattgcaaaaacacggagatgatacggagatgattatgaaaccacccttagctaccaaaaaactaacgacactttccctgctctctgccattgcgctggcgctgtatgccgtggaaagcgctctgccccccattgttccgatccccggcattaagctggggcttgccaatataataacacttgttgttctatggaaatattccgcaaaagatgcttttttcgtgcttctggtgcggattcttttagcgaccctgttcttcggtcaggccatcagtctcctgtacagcctctccggcggtctcctgtgccttctggcaatggtatttgtgcaacggctgttgcatggacattatctgttccttgcaagtatgaccggcgctgtttttcataatctggggcagatcggtgttgcgtttttactgacttctgttcctgctgtgctggtctatctgccgtttttactgttaagcggtctggtgaccggtctgttcatcggtctctgtgcccgttttacgcttcgtttccttccgtaagatccacagggagctccgacaacatctgtgttacagtcttgtgcgtaatgggatgacggaaattcggtgccagctcactcaaaggcttcagtacaaaataacgattctccatatctatatgcggaatcaccagatcctcggaagcatacaccagatcatcatagaagataatatccagatccagtgtccgtggaccccagtgaagcttacgttctcttccctccatctgctcaatacggtgcagctcctgtaataattcttccggtgcaagcagcgtccggatctcaaacattccatttacgaaattatcctgctctacgacgccataaggtagtgtctccaacagctccgacaccttttccactctgatgtctttgttcttctgaagctgtcccaaagcctgcgcgatatgctctctgctgtctcccatattggaacccacggcaatataggcttcatgccattccctgtgaatcgccacagatacactgccaaagggtaatgggatcggagcctcgggcttgcggatctccagatccagtccctgtaccagcggaaaatgctgtaatacttcgtaagcagtccgctccgccaccgtttcgatcaattgaaaagtatgctgctgcatgaactccgtgataaactgacagacctctccgtaattggtggagagacttaagtcatccgccagtcctgccggacgggtattcgtatataacgtggcattcacataaaaatgctgtcctttttcattttcttccggatatacgccgtgatgcgcgtatacttccaattcttcgatacggatctggtcctcataagtgccttttttcatttgccgactccgcctttcccaacgcttcttcgcaaaatatcatttgctgctatttaaaatggcttcacacattttaatggtgcggacattttccttcacatcatgcacacggacgaacatgcatcccttctgcacaccgaacatggtggtcacaagcgtcccctctactctctctgtcaccggcagatccagtgtcagtccgatcacggatttgcggctgcatcctaaaagcaacggataaccgaacatattcagttcttccagacagttgatgatctccagattgttctcataggtcttgccgaagcccaccccggggtctaagatgatcttctcatccgcgatgcctgccgcttccgccaaatggatcgtgtccgccagatccgctgccacatcctgcatgaaatcccgataatccgcttctttacggttatgcatcagacaacagggcagaccgctcttcgcaatgacctctgccatacgattatcatatttcaagccccagatatcattgatgagattcgcccccgcacggattcccgcctctgccacaccgcttttgtaggtgtccagggaaatgggaatgtcaaaatttgccttcaccgactcgatcatgggtacgactctggcaatctcctcctcatcagataacagggtataaccccacggtctggtggattctccgccgatatccacaatatccatcccctcagcgatcatttcttccacatgcttcaatgcccggtctctgtcattccactttcctccgtcggaaaaagaatccggggtcacattcaggattcccattacataagtatgtcccttcgtctgaaactctctgttgccaatcttcatttgtcttctccccacgtttcttaattttatttatgctattcccgacaccaatcaatacttaattgtcaggttcttcttgccgtctttccagttgcaatccttctccgcatcgcacgcaaagcaggcacggcttgccttatccgcccgatacaggatgccatttagattcttctccttcgccgcctcaggatcccggtgtctggagattgctgttacaataacacctgtttcttcatcgttgaatccacacgccttcagaatctccggtgcgatccgtgcactggcctgctcatgcggaatgccattctcgtactgttcatgtttcccacaatcgtggagcagtgccgccgcatagatccattcccgattgatcttaagtccttcctccagcgctatgatcgtaccgatcctggctacatccagaaaatgcaccataccatgacggcagaagcgtctgtctgcttctgccgcattgtttcgtcctaaatgatataaaaacaaatcatgatttaatattttatcaattctatccatcggagtctccatcatttcatcccggtcgcttagcagctttcttccgcatccgtaatctctaccggttcaccagctgtaaaaatctgtcctgcaattccttattctccgcaaagactccccttgtcaccatggtaatggtctgactgccgggctttttgatcccgcgcatggtcatgcacatatgctccgcttccaacattaccataactccctgaggcgccagatatttcatgatatcatcggcgatctgtgccgtcatgcgctcctggatctgtaatcttctggcatatacctccacagtcctggcaagcttactcagccccacaaccttgccatcggggatatacgcaacatgcgctttgccgtaaaaaggcatcagatgatgctcacacatagaatagaaggtaatatccttctccagtaccatctcgttattgtctacggagaagaccttcgacagatgttctcccgcatcctgatccataccaccgcagatttcttcatacatcctgccgatccgctccggtgtctccttcagtccttctctatcggtatcttccccgattccttccagtaaaagctttattgcttcctgtactttcttctgatctaccattttcaccgcttcgctttccgtttattcccagctgtctgtctcttctccatgagcttcaggattcttcccagataagagagagagccgaagcacaatatcacatcatcccgtcctgccagcaggtgactaagctccactgcctcttccaggctgtccaccgccgtcacattagggtgtacctttgccacctctgttgccagatcataggcatgcatggctctgggattgtccggaggtgtcaccgtgagaatctgatccgcatacttctctgtcagtgcgatcacgcggtccacttccttatcctttaacattcccattatatagataattcttttatttgtaaaatagaattctatggaatccgcaagttttgcggctgcatcctcgttatgtgcaccgtctactataaataacgggtgttcttccagtatttgtaatcgcccgttccagacagtctccctcaggcctttccgaatggcagtctctttgatctcataaccacatttttccaaagcctgcaccgcttccagcgccagcacagcatttgccacctggaattttcccgcaagggtgatctccagctttttataatttccataatcgaaggtctgctttttcattccgtatttcacatgttttgcatttgctacatctgcgatggtcagtatacagccaagcgctgccgccgtctgctccacaaccttttgtgccgcttctttttgccgcatggagaccacctgacatcccgacttacagattccggtcttgtgtgttgcgatctcctccagactgttacctaagaatttcatatgatccataccgatggaagccagtaccgccacctgcgtggtcgtgatcagatttgtagcatcctccctgccgcccataccggtctcaagtacgacgatatcacactgtttttcccggaaataccaaaaagccagtgccgtctcgatctcaaagggcgtcggatgatggaagccgtcacttaccattgcatcacaatgcttttttatgatctccagtccttcacacagatccttatgcgtgatcttctgctttccgatctggattttttcacaatattcaataataacaggtgatatatatttaccaacgcggtatccggccgcctgtaagatgctggaaatataagcaagtgtggatccttttccgttggttcccgcaatatgcacaaatttcaattcctcctgcggatttcccagtcttctgcacaattcccggatgctgtccagccccggaacgatgccgtaagttcccactttttccatatattccattgcttcctgatagttcatggcaatctctcccgtatcatacgcccaaaatttcatatactatgtccatgaaaatgacaaaatccatcgcaaactcttttaaaaccttcggcaggagctttctcctgtgcggactgtgtggctggtgcatggagatcctgttcacagcactgcactcccttcggcgcagggatctgcgtcttaccggtaatacttccctgtggatgttccctatctacggctccgcctgcctgcttgcacccttcaaacggctttttgcgcacctgcacatcagtcgtcccaggcgtgggctgttctatatggcaatgatcttcaccgtggaatatctcagtgggcgcctactgtggaagcatggtctctgcccctgggattacggcaaaagccgtttccacatccaccggatcatccggctggactatgctccctggtggttcctggcaggactgttttttgaaaagatcctgccctgagccgttttacagcattactattactgcattgcttccgccagcatccgttcttcatgagcctttttgtcccgcaccatcttcttcataaggaaatgataagcgatccagaggaaaatacctgcggtcagccaggctgaggcattggcaaagcacacacccacataactcatcagatgcgctgccgcaaaagccacgataccacggctcaacaattccaccacaccgcccatcatgggcatgaagccaaagccacagccctgcagcgcatttcggaagataaatatcattcccagcggaatgaagaacatgccacagatcgtaatatacgttctggcatagccgcataccatctcaacctgttcggagatgaacagcggtacaatataaggaagcgctatatataccagtccgtagacaagcaccgcatagacaccggacatgatattggcagctttcacgcccttacggatccggtccagatcattgatgccgcggttctgcgcacagtaagttgccatagtcacacccattgcagcaaacggctgtgtcaccagctgttccaccttgcaggagacagaataagatgccaccacggtagaacccagcagattcagtgctgcctgtaccagaatagtaccgatagctgtaatggaaaactgtagtgccatgggaattcccacggtcagctgatttttcacacactgactttccagtctgcaatgctccggacggatatgcagtgtaggtacgctcttaataatataaatcagacacagtacaccggataatccctgagaaatgatagtcgcataagctgcaccgcccactcccatatgaccgtaaacgatcaatacatagtccaggacaatattcgtcaccgaagcgatcaccagcaatactaacggcaccacactgttgccgatggcacgcaggatactggacaacagattatacaatacattgcaggcaattcccgcacagatgatcataatgtattccttcgtcatatcgaaaatatcttccggagtattcatcacccgaagcagactgtccatgccggtcatactgactgccgtcatcacgatcgtcacgatcaccgacaggatggctgcgcttccgatacttttgcgcataccctcccggtccccggctccgaagcgttgtgccgtcagcacagtaaatccggtggtcagtccctgggtaaatcccaggatcaggaagcttactgacccggtggctcctactgccgccaatgcatctacacctacgaaccgacccacgataatggtatccaccatactatatagttgctgaaaaatattacctatgataattggaatgataaattttgtaatcagcttagcagggctgcccttcgtcatatcaagttccataaatctcttctcccgaaaaaacaggaccccggaaggtcccgtctcttatactaatgtatacttgtttcttctattactgtaagtcgtcaatatcccccatctctccggaaccgatatccagcatattcacagttctgcgcttcaatctggcttcctccgactccttcaaaataaactccttgatcgctttggagttgcggatatgctcgatcaacagtttgggatgagtagtatcaccggtataacagacaatggtgccaagtcctaccattctctcccagatacttgccgtatgctccacatcctgtaccttgtacatatagcagtcattctctaccttggtgaacacacctgtatccacagtgatcatatcctctttgatcacatacctggtaaaagtaaaaggtaatcccaaaaataaccagcgcttcttttccacaaattctacagacataatgccctccttttattgcctggtccggtattccacagtcatctgtaacgtacagtggaaccggctttacacgatccgcttcctcagtatagttctctttgcctcattatatgatatcctatccgggaatgcaaaacctttctatcatatccacacaaattttctatatttttcactttttcctgcttgattctcctacggagaaatggtattatgttacaaatgtaaaaatacaggaggataaacaatgaccgcaaaagaatgtatcacaggccgcagaagtatccgtcagtatacggatcagccggtatctcatgagcttctggctcagatcgtagagacagcttcttatgctcccagctggaagcatacgcaaatcgttcgttatatcgctgtggaaggcgaaaagaaagcgaaactggcagcatgtacttcctccttcccgggtaatggcaagatcatggagaacgctcccatggtcgttgcagtaaccgtgatcaagggcagaagcggtttcgagagagacggctccttcactaccgccagaggcgatgcatggcagatgttcgatgccggtgttgccagcgaagcattttgcctggctgcttacgagcagggccttggcaccgtgatcatgggtattttcgatcagcaggaagctgctgatctccttgagattcctgaaaatcaggacctgatcgcactgatccccatcggttatcccgcagaagcacccgttgctcccaagcggaaacccgtaacggatctgttatcttatcaacagtaattttaaagtcgaagagtttttcctcttcgacttttttctggtcagggtatgagctgtccgcttcctgtgggccctgtttctacccgcatcataagaaaagcgctgtattcttatgatgtcgcatacacaagtgagcacggcttcttctattccgtacagtcactgtgtctaaaatagcagcgcagaaatgaggaaatgaaaaaatgagacacttgatgaacccacttgacttctctgttgaggaactggacaagctgttcgctctggcagacgacattgagaaggatcccgccaaatacgcccacaaatgcgacggcaagatcctcgccacctgcttctatgagcccagcacccgcacacgcttaagctttgaaaccgccatgacccgtttaggcggcagagtcatcggcttctccgatgcggcttcctcttctgcttctaaaggagaaagtgtatccgataccatccgcatcatctcctgctatgcggacatctgcgctatgcgccatcccaaggaaggcgctcccatggtagccgcagagaaatccctgatccccgtgatcaatgccggtgacggtggacatcagcatcccacccagaccctggccgacctgcagaccatccgcagcctccacggcgatctgaataattttaccattggtctgtgcggtgacctgaaattcggccgtaccgtacactccctgatcaacgcactggtgcgctacgaaggcatcaaattcatcttcatctctcccgaagagctgaagatccccgactatgtcaccgacatgctccgcgagaaaggcattcctttccaggaagttatccgtctcgaagatgtgatgcctaagctggatctcttatacatgacccgtgtgcagaaggaacgtttcttcaacgaagaggattacgtccgcctgaaagatttctatgtactgacccctgaaaaaatggaactggcgaagcccgatatgctggtgctgcatccccttcccagaatcaatgagatctccgtggagatcgatgacgatcccagagccgcctatttcaaacaggcacagttcgctgtctatgtccgtatggctctgatcctgactttgctgggtctggcataattttccggtatctgaccgcaaaattatcttatgaattcgtatattaaagttaacatacgcagcactctgtgcctgcagaatggagattactatgttaaatgtaggaaaaatcgaagagggcttcgtcctcgatcatatcaaagccggaaaaagtctctcaatctatgagcaccttcagctggataagttagactgcaccgttgctatcatcaaaaacgcccgcagcggaaaaatgggcaaaaaagacattctgaaagtagaatgtgacatcgatatgctggatctggatgtactggcattcatcgaccacaacatcaccgtcaatgtcatcaaaaatggtgagatcgtagagaagaaggtactggtacttcccaaacagatcaaaaacgtcatcaaatgccgcaaccccagatgcatcacttccattgagcagggactgccccacgtattcgtcctctccgatgagaaaaaagagatctaccgctgcaaatactgcgaagagaaatacagcgaaagctaagaaccctatacaacaaatgccctatcagcagccgctggtggggcatatttacaatacttattccgcatcatcctctgttttcttttcactatcttcctgcttctgcatatacattatttctaaccttacctgaattggcagtaatagcagaaaaccaattaatccatataaaattccatttaatgcaattgaaatggaaatacttaatcctgtaaaaagaagtgttccttcccccataggttgaattgccataaagctgatacagctttcgaggaatcccattcccaaaaatgtgatttttgcaagctttatcgctgattttgcctgaaacaattgttttattgatactgatttcttttttccaaaaataatccgaaaggaatcaaaaaagggtagtcccaaatttgtccccagcaaaaatagagcagtaactaaaaacatactcaataatgtaggcatatccacaaaaagcatattcataccgattcccatattggtaataacagaatataaaacaacgaataaaaaaattatcacagttatcccaaaagccaataatgaacttcggcttttctttttgctattttctgtttcctgtaaaagattcatcatattgacttcagctttttcagtgtaaccgttttccaacaaatgttcacctgacagaaactcattaatactaatttgcagaatgtggcataacggaacaatcaatgccagctccggcattcctttgccacattcccatttggatattgttttgttactgacaccaatcgcatccgccaattgttgttgcgtcattccatgctcttttcttaatgtagaaatgaataccccaatcttttcctgatccattgctgttcctcccgtaaaactataaaaatacgattttcatgactgtattttacaattttatcgctatgaggacaacttttccttcgtagaccccagtctatctatcgtagattttcattgtatataacttctttctgcgtatttcaacaatcttatctacacattatctgcgacataaaatgtgggagccggcatattttcccactctgttaacgtaatatttccttttgcaatttccgctgcttccaatagtccttgcatggtttcatcaaaaaagttactcataatttttcctccatagtctattgcgttttctctttattttattcagtctcattatgtatcaaatctcgttcaattccttttccataattgttttaattgctctaatatctgtaaaagtcaaccttactccacgattatacatagccaatacttcattcaaattttctactagcaatttattaagctttttatgtattgtcaccggctgatcctgcactgtatgaatatgatcaaaatatttttcaataacaggaaatgtattctgtattaaaaaagcattttcctttcctgcaaattcaaggtcaaaaaagaggcgagaaaaatattccacacccctttttcaatatgcaaacaacataaagcaaacggtaaatcataattaataactttgttctttaatacaaacaattgctcctgtcacattattctcttctacccacttcttaatcatatcagtggaaaacctgatatccccaaaaatccgactatctggtttcaatattatctctgtacctgacgaatgttccattttacaagaattcacgtcatgttgggcaatcccccttacatagtcctgactatagcagttactatctctatacacattaatccgcaaattttcgcataatgaatttatcgcctgcatgccaccttgggcgaaatcacccatctgtgcatattctatactcgatataggatggcctgaaagtattttatccaatacctgctgatttttcttttcattttgtgaaagaggaattcctcttccattatcagttatctttattcttccatcctcatacagtgtaatattaatttccgtgcaaaatcctcctgcatcggcctcttcaaacgacgttttaagtacttcataaacaatctgatgcatattatctattaagttttccttgtctgctcccatacgcattctccttccttctatgtttggcacacaatattctggcaccatatacgaagtaagatactttttcaccttacttggcgtggaaccaaacaattgtgtgaatgaacgtgtaaatccttcgtgagaatcaaatgcatacataagtgatacatcaagaactttcctaccctccagcaaagaaccaagcgcatattgtagctttctgatcctaatgtatccggttattggtatacccataatttctgaaaataatttactgaaatagaatggactataaccagccatttctgccatttccaacaaactgattttttcataaatatgttcatctatataagccaaaatctcctttaaaacttctgtactcattccctttctcctcacatacagtatcatggataaagcccaccatacattctacaagcaggatgcttcatatccaacctgtatatatagtgtacacgctgggagtagatatttcttgattccatatatgaagtaatatattttctatctcaaacttttcataaccctttttgcacaagcatcagaatcattacactctcttttcatgatctttatccaaaggcttcttatcttcttccttgttcctgcacttccataatgccattggatgctttgctacatttctaaactcatcactatccccgaatacccagtcaggataataatttccttctgagaaagccttccagaacagcttttcctcctttgtgggcaccagaacagatgtaagatagtcttttacttccttttgtacaaattccaggtcaaatcgttctcctttacgaagcactgaattcaaatcacgcttaatctgccggaatgacacgtttccgatattatcaagctcaaatttttccggtggctgcgctgacccgattgcactatagaagacggcacatttacgaagcatcgcttcctcactttcatcaaacagcccaaattttaccatgttatgcatatcatataaatctcgtggagctgttcttgtaagtaatgctactgttttagaagcaaatatctccaatggtgctacggaaaaaacggtaagcttttcctcattccatggcagtcttacttctctccgtgccacaggaagcacatgacagcgcagcatatagttaatctcaatcttaagattatcctttgtccctccgcaatttacatattcatacacaaaggaatccagtgcatgataactctttgatttcggactcaggacatatccgtttgccatcatatacttgctgattttgtctgtgataatccccctgtctgcaagcatttcttccctttcaatacttctgcaataatccaaatcaatatccaccgaaagtcttggcaaatcaaaaatagtaagattaatggcagtgccgccttttaaagcaattccttcggacaatagctcatccgattccatgaatttcaacacatccgccagacggcataccttttccagcgtgtctctcggaaaacccagttcttttgccattctgcccagagttaatctatcccattgcatcataagcatccacccccttatctatcagtcctttcaacgaaaccggtgcataaagcttccatcttttatgaaatacattatcctgcgattccttcatcaggtagcgctttgcatcagaggaaccattctcacacgtctcaaaaaacttggctgaaaaatggaattcttcctgcatttcttcaaaaaaatatccgcatttctgatacagaaaaccattgttgtttcttgccagacattccaacactttctgttcattcagtcccggcaccagcatcatacaccgtattacttcctcaattcctgctatcttttcaaaatcacgaatactgtctacaacagtctgttccatggatgtcactcgtatttttccctgctgtactacttccatatctggtttacgctctatgtgtcggtacaacactccgtcatactcaaaatcgtgaaatcgtttatccgttgcaacataacactcataaaacacctgacttccatacccaaatacttcaaatgcactgtgatgggtgatacaagcatctgggaacagattggaacctatctgataacgggataacacaggctgtttcgtttccatgctgattaccacataaaaatctcttttcactttttctatcagcccttttttctggtattcataaattacctgattcgctgcggttgctgttcctacaatttctatcagctgttctctcgaaaaagaaccctttgcaagtagcttttcataatgcttcatcatgtatcacctcctaatgttttaaattcagcataatgtattatttattcttaatactctatacttttttaataatctattttaattttattacatagtattagaaatatcaaatactttgtgcattttttgaaataccatcttcttcattatctcaaaacacagctgacaaaaaattcattacttaaaatcttacttctttcagcgattttgcagaccatatgtacacttaactttgactattggatgcttctgcaggaatctctgcaaaattgacaaccgatatcagcctacgctgacaatagatttttataagaaatgtttatggaagaagtatatcctatatcttctgttttggcaagaaaaaactcacctgcatgttaccacacaggtgagttcgttttgattcttattaactattcatcagttacattatctctgtacacgtccggaagcgtcgccgccagccagggtctcaacttcttttctggataccaggttgaagtcgccggggatggtgtgcttcagagcagatgcagctacgccgtactcaagagcatccttgaagttcttgccatccagcataccgcagatcacaccgcctgcgaaggaatcgccgccgcctacacggtcaacgatgggatggatgctgtactctttggagtgatagaactccttggtatctctggagtagatgcaagcagaccaaccgttatcggaagcggaatggcttacacgcagagaggatacgcagtactcgaagttgaacttgtcaaccatctgctcgaagatggacttgtaaccggctaactccagctcaccgctggtaacatcggtatcaccgggcttgaagccaagtaccagctcagcatcttcttcgttaccgatacatacatcaacatacttcatcaggttggtcataaccttctgagccttctcggagctccacagcttcttacggaagttcaggtctacggatacctttacaccgtgcttcttagcagcgatcagagccttctcggtcagctctgctgcagcgtcggatacagcgggggtaataccggtgaagtggaaccagtcagcgccttcgaagatctcatcgaagttgaagtctgcctcggttgcggtagagatagaggaatgtgctctatcgtatacaaccttggaaggtctcatggaagaaccgctctccaggtagtagatacccagtctctcaccgcatcttgcgatgtgcttggtctctacgttgtactttctcagagctgctactgcgcactcaccgatctcgttgtcaggaactgcagtaacgaactcagcgtcatgaccgtagttagccagagatactgctacgttagcttcaccgccgccgtagtttacatcgaactcgtctgcctggataaatttctcgttgttgggggtggacagtctcagcatgatctcacccatggtaattacttttgccattttggtatattcctttctcactaaaaattgtctattatctccggttggatggctgcatattccatcacggacccgctctcgcttcggccctcccgtagcggtacgtaagatgctaaaatacagcatctaagtaccgacggtcagttagagtccgtgtcggaacacgcaaccgtccaacctgattattctaaatcctattcattccaccgtgtaatcgctatattacagcggaagcgggtccgtgacagaaatatgcagtcgacggagccgttcggttttcggaatcctattcttatttctgtaccagatgaactgcaaatccgccgatctcttccttcaggtagatagccttcaggttgcccttggcatctctcttagcggactcttcgttgaactcaacacccagaacagtgctcaggtagttgacagctctctcgatgtagttggtcttaacagcgatgtggccgttcttgcccaggtaaggagtcttcataacttccagagcagagcctgcgaatacggagctgttgccaaccttagcgggcataccgaagatgaatgcgaaacggttcgcagccttaacagcctcttcctcgttctctgcattgacaccaacgtgagccagttcgaagcccagcatggtctgtactgcttctctggtcagctgctcgatcttgtcccactcaccggcattgatcaggtcaccgggaaccatccaggaaccaccgcaagcgatgatcttggggaagtcaaggtaagaagtcaggttcttagcgtttacgccaccggtaggcatgaacttcatgtttacataaggagctgccatagccttgatcttagccagaccgccggactgctcagcagggaagaacttaactacatccaggccaagctcgatagcctgctcaatgtcgctggggctggaagtaccgggagtgataggaatgttcttctctacacaatacttaacggttctgggatttaagccggggcttacgatgaacttagcgcctgctgctactgctgcgtcaacctgttctgcgttcagaacggtacctgcaccaacacacatgttggggaagttgtcggtcatgatcttgatagcttctgctgctgcgctggtacggaaggtaacctctgcacagggaagtccacctgcgcaaagtgcctttgccagaggaagtgcatctgctgcgttgtcaatttttacaaccggtacgataccgattttgctgatttgctctaatactgcgttcataaataacacctttctgtcttatagactaatagttatgtgaaaaatcttcgcaggaaatcctgtcgaaaatatttctgcaaaattaaaccaatacttttatgccagtacttccttcactgcctcagcgatcttgtcgcacttgcagtttgcgaagaaatactctttaaatttggcaccggataaagcaccctttaccagttcacgatccagattcttcaggatggtcaccatatcggtatgcgttacttcttttacctgatccaggatcttcttgttgcgctgctcgggaacaactctctcagggggatatccaccaccgccgggagcacagaacagtttttcaaaggtatactgtaaattcagttcaccgccccagccgaagttctcagcaaaaggaagtgctacacagttaccgtcgtttacctgagagaacaggtaagcatccaaaggggactcaatatgtccgcacagaaccttagggaaggaattgcatgcaagcatggcaccttcgccggttccgcatccggtgatcacgaaatctgctgcaccggagttcaaaagaactgctgccagaataccgttctgtacgtaggtcagggaattgggatcctctgcgccgcacataccgtagttgaatacttcatgacccatgggctctactacttttttaagagtagcacagatcatttcattcttggcagcctgactgttttcattgatcaaagctatcttcatgagatactccttttctaatctaaacgccacaacagtcagccgccgaaattcttctgcgactgacctggtgtgggtaatttattttgttttccttttgcacgggctctactggggctgtttgccgatgtaagcaaggataccgccatctacatagaggatgtgtccgttgactgcattggatgcctcagaagcaaggaatacagcgggaccggtcagctcttcgggctttaaccatctgttagcaggggtcttagcgcagatgaactggtcgaaaggatgtctgctgccatcgggctggatctcacgaagaggagccgtctgaggagtctcgatgtaaccgggtccaaggccgttacactgaatgttgtactggccgtactcggagcagatgttcttggtcagcatctttaagccgcccttagctgctgcatatgcagatacagtctcacgacccagctcggacatcatggaacagatgttgatgatcttaccatgacccttcttgatcattgcagggataactgctttcgatacgatgaaaggtgcattcaggtctacgtcgatcacctgacggaactgatctgcggtcatctcggtcatagggattctcttgatgatgcctgcgttgttaaccaggatatcgatggtgcctacttccttctcgatctgagctaccatagcattaactgcttcttcgttggtaacgtcacatacatagccgtgagccttgatgcctttctcagcgtatgcagcgattcccttgtctaccagctcctgcttgatatcgttgaagcagatggtagcgccgcactcagcatatgcggaagcgatagcgaagccaataccgtaagatgcgccggtaaccagtgcaaccttaccttccagtgagaaattagtgaattcagacattgttttttctccttttctttataaaaactgttattttagttacatttccacaaggatcttatttcagatctctgttgtcgacaccgtccatgtcatcaaagtcctgattctcgccgaccataccccagataaaggtgtatgctctggaaccgcatccggaatggatggaccagctgggggagatgactgcctcttcgttacgcattacgatgtggcgggtctcatcgggttctcccataaagtgcattacaaatgcatcctcgggaatatcaaaatacagatatacttccatacgtctgtcatgtgtatgacagggcatagtattccatacactgccgggctctaacttcgtcatacccatctccagctgacagctctctacctgtcctggaaggatatatttgcagataactctgtggttggcatcctccagagtacccagctctactttattctcatcctttacaatgactacaccctcttcgggagtaccctccggcttgatcagcacggtcggataagtcttatgtgcgggagcggaattcagataaaatttagcgggctgcttctcatcctcacttgcgaaaatgatctccctggagcccattcctatgtacatagcttccttgtagcctaccttgtacactttgccatcaacggtaatcatgcctgctccaccgatattgatcacacccagttctcttctctggcagaaatattctgcacggagttcatctccggcggtcagagtgatagggcttacaggaactgctgctcctgtaatgattctgtcgatgtggctatacaccagcttgatctcgccgggtacaaacagattctggatcagaaactcttctctcagacgctctgtggtgtaatgcttcacatctcttggtgatactgctgttctaagttccaccttacgcctctctttcctcaactggcggcctgcatgccgctattgaatgttacctttttatgaaagcacttacattataacatatcattgtaactatttccaacacctttttacttatttttataaaatttataaaaaggcggaagggctgtaaatgcttttctcttttgtatgacttaagtatactcgaaaaaattctcaatgtcttttcattttttagtctaaacattgcaaattttgaacttttgatgtttaatagaaatatcgagagaaaggaacacatgaaaatggaagaacttacttcttgtaaaacagccatagaaaattgtaaagtctcagggacctttgccattgcccacttatataaagaggaaaaagccatggacatgcacatccatgactgctatgagatctattattccatctgcggcggcaaacagttcctgatcgacaattgtttctatacgattgccccgggagacctctttatcatcaatcagtatgaaagccacaagctgacccagatcgacaattccgtccatgagcggatcgtcctgtcggtatcgccggacttcatgaaacagatttccacagagcagacagatctgagcttctgtttcacccaccgcagtgcccctttttcccataagctgtcattaaataaggaacaacagaagcgatttctctattatatcaacaaaatcacctctgcggagggcttcgcccatgacattacggaatatgccgctttcatggaactgatggtcatgctcaacactctgttcgtcaggaacacggaacagacctccaccggagaaaacaccgcagatgccgcggaatacaaggacagctcctaccgctacaaccatcaggtggacgatattttaaccttcatcaaccagaatatctcccagcccattaccatagaacagttagccggacagttttacttaagtgaatcctatatctgcaggatcttcaaatccgccaccggcaccacgatcaacaaatacatcaccgcccgccgcatcagtatcgccaaagccgtattgaacgaaaacagtaatgtcatggaagccttcgaacgcagtggtttcacagactacagcaattttttcaaagctttcaccaaagccgtgggcatctccccgaaaaaatacgcaagcctgagtgtcagttaaactgctgactctcaggctcttttttacaactcttaatcattcggtctctgataaaatcttcccgccaggttctccgtacggatcatattgacgaaggcctggggatcggtcttacgcaccgtattcacgactttattcacttcatcgcgtcctaccacagagtacagcacatcacattcctgtttggaataacagccctctcccttgatcagtgtggcatcatggtgcgtgatctccgcaatggcttcgtagacatcctccggtcgtttggtcacgatgatcagtgtctgcttctgataccgcttgtacaatatatgcagtacctgggtggaggtgtactgaaaaataatggaatacagcgccttgtcccatccgaacagtgctccggcgatcccaaggatcaccacatttccggcgaaaatataattccaggagtcaatgccgtatttctccgacaggaaaattgcgataaaatccgtacctccgctggtggcattggcaaacaggcacagactgatggcaagtgcattgatcaatcctccgaagatagagatcagcagaatatcctccgtcatgggaaatgacggcacaatatctgtcaggataccactcaccacgatcatcagacaggaataaccggtaaattttttcccgataaatttgaaactgatgatagccggaatcgcattcaggataaaattgatcaccgagaagggcggctcccagtgccacagcagtgcactgatctcctgtatcagacgagtcagaccgttgaatccaccggggatcagtcctccggtgcggacaaagctttttaaattcacagccataataagggatcccgccaggatcaggcaggtacgccgcaaggtatcacaaatactcttcttcatcataattcgctccttcttacatccttcctgcctcttccttcacagaaccttcctctgtgtgcgttttctccgcattcccgttttccattgtttcgtctgctgccttttgcgaaggctcattctccgcacagtctttccttttcctgtcacacctctggcacagcacgtatcccaacaggatcagtacacttcccgcgcttactaaaataccgatattccgtccttccggtacatagtgcatctgtatcgtatgctctcccgcttccagatcaaatgccatgagggcattgccgaactgctcaggctctgcattttctccgtcgatctgcaccgtccagccctcctcataaggcacggacaggatcagtctgccgggttcttccagacttaaggttccggaaatatgagtgctgtccatcgctacattttcaagatgttcttttgacaatatctccactgcctgtgccagcacttcttcattcagtacataggcttccgccgataccttctgcgtctcatccgcatcatccccattggtcagcgtcacgcgctctccctccaacagatatcccagatacagaatggatccgtccttcagatcactgtaatcctgcgtctccagcgttcccccaagcacctgaacctttttcgtccctgtggcattgatcctcgcgtaataatagcctgcccggtccgccataatacatacattatctccgctagtctcactggtcgcccggtccagtaagggctctgcgattcccagatcctcggtcagctgattctgcactctcacaccggtgctgatctcgtccgtaacattccagcccgtcggtgccacatagccaaagggtagcgtatatttacaatgatataaataaacatctccactgttattcacgatctcatacagaccgttttcgtatttatccgatccgccgaacatgtaatccacattcaggagtgccgaaacgaaagctgtcgctccatcgaagccgtaataaaccttactgtggcgcatgccaagtttcttatacagatccatgacctgggaattcatggtagaggaaaataccgaagccgtagggtacccggtcagggttccgtcatttttcgtcttgcgggtaaacttctcgatacggaagaagtcattcccctcctgttcccgcgccagggtgtacaacgccttataatcctcctggtctcccagataagcacttcgtccggtagtgcccagacttgtattaaatgtattgatgctcagctccgccactatgcacgccagcaccagaatccccagcacctgcctcgtcagttcgctcttcctcgtccggtacagatacaggatcaccccgtaaattgtaacgaacaccagcgtcagcacttcaatacccgtgtcgaaatcctcgctctccacgaatttttcacaggcaagtaaaaatatcaccgccgccagatacccatagatgatctgcctgggagaagtgccttccacattccggaaagcatcgtagcacatgacaaggatcagaaaaatatatagaaaagactgtctcgccggcagggaatccggataattcagaccgtgccataaaaaatccaggacattggttccgaagctgagcagcaaaaatcccgccagtgccagattgcagaaccgttttctcaccgatattttttcattcagtgcatacatgggcaccagtaaaaatactgccacaccacagtaaatgttcggccagtgttccagtcccctctccgtggtcacgcacaggcagtgtcttgccagcatatcaaacacggaaaaataggactccagcgtagcggggaaatccgaattgccaaaatccgtccgtaagatagcgcagacctccggaatcagcagtactgcagccagccctcctgccagcagcgatgcaaatgcaaatcttccgatcctgcaaaataccgtttttactttttggctctgtccttccgtcatggtataatattccgtgatcagcagcattccgaaatacagcaccaggaagatacagatcataatggaaatatagtaattggtcaggatgcaaagccccagagtcacagtgtacatgatccatctgccctctctggccagccgctccgctcccaaaaggatcagaggtaacaggatcaggcagtccagccacatcacattccagttataggctgccagatagccggacagggcataacaggtggaaaaaaggatcaccgccggatccgccttgccaaacgtcttccgcagataaatactgaacgtaagtcccataagaccgatccgcaggatcacgagataactcatgaattccatgatcagactctccggaagcaaaaataccagccagttaaaaggacttgccacataatagacatataatgccaggaaattcgatccgatccccacgttgtaagaataagacagtccctctcccgctttgatcttgtgtacgaattcacttaaaaaaggcatatactgatggtacatgtcggagaacagaaaactccggtcaccaaaaggatatatgccccgtatgataaaaaggatcagcataataaatgcaggcacaaagaacgcaagcacagagattcctctctgcgtcctgcgttctgcacttattgctgtcgtcttgttgccattcatcttagtcttctccgtgatctctaatgttttacctttcgtaatcaaacagcagataatactccaggctccggtaatcgttcaatgcttccccacattgcttcaccgtcgtaagagtgccgtccgcctctctcacacctgctgcactgatcaccgggtattccttccgaagcccggtcagactgctctgcagggcaggcagtggcagatcacagttctccagcacatccattgccagataattagcactggtctctccgtccgtctgctcctcgatgtcaaagttgctccagatcacataaggtactttatattttaacagattttcctcgtctgttaaagtctccggattcactttattatttcttaagatcggattgctcacataagtcgtaggctgatgatccccgaagaatacgatcatggtatcctcatccgcctgagagaaataatcgatcagaccctgcagggcggaatccgtctgttttaccagagacagatacatggacaatgctttggagtcaattccatccacggtaatatccggggtaaagttatggaattcctcttcgtaaccgctgtggttctgcatggttacgttaaagacaaacagaggctctccctcttttttattctcatacagttcgatgatcttggcaaaactactctcatcggagatataattacggatccgtttcggattcgtgaaatcatcctgggataaaaactcatcaaaaccaagtaacggatagactctgtctctgtcccagccgctggcataatacggatggatcgccacggtatgatagtccagctccttcaggtaggatgccagagacggtgtctctttctgcacatactgctggtaagccacactgccctggggcaggaatccgatggtattgcctgtgaggaattcgaactccgtattggcagtatttccacccagcacggaaacattcagataaccggttctggtattctctgcaccctgctgtaatctgtgaataaagggcatatagtcctcgttggtggtgaaatcgcctctcaccgccagatcagaaaaggcctcatccatgatgacaatgatattcgggcgcttcacgctctccggatcttccacggctgccgtaagccctgcggaatcctgtcctgcctgtgtatacttactgccggtctcctccggagaatatcctgacggcttctccacatccatatactccagttccatcaggaatgccacgatattgccgtctcttttgttcatgacggtaggggtaaacagcttatcatacagaccaaagtttctcacaaagctctcactctgcaccataccggtatagccgtagatcaatgccatactaagcagtatgagtgccgctcttttcgccactctcgccggagtcttcatatgaaaacggctctcgatcaacagcaatatcagaaatcctataatgaccaacaccgtgctgcccttcagtgtatagttaaaattccctgccacactggcagccgtaccaatggaataaatatcccatggcataataggtgctgaccggaaattcaacacataataattcgccagacccaccgccatgaaaaatgctgtctgtagcatcagagcaacccggacatatttaacgattccgaataacagaagcgcggtcagtacataaaacgccatgttcaatatctgtgtcttgaaatgcatcgttgtgaaaggattgtgggtatacatttcaaacagataaaatgtcaccagcggacataccgcaagtgctatgcaggaaggaagcttctctctggtgattcctatttttcgaacgcagtgacgcaaaaagcctgcaatggcagctgcgacacttcgtattgattttttctgtaaataatccatcgcttaattctccttacgattctgaagagattttatcgcaatgacagaaaaataacaatttccgaattgcacacatttgctaacattacaggcttatttttgttactttttacatatgttttacgtattactacttgacttcgtattttccggcttctttcaggcgcagcattgctctcgccatggatgcctgggatacatgatactcctggatactctgcttctgacgcagctgttcctgcgcacgctccagggcagcctccgcacggactctgtcgatatcctccgggcgttctgccgtatccaccagcatgatcacacggttatgagaaatgtagacacagcccacaccgactacggctttggtccagtcatcctcctctttttccttgaagcgtacttcgccctctctcgtagcaatgaccatatcctcgtggtgagacataatggcctgctcaccgtccagagccggtacgataataatgccgcattttccatcgaaaaatactttatcactggcaatgaccttcaaactaaaggtgttcatatgcacaccgcctttccttactgtgccatgagcttcttagccttttccactgcctcatcaatggtacctacattgaagaatgcagcttccggatactcatccatctcaccgtcgatgatcgcacggaatccgcggatagtctccttcacaggcacatacttgccgggtacaccggtgaagttctctgccacatggaagggctgggacaggaaacgctggatcttacgggcacgatatacggttaccttatcctcatcggacagttcctccatacccaggatggcgatgatatcctgcagttccttgtacttctgcagcattgcctgcacctggcgtgcagtctcataatgctccttacctaccacatcctcttccaggatacgggaagtggattccaggggatccactgcggggtaaataccctgttccacgatcttacgggacagaacggtggtggcatccagatgtgcgaacgtagtcgcgggtgcggggtcagtcaggtcatccgcaggcacgtaaacagcctgaacggaagtgacactacccttgttcgtggaagcgatacgttcctgtaactcaccgacctcggtagccagtgtgggctgatatcctactgcggaaggcatacggcctaacagtgcggatacctcactacctgcctgcacaaaacggaagatgttatcaatgaacagcagcacattctgatgctcttcatcacggaaatactctgccatggtcagtcctgtctcggcgacacgcatacgtgctccggggggctcattcatctgaccgaagactagcgcggtcttctctaatactccggactccttcatctcactccacagatcattaccctcacgggaacgctcgccgacaccggtgaaaatagaatagccaccgtgctccgtagcaatatttcggatcagctcctggatcagcacagtcttgccgacaccggcaccaccgaacagaccgatcttaccaccctttgcatagggtgccagcagatcgataactttaataccggtctccagcatctctacgaccgggctctgctcttcgaaggaaggcggatctctgtggatgacccaatgctcctctccctccagggattctccaccatcgatggtctctcccaatacgttgaacaatcttcccagtgtctttttacctaccggaacctggattcctttaccggtagcaataacatccatatccttgcagagtccttcactggcacctaacataatacagcggacggtattgttgccgatatgctgtgccacttccatgaccagacgtttaccttcgctgtatacttccagagcatccttgataaaaggaaggtcattgttctcgaactctacgtctacaacaggtcccatgacctgaacgatcttaccatgatttttttcacttacgttactcaattgctcaggacctcctttcttgcctttttcttctttttctgagccttggcaccggcaatgacctcagtgatctcctgtgtgatcatagcctgccgtacccggttgtactgaatggacagatcatggatcatggcggatgcatttttatttgcagcctccatggccatcattctggcgttctgttcactgcagaacgattctaccaatgcgccgtatacatatcccatgacaaaatcgggaacaatgttatcaagcaccgccttcggggacggtgtcatgacaagcggctcctgatacatactcagatcctgtccgtctttggtaataaaccgttcttttatgataggtaacagacgcatcatctgcggttcggttgtcacgctgtttaccatattggtataaataatatatacctcatccagctgctctgcctgaaactgctccaggatcgtctccgtaatgatccgggcacgatgcagggtcgggttctgtgcagtataatgaaactgctctgccacctcgatgcctctgtgtccgaaatactgacgtcccagctcacccacgacaaacagcttatattttcctgtctgtccggctttctgcatctgctcttccgccatcttcagtacattatggttataggctccggccagtcccttatctgcggtgactactaccagtcccgtagtcttctcctcggccggtttgtccttacgctcatcgaagtacttattgtcgatctccggtaagtgacggacgattctgctgaccatagtctgcagagtatagaagtaaggctccgtctcttccagattcttcttggctttccgaagctttgtggaagagatcatatacatggcattggtgatcttcatagtatcctgaatgcttttcatacgactttgtatttctcgcgtatttgccatgttaacctcctatattactatcactgtttgcaaatattatttttgcaaaaattcctttttaaattcctcagctgcatcgcagatctgcttattcagctcgtcatccagtgccttggtggtctctaactgacgaacgatgtcactgtgctgctccttcatgtaacttaagaactgcatctggaaatccttcacatgatctacaggcacgtccagcattactctgccgttggctgcacacagggtcataacctgttctgccatgcttaaaggtctgcacagaggctgctttaacagctccatcaatacatgaccgtgctgtaactgctccttggtggcattgtccagatcggatgcaaactgtgtgaacacttccatctcacggaactgtgccaggtcgatacggatacttccggctgccttcttcattgccttggtctgtgcggcaccgccgacacgggatacagacagaccgacattgactgcgggtctcataccggagaagaacagatcactctccaggaaaatctgaccgtccgtgatggagataacgttggtcggaatgtatgcggatacatcgcctgcctgagtctcgatgatcggcagtgcggtaatggaaccgccgcccttgtctgcgctcagtcttgcggaacgctccagcagtctggaatgtaaatagaatacgtctccgggatatgcctcacgtccgggagaacgctccagtaacagggacagtgcacggtaagctaccgcatgcttggacagatcatcatatacgatgagaacatccttgccctgatacatgaaatactcagccagtgccgtaccggaataaggtgcgatgtactgcaggggtgcaggatcgctggcggttgcggatacgataatagtgtaatccatggcatcgttcttcttcagggttcctaccagctttgcaatggtggatgccttctgaccgatggctacatagatacataccacatccttacccttctggttcaggatggcgtcgatggcgatggaggtcttaccggtctgacggtcaccgatgatcagctcacgctgtccacgaccgatggggaacatggaatcgattgccagaataccggtctccataggtacacctacggactgtctgtccacgatggaaggagcaggctgctcgatgggacgatacccctcttccttaatgggacctgcgccatcgatgggtgctcccagagcatccacgatcctgcccttgaatccgtcacctacggggataccggctctcttgccggtacgaacgactctggtaccctcacggatctcggtatcatgaccgaacaggatacatccgatctcatccctgcggacatcctgtaccattcccttgacaccggaatcaaagataacgatctcaccgtactcagcatggtcgataccattgacattggcgataccgtcacctacccagctgacggaaccgatctcatgctcctgtgcctgcaggtggaaatcttcgatctcacccttcaggatagagatgatcccctgctcgctggcagtcttacctacctgggaaagcttgtctgcgaactgcttcatacgaccattggtactccagtcatagacttcgttaccggcacggatgatgaaaccgccgcccaaagccgggtcttccttcgtctcgaagaccatatcgtctctgtgatatttcttctgtacaaaatcacggatattctgtaactgctcctctgtcggtgctgtcacataggacagggtcacaacgaactcaccctttttctcgggagagagttctctatacgcagtgcagatatcatcccacagatagatatctccgttatcacacaggaccttcaggaaatctctgatctgtaagggaaatactttttctattacattgtgcttggcagacagtgccacggcaggagattcgaaatccagtttcacctgcggtacggctttaaagatatcgcctgtctgacctacaatgtctccagggatattcagttcacgcaatctttttgcgtattctaaagctgtactaatcaatctcttcacctgtctttgctataaattggttgtaaagttctctgtctgaatctgcattctgtttggctgccaccagctttgcagtagcttccactaccagaccggcgatctgctcctgtgcctgctggatacgtttctgctcttccagcgcggcatttttatcggcattgtccaggatcttttttgcttcggtctgggcatctgccacgatacggtcatactcgttgctggccttgcctcttgcctcgttcaggatgccttccttttctgcctggacaccgcttaaggatgcctcgtacttagtcttgagttcctcggcactgtcctgtgcagcttttgcatctgcatattgcttatcgatctctgcctgtcttgcatccaggatcttgtggatgggtttgatcaggaagatcttcacaatggcaaatatgatcaacagattcaggatggtccatacaatattaatatctaatctcagcatgtgctttcatcctttcttacgtcgttataccgttccttatgccatgaataagataattaagataccgataacgaatccgtaaatagcggttgcctctgccagcgcaccacctaacagtaagatcttggtgatcttgctctctgcttccggctgtcttgccacagcctctgctgccttacttgttgcgataccgataccgatacctgctccgatacatgccagtgctgcaatacctgctccaatagctatcataatgaatcctcctagttttaaaaaaagtgttgttagtgaatagttacttattcaatggcttccttaatgtacatagatgtcaggaatacgaatacatacgcctggatcagtccatcaaaaatatcaaagtaaaagctgaagggtaccggcaatgctaccggaaccagaagcttcagcagctccatgataacgaatgctcccaaaacgttaccaaacaatcgcatacacaaagacaggggcttgatgaacacctctaggatattgatgggtgttacgatcgcgataggctcggtgaagctcttgatccatccgcccacgccttttttgcggatgcctgctgcttccaccaggatgatactcatcagtgccagtgccgctgttacgttcagatccttggtagggggcttcataccgaacaatccgatgatattggatatgcccaggtataacagtacacttaccagatacggtacataccgtttcccttcctctccgatcattcccgtaacaatgccttccagcttcgtcacgatcgtctctgccaccagctgtcgtctgctgacattgtgtactttgaggttgcttgtaaggataatcgacaagatcagaatgactgccatgactacccatgtgatcactaccgattccgcaatatccagctgtactccgccgatcagtggaagacctgccggaagcttgatcgaaaacgccgtatcacagttcagttctttgagcagttctgatgccaattcctccataataccacttcctttccgtaaacatccctgaaggagtttccgctccctcatggtcgttgctattttactcctatttataaaaaagtgtaagatacatttttgctaatttgtcctatgcaaaaatcaaaagttatggcatatattaactataaaaaaatgaggtatcagaaaattatatgacaaaattagtcattttgggacgcaagtccaaaacaggaaattatgaagcctttttccgtgcacttcccgcgcagatcgtgactactctggttcccggagaggtcatttcctgcgacgctctgatcctgccgggcggcggagatatcactcctgcttttttcggtgaaaaaaacaaaggttcccgcactgttgacaccgaactggacatcctgcaattccaggctctcgacatagcgattgccgccggaatccctgtcatcgggatctgcaagggcatgcaggtcatcaatgttgccttcggcggtacgatcatacaggatatgcccgaagactgcctgcacagttccccttccggcgatgtgtttcatgatactattatggtagatgattcccatcttttcaagtattttcctgtcaaaatgcgcgtcaacagtgcccaccaccaacggatcgaccgcttaggtcagcaccttaagatcatccaggtctgccctgacgatggctgccccgaagctttggagcatgacgagctgccgatccttgggttacagtggcatccggagaggctgccggagtgtgtcggggaacctctcctttctcttctttcttcttatttttaaaccggtgtcgcggtcttttcaccggaaccaattcctccctgactttaacctttgcaatctcgaacagggaacggatgatcccccacagcatctctgcggtctgatcgtccacttccttcaatgcggtaactaccgcattcatactctttttccaatctgcggtaaaagtgatcagatcgtccgcctgtgatgcggagatcacctgataaagtgtgtctacaaaggtacggacctgctcctcgttcagggacaggatccattcattcagagcctcgttcatgatcttctggctctcatagatatcgcctacatccacgaaatgatcatccttcaccagccaggagaaaggatcatgctgcagcagaccgtggtttttactctccactacgcggtaatgaatatcccgctcgaagatcatcccgatcatagaagaatgcggaagcagctttaccaccttgtcttctatcgcattgtaatgacattccttcagcacctccggccggaatcccggtccgtccagactgtatatcttttggatccgcttccgtacaaagggcgcacatttcatggcactgtacaccgccaggttgccgcccttggaatgtcctccgatgtaaaagggctgatgcagccatccggtgaccatatttacatattttacactgtattcctgccccggtaccggattcaggaatgccatattaaagtcttccttccaccccacaatagtctcatccgtgccgcggaatgccaaaaacagcgttccgtcatccaggataaaggtaatcgcagagaactgggtctcccactccttttccaccaggttaatataacaattcagcttcatattccggaagcgtctgccgctaagcagcccttcaaacagtgcccggttctccttttcaaaacgcacatctccgaacagctgctccacatccggccgtttggcgatctcctgcagcgtcacagaaggaccgttgtgacgcacatcgctgaccattccgtcgaatttcagataagaaagctggcataaggccagactgtccacatcattcagaggtttttcgcaaaatggaatatctccgtatttttttaaatattctatgactgttcccgccatataccgctcctttccgcgaggaactttccttgcgtattttcccggattgtgttacgttttatactgtcagtagaaaacattaagaaggtgatctgccatgtccacgaaccattccaaacaattttccagagattgcatggtgcaggctttgatgcagctgcttcagacaaaatctctgtccaatattaccatctcagagctgaccgagcgggccggagtctcccgtatgacttattaccgcaattacaactccatggacgagatcttcatcagttatctgaaggatctggtagatgcctaccgtcaggatgtcgctgcctggcctgataaaggcaattataacgactaccgcaatatgctgcactgctatgaatactttgatcattacagagaattcattgcctgcctggtgaacacaggactggggcatctgctgctgcaggccctggacagttatatccttgatacctattatacggaagataaaggccgggatttctattacacgcttcgtgcgttctccggttccctctacaatatctacgtcacctggatcattgaaaattccatggaatccgctgaagagatcgtatccattatctgtaagatctattcctgatcattaaacaatcatcaaaggactgcgcaaaaatacgcagtccctttttatttttatctctgatccaacggaacatattccagttcctgcatcacgctcttataagcgggacggatgatcttatccatattgatcaattcttcaatacgatgcgcgctccatcccacgattcttgcaatggcaaaaatcggtgtatataactccagcgggatctccagcatgctgtatacgaatccgctgtagaaatccacattggcgctgacgcccttatagatcctggacttctgggagatgacctccggtgccatccgctcgatcatggagtacaatgcgaaatccttgtctctgcccttggctactgccagcttctccacgaagctcttaaatacctgggctctggggtcggacagagagtagacagcatgacccataccatagatcagtcccttgccgtcaaaggcttccttattcaaaatcttgttcagataaactcttaccgcatcctcatcagtccagtcggacacatgggcttcgatatcccgcatcatctctacgaccttgatattggcaccaccgtgcttgggtcccttcagagaagaaagcgctgctgccactacggaataagtgtcggatccggaagaggttacgactctggtagtgaaggtggaattgttaccgccgccgtgctccatatgcagcaccagtgcggtatccagtactttggcctccagctcggtatattgtttgtcgggacgaagcatcatcagcagattctctgctgtggaaagcttcttctgcggacgatgtatgtacatactctcatcattggaatagtgattatatgcatggtagccgtagactgccagcatagggaacacagcgatcagtcccagacattgtcttaatacattttcaatggaagtatcgctgcaatttttatcataggaagccagtgtcagaacactcctggtcagggaattcatgatgtcactgctgggagctttcatgatgacatctctggtaaagttggtaggcaaagttctgctggatgccagaatatcgttaaaatgcttcagttcgtcacgattcggcagcttaccgaacaaaagtaaataagccacttcttcgaatccgaaatgatccccgcggaatccgttgaccagttcgatacagtcataaccgcgataccacagcttaccttcacagggtatctttttgccatcctccattttgaaggattcgatccgggagatattggtaaggcctgcgactacgccgttaccgttcttatcacgcaaccccctctgcacgccatactcatcgaacatctggggttccaatctatctgccgctctgcacaggccggcatgttccaacatatactctgcgtttttcttcatccaaataccttcctttccctcacatttctatatatgacccgccccgatatgagcataaaagtgggatgataatcccacgatatgcgaattattgggtaggattgtggtagtgcgtagcacgaagcaatccgtaggtatcaaagtcgggggcttttgaccccgacatcatatatacttatatacctacttatcataacttttcagaaactaccctgtcaattaagaaagtataaaatattctttgtattctctttgatcttctcagacagctcagcatatttaatgagttcttcctctgtgaagccggcgaatctggcagcatcataatccctctgtgccatctccagttctttcataacggcatctgctgccggaagaatcgtcacggcgatcctgcctccccgttccttccgcttcgtttctgccatctccgctgttttcgttttattttttccggtcgtcttatcttttttggatggcttgggttccttcacctcttctactttcaggaatcccttcatggtcagtcgctgcaatccgctggtcagattcgtccgggtgattccggcgaaatcagccagttcccgtctgctgtcccattcgtgcttttcacacagacacaaaagcagacacacatccatgaccttcagatctccttttaacgccaccggctccagataatgttctaataactttctcttacggtaatcctctcctgcaggtccttccgcctgcaagatctgtgtattgacaaagactctctcgtctcccagcttcttggaaccgggcaggattgaaggcggaacggtgccgtcccccgcagcatcgataaaaaagcggtatacctgcagacggttcttctcataatcttcctcttccagaacatgtttgtagaagttattgtagtactcaaatacattcagcttcattttcacagtcttcgagatattaatgccctgactggcaagagagcctttcctcttcacataataataaatgggcgcatgcagggcatagaatactttcgcatagcggatatattccagattgaacataaaatcctcacaccagctgatatccgtatccatgcgtagcttatgctcttccacaatatccctgcggtacagcttgttccacaacacaccgtaataaaaatccgccggattctccatcatatgtgctgcgaactcttctctggtgagcacgccctcctcttcgatgtctcccttgggggacagacgctctcccaccacgcggtaaaagtcagaaatgaccatgtcacagccgtactcctccgctgcccgcacgaacagtctggtggcatccggtgtgatccagtcgtcactgtcgaggaactgcagatattttccccgggcacggtcaagcgcccggtttctgctgtcggagactccggtgttctccttttggatcacaatgactctgggatctctgtctctgtactcttcacaaatatcgccggaagcatccgtactgccatcattgaccagcagcagttcataatccgtatattcctggttcaaaatgctgtcgacacagcgtcgtaaatattgttccgcattgtatatcggaacaatgatgcttaccattggccgcataagttcatcctctccaaaaaatacttcataaacgatttcttcgcttttcaagcttacgaaatcgtgatcagttcatagtctctgctgccgatgccgatcttctccgcatgctccaggcaggtcttgtactccgcattgggagtggtattttcaaaatgatcatgatgatcgcaaaatccctcttttgccatggcatccgtcagctggctgttcggcagcggtgtctgcttcaggcaggcatccacacaggcctgatccagcgccaggggatcaaaggatgcaaacataccgatattaggtagaataggagcatcgttctcgcagtggcagtcacagtttggagacacatccactaccagagagatatggaaattcggtctgccgtccacgacagccttcgcatattctgccatacggcagttgaaatccttcgtcgccgcagcatcgccgctgtggatcgcatcaaaattgcaagcaccaatgcagcgtccgcaacccagacacttctcatgatcaatgtgcatcttatgtgtggtctcatcatataccagtccatcattggcacattccttcatgcagcgcttacagccccggcacagactctcgtcgatctccggcttgccctgcgcatgctgctccattttgcccgctctggagccgcagcccataccgatgtttttaatagcaccgccaaaccccgccgtctcatgtcctttgaaatgattcagggaaataaacacatccgcatccatgatggcacgaccgatcttcgcattcttcacatattcgccgccttctaccggtacctcgatgtcatccgttcccttgagtccatcgccaatgatcacgggacatcccaccgtcagtggcgtgaaaccattctcccaggcacagtacatatgctcgatggcattcttacggctgccggggtacagggtgttgcagtcggtcagaaaaggcacaccgcccagctcctttaccacatccgctaccgctttcgcataattcggacgtaagaagcccaggttgcccagctctccgaagtgcagcttgatggcaacaaatttgtgatccatatccatattctgaatccccgccgccttcatcagacgctttaacttactgggaagcccctctcccagacgggtcctgaaatctgtaaaatatacctttgatttttccattgatctatcctccgagcaaaaaagatactacgattataacatatcttttccgctttttgagaatttttttgcattctccacgaagcgctccgcgaactccgggcaggatggataatagaggtggggaaaaccgtaccagtgactctctcccacgtggatacagggataatttcgtccggtggcgggtttggtagcgatgcagtctgcgccgttgtcttcactgtcataatagtggaattcgtgggcacggatgcggctgccacgaggcataaaatatccgctgttctcttccagttcaatgtatccgaagcgcaccaggtgttcggtgtcgaagcatttaccgggcaggactcccgccatgggataggaatgtccttcccgatccgtcagggtcgtatgcaggtatagaaaaccgccgcactctgccaccgtgggcaggccgtctgtgactgccttccggattgctgtgcgcatggcatcattctcgcttaactgtccggcatacagttccggatatccaccgcccagtaacaatccgtgaatgttttccggtaagtttctgtcatgcagcggggaaaaatacaccggttccgcgcccgcctgttccagcagacgcaggttctcttcgtaataaaagcaaaaggcttcatcccgggctacggcgatccgtgggtgtattgcttcgctggtttctacggaatcttccactaccgtctcttcctccaacggctccgcttcctctgcgatctgcaacagttttgaaatgtctgcggtctcccgtaatctctctgctgtcatacggatctgtccctgcaagtcttccagttctcccggcatgcacaagcctaagtgtctgctggcgatctgcaggtccttattttccggaaaataccccagtaccgcaatgcccagttcctcttctgccaagggcttcaatatctcataataggctgaggacatccggttgaagatcacgccacggatcagatgtgccttatcgtaagccaggaatccggcaatcagagggatcaccgatctccccatgccttttgcatccaccaccagcaggatgggggtctgcgtcacctttgccagatgataggaggagccttcctcccggatgccgcccagcccgtcatacaatcccataacaccttccatgaccacaagctcgtcttctctgcgatccttcaaaaacagcttatgggtgccctcttctccggtaaaaaaggtatccagattccgagagggcacccccagcacctgtctgtggaacattggatcaatataatccgggccgcatttacaggaagaaatatcctcaccgttttctttaaaaatctgcaataatccacaggtgatcgtagtcttgccgctgccgctcttcggtgcagcgatcatgatacggcgtatcttctttttctgtgctccggtcatctctgtacttctccattcctaccgtttccgatctccactgcgttttgttttgttttcttcgcgttatccataggatccgttcctgtctcccggaacgtaaccgaacagatccacaccggattttccgcctggggcagatgatagcttaagagcttcttcacccggcttacctgcatctgcaggatttcctcttcctccaccggaaaagtatccagcacttccttaagttctgcaatggtctccatgctgatggcattgatcacaatacgcatatggggattcttccggtacaagacctgtaaaatatccagcaatctgccgccgctgcctccgataaaggcatgggtcggcactggtaattcttccagtccttccggtgccggggcttcaatgatctgtatattatccatgcgaaaatgctctctgttctttcgaagcagttccaccgcctccggctttctctcaatggcatagacctgcactcctccgggcaccccggcgatctctatggcaacggatccggtgccgctgccgatgtcatagaccacggcgttttctgtcagatgcagcttgcagatgctgacctcccggacttcttcttttgtcattggagttttcgcatcccgcagaaaacaggtatcggctcttccatgtgtcaggcgttccgattgccagtgaggattgcggatcaggcaggtatataacccttcctccgtaatctcctcacactgccccggggtcaggatccggatgctttcctccggataggacagctgatatcctacgatcacttcacagtctgtcagtcccgcttctgcaagcaaatgtccgatcttgcggatgtcctcacttcctgaggtcagtaaaaataccttttcatggctctccaccgttgccgaaagccggttcagcttcttgccgtgcatgctcaaaatggccgcatcttcataactttctcccactcgggccgccagtgtggccacggaagaaattcccggcaggatccgtactcctgcgttcaacgctcctgcggcaacggcttcctgcaatgccacatatagcttcctgcatccgctgtagaatccggtatccccggaaaaaaggaccgttacccgaaggggctctttctgttctgtaagaccgtttttctgtaattgctccagatacggcagaatctgctccgtcatgtagtagggtcttttttcgattttagcagaatatctttcgatcatgcgctccgcacccagcaggatatctgcagtttcgatcgcatgctgcacttcttgtgtctgaccgtctttgctgcccatgccgattccggcgaggcagatctccatgctgccctgcccggagagcttacagtcacagagctgttccagttttccacagatttccgcaaaagaatacgtatctacagccttcttgacaggctgtatcacatacaccgggatccccagaattttcgcagcttccagtttctcctgataccctccggtgcgtccgctgtttttcgtgaccatgtgatggatatcgtattgcttcaggatagcagcgttcatctctgtggaaaaaggtccctgcaatgccaggatctgtctgcctttgattccctgctccatgcacagttccaggctctctctgcccggaaggatgcgcacatacaggcggtcatggagtcttccggaggcacaatacgtcggcagttccttgctccctgtggtcagcagaatattgccctctgtattctccagcgctttggcacagtcagcattgctttcaaaataccagatacttacggcaggattctctgcttccggagtctccgaaatttcccgttccagacgcaggtaaatggaagactgtgttttcacagcgtcccgtatgttctctgtaacgacctgggcataagggtgggtggcatccactacgatctcataaccctcgttacgcagaaattcttccatctgctgccggtccattctgccacggtgaagagatacgagtggctgcccctttgtccctgccgcctccgcatccgtctgttcccgcatcacgatctcaccatattccgttgccacgcatacggtatgcgcgattccggcatctgccaggatttccgacagccgccgtccttctgtggttcccgcaaaaattactatttttttcatcctgctctcctcccaaagagaacttaatgtatgttattctccacatgatatccgcgctttgtgatcaacttgtcccccaggatctccgtctcggaattgccgataaataccgtggtgaacatattgacttcccggtcccttaattcccgcagcgtacaggtcaccgcccgggtgccttctctgccgatgttttccacatagccgcaggggcgctccccttctatggtttccagtaaaatatcacaggctctttgcagataatcctttcgcctgtggctggaagggttgtaaattgccatggcaaaatctcccattgctgccgcccgcagtctcttttcgatcttctcccagagagtcagcaggtcgcttaagctgatcacacagaaatcatggtttatgggtgctcccagtaccgccgccccactgcttgccgctgtaataccggggatcacgatcagttccatcttgggatgttcttctccaagctcatacatcagcgatgccaggccgtagataccggcgtcgccgctgcagatcaatgccacccgcttcccggcttccgcctccctaaaacacagttcgcagcgttctgtctcctgccgcataggggtggtcagcagttttttccctgcaaaacgttctcccaataatttgacatatacggtataacccacgatcacatctgcctgctccagcgcagcgatggcttctcctgtcatcatttcttccctgccgggacctattcccacgatatagattctgttactcatccgttttgcctctttctatcctttccaagccacatccgaatccgctctttccatgttttctctgcaactgccacggtcatgccatcctgtgcctgcttgcctaagcggatccatccgcctgtcccggctgctttcagggcggcgcgctcgcatacattgtccacgcccacctgtgtctttacgaacccggaaccgtgaaattctcccggcactgcctgtaattcctgtgctgtatacgtccaaaacggtatcctgtatttttcactgaattccagcagacatcgttcctcttttttcacgtcaatagaagctaatgctgcaacctgctctatgacaatgccctgttcttccagtatttttttcaaaaatagatccaactttgcgctgtccgtatccttcttgcagcccacgcccagaatatattttttcggctgcagcagtagttctgctgactcttttcgaaatgtttcttccgtgtcgtccgcaatcaggacatccactttttccgcaggaggatacgcacacagccggatccctgacggaatggtctcatccactgccagatgccctgtctgtacggacatggtaatttcctcgcctgccagtacttttgccgacactttggcgatcccctcccgattgcagatccgcagatcattccttttggcaaagatatccaccgcaaaactgtcatgtaagtctgtggctgtggtgatcaccggtatggcatccaatgctcccgccagacggaccgccagttcgttggctccacccacatgtccggacaacaagggaatcacatacttccccatctcgtctgccaccagtaccggactgtcgtgcagtttatccatgatccagggggcaatggcacggaccgcgatcccacaggcaccgatgaatataagtgcatggcgggccgccatctgctctcccgcccacgctgacaggctgttcctgacgcagattgtgtctgcatcgctgtcatccacagccggtaccgtctttttttccagtcgggagcatttggtatagagcgtgaccgcagtttccccgtccatgctctcccgtatccgctccgcaagctgttgtcctgtttccgtaaagctgatcacactaatcttcacgccgcccctcctgcgtttcctctgcctgtatggcacagcattttgcctgacggaattctgtggtaaaatccgccgcatacagcctcgacttctgataatttccatgggtgataacatcccccaccagtaccagtgctgtctttttgatgccatgttcttccgctacctgtgccagtgtctccaccgtacagatataagcctcttcctccggccaggttgccttgtagacaagggctgcgggggtgtccttcgcataaccgcccaagatcagtctgtggctcagttcccgcagcattcccgtgcttaaatagatcgccatggaagcatgatgggctgccagactttcgatgctctccttctgcggcactccggtccgcccttccatacgggtgatgatcagggtctgggaaacaccgggcagggtatattccagatttaacgatgccgccgcaccaaagcaggcactgactcccggacagctctcataagggattcccagctcgtccagtgcatccatctgctcccgcaccgcaccatagatgctgggttccccggtgtgcagacgcaccagcattttcccctgcgcctgtgcctcctgcatgagcttaagcacttcttctaaggtcaggtgcgcactgttatggatctcacagtctgctctggcatattctaacagctccgggttcaccagcgatcccgcatagatgatgacatccgcctgttgcagcatgtgcatgccccgcaccgtgatcagatctgctgctccgcttcctgcgccaacaaagtaaaccattcctccgcctccttacttttcgccaatgcaccgaaatcattggcatacatgatacattcgatcgcaagctttccctgtgcccgcttctccaaataaaataaaatacgctccatggcataatccatgacttcctgtctcctgccgcactcatccaggatccgcacggcttcctctgtggtgacacaggacaggagctttgcagcatccactgccgccacaccacattttacggcaaaggctgtcaacagctccatccggcagtcaccctctctggaatgggtattcataataccgcccgccactttaatgagttttccgatatgtcctgcaagaagcagacgtttgaagccctcttccaccgccatatcgatcgtcagaccgataaagttactgcattttacacttttatccagatcatagtgataggtatttttcaaaaaatccagtccataattgcccggagagatcaccacgtcttctcttcccagtgcccgctgctgcctaagttccacgcggatcgtatctaaaatggcctgggtactcatgggttccacgacaccgctggtaccaaggatcgaaatgccgcccacgatgccaagtctcggattaaatgtccgctctgccagatgttcgccctccggcacagagatctccactgacaggcttccacaataatccagtacctgacacacctgtaatacttcccgttcgatcatctctcttgggacgtgattaatagctgcatttcccacgggctgatccagtcccggtttcgtcacacgaccaacgccgaagccgccgtctattacgatctgtgcctgctcaggcggccgtccggttccggtcttcccaccggtttccttttcaggcgctcctcctgctttccgtcctgtttcttccagaaacgaaactttcgcacagatcaatgccccggtggtaatgtcgggatcatccccgccgtccttttccacggcgcagctgacctcccgctccttacgacagatcctaaggatctgtgccgtataggggatgcccttgggtgtctctatggtgatcttagttttctccctgccggtcaacagcatataagcagccgccttcgccgctgctgccgcacagcttcctgtggtaaatccataccgcatgcctctacctttccttcctcagctcatacaacaatgcattacagatggcggctgccacattgctgccgccctttcttccgcggttgataatatagggcacctccgtctgaaggatcagttccttggcggcttccacattcacgaagcccacgggaaccccgatgacgaatgccggacgccagttgctctcctgcatcatctcgtaaatctgtatcagtgccgtaggtgcatttcccacagcgaagatcaccggcttttcccgttttgctgccagttccatgctgatcgctgcccgggtggtcctgcgctccttcgccattgctgccacctctgcgtctgccatgtagcaatgggcttcgccgccaaaagaagccagcacctttttgttgatccccgccagtgccatattcgtatccgtcacaatgtccgcaccgttttttatcaggtttttggcgatctctactgcattttccgaataggtcatcgtctccgcataatcgaaatccgcactggtatggatcacccgtctggtgatcatatcctgctccgcaggcaacgtgattcccctctctgccagttccgccgcaatgatctcaaagcttcgcatctcgatctcttccggcaatacatattcgatgttcgttttatccataaatcagtctcccacagcaagttctcgtaacagcacttcattctcttcctgcttcttcaccgcgatccggtaatagccctctcccagtcccctgaaattctcacagttgcggatcaggatgccttttgcaagcaatctgtcatagatgggctgtgtggtgtagagcagcagaaaatccgcttctccggacactacccggatgcccagtgcctccagcccttccctaagatacgcccgctcggttttcacatattccacggtatcctgcagatattgctccgcctgctccgcacagacgatgcctgctctctgggcgaacaccgacagattccattccggcagctgtctgcggattttctcccgaagcccctcattactgcacaccagatatcccagacgcacccccggcatggcaaagcttttcgtaaacgcccgtaccagcaacagattctcatactggtctatctttccgagcagggacctgggttgctctctatcagtctcacagaactctataaaacattcatccagtactacgatgattccctgctgtctgcagtgctccaaaagttcccgcagatattccctgcccagcagctgccctgtgggattattgggatttgcaagaaacagtagatctgtgtctgccgtcagcgcctgtaacaattccttccccgggcaaaatgcggtctcctccgacagatatgcatattttatatggctgtctgccgccttcgccgcatactcatatccgtaaaaggacggcaccgggatcacaatatttttcggcttaagtgcatgtacgatcgccagaaaaagttctgatgccccgttgccaaacagcagatactcctttggaatttccctgccgttttgcaccgacagcatatgacttactgtctctgtcagttcgccggctgcggcatcgggatattcccccacatgatcgatagccgctaaaagtgaaagccttgcctccgccggcattcccaagggattgccgtttaccgaaaaatccagccgtaccggtctgctgtatatgtcaccaccatgtatgttctgctgcatctgttgtttcctcatttcttttcttgaacctgttttctttttagagctttccttcacagattgccagccgccgtgttataaccatccacagcccgctgccacccaggtcaggattcccaggcacaacagctcacagatccatgccgtccggttcatcagacgattgactctccggatatcctcatattccacctgccgttttggatccccaatatatggtttcttcacgactttgccaaagtaactggcatcgcctgccaattgtattcccagtgcgccggcacatacggattccgtctgggcggaattgggactggcgtgctttctgctgtctctgcgccagatatgccatgcctgcctgccgttatagctttttccgctgaaaaatgccgcaccgatcatcaaaaatgcgctgatcctcgccgggaagaaattcaccacatcatccagcttcgccgccgcccttccaaagtgcagatatctgtcatttttatagccgaccatagagtccatggtattgactgccttatataagaatccaagcaccggccctcccagtgccgtatacagcatcggcgcgatcacaccgtcggaagtgttctccgccacagtctcgatggcagccttcgccactccttcttccgtaagattctgggtatctcttcccacgatcatggataccgcctctctggcagcctccggattccccgcctttaattgtttccatacttttccgctctccacctgcagacaccttgccgccaggatctgataggtcatgaccgcctccaccaccatgccgatcctcggataaagtgcatatgctcccaccaggatcaatgccgtaaacatccccgtaagcagcaaaacgcttacaactaaaagcttcccctgtctgcgctccgctgcctctctctccggggaatcttcctgtgggttgccgctgcgcagtgctttttctgtcttcgcgatcaaccagccgattccccggatgggatgtggcagaaaatagggatcgccaaagatctgatccagtaaaaatcccgctccaaatgccaggatatgatatttcatccgttcgtttctccttttgtaagttccgatactgcagcttccgatactgcagcttccgacagcgggcgaaattccttccactgcggggttcctccgcctgccttaaatgccagcctgccactgtaaccctgtccgcattttacctgatagtcaaaatattctccaccgaggaaatgaccaagcagcgccatgatcgttccgccgtgaaccaccgcggatgcattttgtatcttgcgacccctctgccccgatgcagcacttctctcccagatccttttcatgtgatataccattttttcgtatccggcaacacttcggcggataaactcttccctgctctctccttccggaaacggcagggtacctccgctgtcgatccatctctgatagttcggatcttttgaaagttcctgataattatgcccctcaaacgcaccgaaatccatctctgtccactccgggatacagataggagtctgccccggatacaggatctgtgcggtctcaagacaccgcttcatgggaccggaaaacaggacgtcggcaattgggtagatcctgtctgtcacggatttttccagtgtcctgataccgtccggacttaaagcttcgtccgttttcccaagataccggccctctttattagaaagcgtcgctccgtgccggatgagggtaagatgaatctctatttgatcttctgtccgattccgcatacgactctcaccacctcatctgcctgcgctgccagctgttccagtattcttccggtgcgctctctgtaaattctctcctccgcttccatggggacgatgccgttgccgatctcatcacagatcagaatgcagtccggatgttccttgcagaaatgctctatcattgcctccggagcggttccctgtcgcagctgctcccggatagagtggtgcagatgattgacgatcacctgcaaagcgcctgtctctgcgggcagttccagtgttccatccaaaacagccacttcccgtccatcctcacagcgtacataactctgcttcacataatgcagttttccctgggcaaatccaccaatgatcaatatcattacatcagcctttccgcgattgctaccgcgaccaccacgcatccttcacaaagcgtcacaaagtatcccgctgtgtctccggtgatgccgccaaactcttttttgctgcgccggtaataatacgcaaaactaagcagggctgctgccacggcgagccctcccgccacgacagatatccacagcataaataaaatgcaaaggattccctgtccgtataaagcactttttaccacccttttgtgggctttatccgcaaacagatacagtgtcccctcctgctttgccgaagggaaactcaccaccgcgataccgcttaatactctggacaggaagcatccggctcccgtcacagtaagcatacgcagtgtcgtgatctccgagaatcctcccaggaaaatcagtccgtacagtgcaagcatgatcactgcaaatgccccgatatgagagtccttcaagatctccagcttccggtctcttgactggtaggaatgcagtgcatcacaggtatctaaaaaaccgtccacatgaaatcccccggtgaccaaaagcggtattgccgtccccaccacagcatagcacagggttcccaccgcgaaccggtcacagaaccatttccacagataccacaaagcaccgatcaccgcacccacccatggaaaaaagcagagggcgtaccgcatgtcctcgtccttccactgaaactgtggcatggggatcttggaatacatggaaaacgctatgaaaaacgatttgataattcgcatgtctgtttcctttctatccccggctgtcctgccggttctgtgcttttgctcctggtgagccgggtttgatccgctgtgggattcccgctacgacttccacgacctcgtccgcctccgcggcaagtcgttcgttgatccgccccagtgcctcgatgtattccatcgtagaatcatcgtagatcattccatcctcaaatacattattggttacaatgactaacggatccgcctgttttcttaatccttccataccttgcagaatctttgtgatcaccgtctgacgatccacaggcttttccccggaaaacatttcgttggcggtgagatttgacatacattccaacaataccgctcctgccggttccatttgcaagaccgcctgctccaactccgtaggctgttcgatggtagtgaagcctttcccctgtcgcagcctgtgatgcctgtccacctttgcctgcgtctccgcatcccggatctgcatggtggcgatataatatttgttcttatcaccggcagcccgcagcagataatcttccgcataagcggattttccgctgccactaccgcccaggatcagtgtcatcatgttgcttctccgttcgtctgaatgttcagcccacgccattcgctcacaaaatcatgcaagcatgatttttgcgcccggatatgttcatggctgaactgttaacgtctatattgttctactttgatttctgagaaggtagcgctctgtccataaatgctcattgccatatccagcagtgtgaacatcataacggctccggttccttctcccagtgccattcccgcatggatcaccggagacagctgcaaagcatctgccagcttcactgccgccggttctttcccgagatgggaaggaatcagatattcccgcacaccggggaacagccgctccgccaccagggccgctgccatgctgatcacgccatccagcacgatgggcacatgccacaaagctccgccgatgcacataccggtcagtccggcaatatccagccctccgactgtctgcaataccgtgaaggcatccgcatgccacagatcataggtttccagggcggtgcgcaccacctgttgcttccgagccagtccccgatctgtcagtcccgcgcctctgccggtgacttcctctgccccacactgtaatagggcggctgtcactgcactgctggtggtggtgttgccgattcccatttccccggtggcaaggataccgtatcctttttccttacactcccgtaccagtctgattcctgtggcaatggcacggatggtctcttcttccgtcatagccggttcttttaagaaatttcttgttccggagcacactttgcagttccatactccggggatggattcctcactatttatcccgatgtccacgggaatggtctcggcaccgatgctctgtgccatcctgcagacggaggaacccttcctggccatggactttgccaccgccagcgtaacctcctgcccggactgggtcaccccctcctctacaatgccgttatcagcgcagaagagcagcacaccctttttacgaatatcgatcacttccgtacctaagatggctccgatctgtgccgtgatggtttcaaagctacccatgccgtccagcggctttgccagagtgtcccaatgctttttcacaagctttctcactgctttgtccggcggcgtgatccggatctgcgccaattcccgtacggtatagttatgaaatacgggcttctctgagcataccatagatttcctccatacgcagatattcccgcagggtatctgccagcttatcgtattgtctttccttaatagtgcggtaatcctcccagacgccgtcctccagagagatgcctttttcccgggccagggtctgtatcatacgaccggcgatctcccccttgtcgaacagaccgtgaatataggaaccatagattctgccggtggaatcagcgataaccgcttgtgtgatttccgtgtttctcgtcgcatcgtctgcacagaaagcgctccgattgctttctgcactgtttgccggtccggctaccttgtccactgtccccttcgcaacgctgccatccctgctgcaatacaccgtctgtcccatatggatctcataccccgtgaactcgcatcctgtaagtccggagaaaataccctccaccgcatccagagttccatctgtctggcagcgatgtttctccttctgcagcactgtccgtaccggaagcagttccatgccgcggatctgtccgccttcctctacactgtccggatccgcgatctcacagcctaacatctgatagcctccgcagatcccgaaaatgggaacttttcccgcagcccgttttaccgctgcctccagtccgttctgccgcatccatttcagatctcccatggtatttttactgccggggagaaatatcagatccggcgttcccagctctcttacattcgtcacataccggacactgacctccggcatctgctcaaacacatcaaaatccgtaaaatttgaaattctgggatagtggatcacagccagatcgatcttccccacatgttttgcatcgaaacggtccgtcagactgtcctcatcttccagcgtaagttccatataaggtaccgttcccagcaccggcacctgcccccgttcggttaacatctgaatgccggggtctaaaatcgtgctgtctccacggaatttgttgatgatcaatccctttacccgttcccgttcctcttcggtcagcagcatcagggttcccaaaagctgtgcgaacacgccgcctctgtcaatgtctcccactaaaagtaccggtgcatccaccattgccgccattcccatatttacgatgtcattctgtttcagattgatctccgccggacttccggcgccctcgatgacaatgatatccgcatgcgtttccagcttgcggaaggctgccttgatatccgggatcagttctgtcttatgggcaaaatagtctctggcggacagatttccccgtacctccccgttcacgatgacctgggagccggtatgactggtgggctttaataaaataggattcatgcacaccagcggttcgatccctgccgcttccgcctgcatcacctgtgccctgcccatttccagtccttctttcgtgatataggaattgagtgccatattctgtgatttaaaaggggcgacccgataaccgtcctgccggaagatccggcataggcccgccaccaggagacttttcccggcaccggacatggtgccctgtatcataataacttttgccatcgttttctccatcccacagatgccaccgacatcccgggaatttcgtttctctgttttctaacacccacgctgttgctccgggctttctgacttttctatctgcttccccagctgttctgcgtactctaaaagctctctctgataagtctccagactgccgaaattctcccgacagcagataacgcggttacacttttccaactgtttcttcgctgcctgtattttttcctgtgtcaccggttcaaaaggatgctctgcgatcacctccgccgccagtgccttcgccacgggataatccagatcattttcatgcaggatcccggtgacaaaggggatccccgctctctgcagacgccggtaaattttccgtccgcttccggctccggcgatcacgaagacctgcggtgttccttccggcgccgccagctccatatcactgctgccctcatcatagcttcccatccggatgccatagagttcggtgatatagccggctgtcatgacttcctccggcgttccgatccggtccaccgccctgccgttcacacacaggattctatcggagatcttctccgccagttccaactcatgcaaggacaggatcaccgtaagttctctctccctgcacagcttttgcaggatcgataaaaattccagtttatgccgcacatccaggtaagaagtcggctcgtccaggatcaatatctccggctcctgacaaatggctcttgccaacatcacccgctgtctctgcccgtcactgatccggtcaaacaaagaatccccaatctctgccacctgcaccagttccatggcgttttgcaccgctgcatgatcttctgcccgcagcacgccgaaacgccctgtgtaggggtatcttccggtggccaccacatcctcgcaggtcatcagttccccgcgtaggcgttttgtcattaccactgccattttttttgacagttctgccccggtgagtgtccgcatattttctccgtccagccgcaccgttcccgcgatcagggacagctgtctcgcaatactttttaagatcgtcgattttccggcaccgttaggtcccagtaacgtcaggatctctcccttcctgagtgcgatctccacttcttcgatcagaggctttccgtcgtagcctacgcttattttttccgttgtaatataataaggcttctgcgtcttcataggtaagttatccccgctcccgtctgcttttggataccatgatccacaataccaccggtgctccgaagattgccgtcactgtgctgataccaagctctgtgggtgccatccaggttcttgccaacagatcacagaacagacagaacacactgcctcctaagaaacatgccggtatcatgagtaacggttttgtggtgccgaataatttccggatcagctgcggcacggcgatccccacaaaagagatgggtccggcaaatgccacgatgcatgccgaaagtacgctggacaacaccaccagcaggatccgcaatgtccggatgttcactcccagattctgtgcatacgtctcacccagctggtaggcttccagcggctttgctaacaggatcaccataaggaaagtcactgccaccacgatactcatcactttcacattgtcccaggtcattccggaaaagcttcctcgcgaccagttgtggagattcacaatatccgcgtcctccgcaaaagtcaccaccagttccgtaatggcagaacagatgtaaccgatcatcacgccgctgaccaccagcatggacatgctgtctacctttctcgccatgagaagtacgaatcccatggacaacatagctcctaaaaatgctgccaggatcaacagtcctgaactgacacggaccgtattccccagcaaagataccatcaccagtgccactaccatcttcgccccggaagaaattcctaagacgaaaggtccggctatggggttgtggaaaaaggtctgaagcagatacccggcaagtgccaacgctccgcccaggatccccgccgccagtgtccggggaaaacggatctcccacagaatcctcgcattcatgccttctttggttcttcccgtcgtcagtatttctgtcaatgggatcttcaccgttccgatccctatattgcaaagcaacagcacgagaatgcctgccgtcaatagaacaaacgctatgagatatctgatttttctgcgctgctgcatgtttttctccttcttttcctattcgtattccaatcgtattctaatctcattccaacgctcttatgcttacgctgtgtttctaggttctccatcttactgtaagagaaacagataacgcagcttagcggtatcatcgtccgtcaacaccgtatgcatatcctgcaataaatacccgattgccatggactgctggtacatatcgttggtggtgcaatagacctgcccctcctgtagggccttaaagtcttttagaatattgcatttgccgatcagttcgtccaacgtggtcacgccaccgtcgatcgaactgttgtagatcaggatgtctgcgttcttagccccggcatagaaatcttcgacctgcatgttcagtgtggagcgtccgcttccgctgtcctcaagatcctcaaaaatgtatcttcctcctgccagttcgatcagcttcggaatataatccgtactctgccgtacctggatcagtccattggaagtcacatagaaaaatgctatggtcttccctgttttttccccgctttctactttttccagaatctctgtctgctccgcaaaggcttcttctgcctccgcttcctttccggtcagagctccgaaaaatttgacccattccacttttcccaaaggatgctgttcatagctggaatattcgatcatcaccggaatatcaaagctttgaagcatttccaccacttccggcgaatgcgtgatcatccggttctcgatcgccagatcacagccttcagacaccagtaattcataatccggtttactgtattttccggcatagatcatgtcccctgccgccatggcatcctttgctgtctgaatgtaccagttctcctgcttctgtccggagaaccggatctgatccacagcgtccagcgaggcgaacatgtccatcgcgccggatgccaccagatatatattttgaagcggttcctgcaagatactgacgtcctcatccagtccccttggcaccggctgtccctccggcactaacagataccgtttactgtcgggaagcgttgtcagcatcttatacccatcttcgtagtaatccaccgcaaaattttccgcatattgcagctccatgctgcctgtttttactaattctgtctgttcttcctgcgtggcttctgctgcctggataacctccgatgttgcttccgccgatgtatccatagaagcagaagaaggactgccgcagccacttagccccaacagtcccataagaagcagaacatagatccattttcttctatttcttcctgacctcaaagttttcatgcctttcattgcctgcaatatttgagccgcaggcaccaatgtgtattacttgccgctctctgcactctcaagtgtctcagagtggaaagttacggtgtattctacctcatgaggtgtactcattgccacggtatcaccgatcatggtaaggggtgcatccagtgcttccaccggcacttcaaatacggaattgccctccgtatttaccggcagatatttttcaccgttcaccagcatatagtcatagttcgggctgctccattccagagtcgccgttgccgctccgtcagctatcgcaagctgtgcgggggactggatagaagctctgccgcttccgccctccatagtcagttcgatggtgtagctgccgtcttctacagtgctcagatcaaaagtgtctgcggtgccctccgctaccggatcggatacctttactttatgatcgtaccattttcccttggtaccgatcagtgccagatcgaattcctctccgatcacgggtacaggaacatcgaagccgtagacttcttccgtcatgccgtcactgtaagtcacggtatccgtggtgggctcaagcagtactgcaccatctttggctgcatcttccgccagacccggatagagattcaggatcttcttggagcctaaggaaatgtgaatggtcataacgccatcttttaccgtcagtgttcccttgccgtcacaggcctcactgacatggaacatggagctgtccgtggaaaattcagcggtgtagacaccatcaggaagctgtgccttgtcctgcgcagtctctgtgctgacagtttccgccgtttccgtgctctctgtcggtgttacggtgctttcctgtgcggcaaccgtgctttctgcggatgtcgcatccgctgcctgaccggcaccacagccgccaagcagcagacaggcactcagtccgcccacgattatgattttattcattaatgtctttgctttcattacttattttaatccttattttattcctgattttaattcctattttaattcttatttatttctcagccattgctgctgcggtatgtgccacatacagatcctggatagccttgatcccgccgagacctgcgatctgggtatccacgctgtcgaacttaccggaagcattgaactggcttaaccaggaatcctcatcctcgcctgccatatcgttgttggcatggtcacctgctactaccatcaggggacgaagaaccactttggtgtaacctgcttccgcaacagccttgatgacttcttcgcaggcggtctcttccggctcaccttctacggttccgatgaatacgttagcataaccgaggtcgttcatctgggtctgcatctggctgtaagacacctttgcggtgtgagaagttccgtgacccatgaatacgaatgccacgccatcttcctttgcagcatccaagctgtcatacccagcggtcttcactgcttctgcagtcagatcttccgctactgctttcttatctgcattgacaacggttgcatcgtctcccacttcacctaacaggggctcagcgacttttacggatgcgaactgatccttgtaggcttctactgcctgcatcagctcgtcatactctgccccgtgcatcagatgggtaggctgtactaccaggttcttaacaccgtttgccacagcgcggtccagtgcctgatccatgttgtcgatatgctcatcatctcttgcctgtatatggttgatgatgatctgtgcggtaaatgctcttcttacagaccagtcgggattggctgctgcgatcgcatcctcgatacccttgatatcagccacacggctgtcgttaaaggaagtgccgaagcttactaccagaatctcgttctcaccgatctcatcctgattacggggatcatccttggaagcatctccggtatctctgccgaaataatcgggatctgcattttctccctctaccagttccttctgtgcgtcggtcagtgcatcccatgctgccttggcatctgcacactgcttatcggtattctcagttctctcctgcacatagatggcatcgatcattgcagctacttcatcggctgctgcctgatctgcatcttcggtgctttcggtagctgctgtttccgctgcctgggtggtctgagcctcagtgcttacctgtacagtgctctctacggtctcctgggtattgccgcatccggtgatgcatacagcgcccagtacggttgccagtactactgctacgattcttcttttcatgtttcctcctctgacaggttttctgtctcttttgattttggggtttgccccggtgttcttaaatatgtaagtcagaaacatgttttatagctattcagcaccaaaaataaaacccttttcctatttcaggtaaagggtttgtacacataagaaacgaatgcaaaaaagattctgtcccttctgcattccacacgtacaaccagttactcgtggctttgaaacaaatgtttctgtacagcattcaggcaggtctcccggcttgaagatcattgcatccgccatcttcccggtctcccagtgatctatcggcttcagctccctaattacggtgacgagttcgtgcaggacttacacctgcttcccttttcaccggagccagctacttacgtgactgctccggcacctgaatactccatattcaattgtggctactatatcacagattttctgaaattgcaatgtcaatcagtcatctgttccaccggctgtcgggatcagtatacctgaaaattagagattggcgtcattccgggcataattcaggatcatttcttttaaaatcagcagatcacctgtataatccttgttgtccgttgctccccagataaaaccacctgcgtaatgggtacacgctgccatcatggtatgcaccgtcacacgcatgaactgttcctccggaatatccgtgcggaaggtcttgtcctcttttgccttcgcatacatcatatgaagtcttgtgttgacggaattcagggatgcgtggaaattcgccagttcctcctgccgcaccgtctggtgtgttatataattgttgaagttgtcattatactgcagcagatccttatggttctgatacatgccgatataactgtccagcgtaaaaataaatcttccgatggccggaatatcgtgtatcgaagagattggtcttgcctcatccagcttgtccagataagccttccatttcgatgcgcagaccgcaatagccagctccgtcttattgttgtaacagcggaacaatgtggcacgtcccacaccggcttcttttgcgacctcatccatactgaccgcttcgattttcttttccacaaaaagccggaacgccgtatcgatgatccgctggttgcgctcatgctctttatccatctgtttctcagattttcccatttttctcttcctttttcatacattcttactgttcattttatggtaaaaggctgtgactgtcaacgactgtaaaaagctaatgtaaaagtgccttgcagattcctacgaattttcttgtatttaaaacgccaatatcggcgaaaaaaatacaaaagcaggtaattttgtattataaaaattctttattttcgccaagtacgcaaataaaagaaattccgtacaaaaattcttgatttcggaatttttttgtacggaatccattgtttttatactatttacaccaaactgacttctctatcaagggttttatcaaatgcatctaggctcttttttgtttcttcctgaatatgcttatttactgtttccatcagtgctttttgttgttcttccgaaagattaagtatataaactatccccctaataaacttaaattctatttattctctttgacgataatccagcgtcctcttctgtttgtgccttctcttgcaattatgtgcatctcttgtaactctttcatatccttttgcacttgctttctagtcaaatctaattctttcataatttcaacttgtgtaatagttgagtttacttttatcagcttcaaaatttccttttttctttcagctccttttattggctccttttcggctcctttttggctcctttttggctccttttcctcttcgcttgtttttatcgtttgttttttcgcaaattcaagcgataaacgagtcctgtcaggattataactttcttccaccacaggcattggccagccttcattctcccaaacctgataaatatctgggataccactaccggctctttcaccaataccaatcatattaaacatcttcattagtgttttatttctaggatctgaaataccaccacgaagcatctgctttttaccaatgcgaatgctaccaggattctcgataaccaacttgtcatcttccttcttaatcactacaccgcaaggcaagaaataatctgtattaaccaaacaattaactaaagcctctcgaactgccttatgaactggagtatcatccaccctcgtaataccttcaagcttaaaaggcttcttaatatcctttgcaattttgctatttactctaaagaagaaatcaaatacattaccactccaatcaccggagctagactgcaagcgatctgtccaacgtattgttgggtccagcatctctctataatctaggaaatactctggaaattctcttacgatatgatattcttcaccgaacataagcaacccagctgtagtaggatgtaatttaccatcctcaccaaatcctgctgcacctattctctctaaatactcatcatctggtaaattattaaatacgtgctctggacgatagctcttatgatgatttctgaatcccttcaaggactctgtatcaattgcagaaatatcaaactgttctacaatcttcatatcctctgtctcatccacagcatcacggagcatacctttaatttctgcctttgagcaatgatagtcgccttcccaatctctacgatagcagccaccaaataaatcgttattaatataaacaggcttctgatcacgtttagctcttggtacataaataaccagaatggtatcgccattaacctcgtaggactccacatttttatccgatagcaaattaatgcttaccttcttggtatcatgcattgtattccaaaagtttctcttaagtttatccgcattcttaagtccagtagtataccaagttccatcctgccgctctccaacgccaagaataataacaccaccattagaattggcaaatgaggaatacgactcccataatgctataggcaatccaccttctgcctttttcacttctcgacagttatcttctttatatttatcaaagttcgataaatcaaacaaatctgacatatgagattctcagctcctttcctccatatacataaacgaattctcaaaaaatatcaattcaatttttcagcccattctgcttccttgaagccaacaagcacagtatctccatttacaacaagtggacgctttaccaacattccatttgtagcaagtaactgaatctgttcctcttcactcattgtaggcagcttgtccttaagctgcatttctttataaagaagcccgctagtattaaagaacttcttaagggtcagtccactcttcccataccattcctttaattcgtcataagtaggattcacctctacaatatggcgctcagtatattttatattatgctcatccagccattttttagccttttgacaggttgaacatttggggtaacatataaataacatttgtgattgctccttatcttcattttccattggcataacctggctaatatctatatctagtgtattaacagtatacacttttgaacctgtaatatcataaactcttgttttcgcatcaacatcaaaaagcaacacatttgtaccagttgctgatactgcacttttaaacttaattccatcaaaaccaagtcttttaatatattcacagagaaattgtgtcggtgcatactctatttgatctccaaaattaggcttagaaaactcttcagaaattctttgtaagtccgcaactatagaatactcatcctcctttattttttcgggcgaatatgtaaaatcaaatatcttagcatctctgatgatttctatagtggctatgttatacattttctgcatctgtggccgcatttccaatattgccgttttaatatcttttgcagtatataaatagcttattccttttggattagctctcccctcttttgcataagcattcggcggagcatcagaattacttttatcaaaaccatagaagtcctttttattattcaacagattatctattttttctgtaattcttctcctcttttcctcatcaccacataggtaaatggacgcaatattcattgctgattcattaaaaatgtcagtagcatcaaattctaaattagaaaactcatccttcattatctcagaaagagctattaccatatcatttttaaagaaatcttgttcggtataatctcgtgcacgatacaaaatatcaccttttgatatagtacacgttgctttttctgcgatatcagatatcttttttagcaattcactttctggaaaaaatctgttttttgtctttacttcttctgtaaaactttcccataacttttgcgtattgtaatcaatatacatcaataggataaacagcataataaaccaatacgttgtttcatcatcaaaatccttaaacgcttcgatatttttatatttggatgcaaattgtatcatttcttctttcgtaacagatgcttgttcacttattgaatcattttttgttttattaatacttttcattttaagctggtctcctacaatccgaattagactatcaattactatcgtgatgaaaaaatttttaatattgtttcatcatcattttccattgtttcatcggaataataacaaaaactgatactctcatcgttactaaaataggtatataaggatggtcttaacagtttggttttatcagcattaaattcgcttctataccttgctcctctccggtaaatcaaagtgtgtttctgcaatggtattcagttgcttagcaatatccgaaaaaggcttattcaaatctaatgtcctaaccgtaatctggttaccatgcatttgatacacattatccggttgaatttcctcatccgttttcgcatacagcagcattccggaaaccttgtgatcttcatctccaaattcataatcgcgattcttcacatacgtgaatatttggtacatattgttcgaatggagcgtgtgtttgtcatactgcgtttgagttgtgtgactataatatttcgcatcaataatcagtacggtattacctttttgcagatgaatatcactctgcattaccggcaacatcgttctgattccatcgtccacagaccaaggtatctgagaagcactgactgacagctcaggaaaatgcttactgtaatattcaagaataaatttctcgtacagcctacacatacgttgctcatccacaaaggatgcaagcctatactctccagcatctgttgtgataagcataccctcaattatcagctgacaaatacttataagcatccgataggtctgattatttcgctgaaatctgatggatgaccatcgtatggaggttggctcaagcttatcaacgtcagaaaaaaataacatcttctttttcaaatcatctttgtactccgccttaacctttgcatttcgcagtaacaacataaccgccgtcttgattatttgattaagaagattattctcagacaactcatcataatcacatgtcagtaactgcttacgtaccagtcgattcttaattgttcccggcaggttaatctttcctcgcattaccggaagctcctcctgacggtttatgtactcccggtagagaccttgtttcagctgaattccaattcccttcgcgagaatcgcagccaatagatcatacatctcatcaaacgattcagctgctacatcatcatagttttcctgattcaatgtttgaaaagcataggacagcatataatatatatttttgatgaatatgctcttatctttcgtcattgaaatacaccgtgcaagatattctcccaccgctgtaactttgaactttcgtcaaaccagtattcactgagcatcggcaaaatatcaaaatcaacaacgtccttcatccattcttctgtgcggtcatccgcattacagaaatagctatgccctatgcagaagcctttacccagagacttatcctgagctatttctttgttgagttccttaatacgctcaatgagagtgttgaatgtttcatttgcaaagctattctgataattgataaatccctccgaatcaaagcctggttccatatcgaaaaagctgaatctacgtcttaatgcataatcaatcattgccagacttcggtctgcggtattcatcattccgataatatgtaatctcttaggaaccgaaaagctcaggccattatatgcaagcgttgcttttttatatcgataatctgcctctatcagcatcagcagttctccaaaaatcttgctcatgtttccacggttgatttcatctatgatgaagaaatagtctttatctggatggtttgcagccttttggcaaaaacgatagaaaataccatattttagttcaaatccattttccacaggcttatagcccatcatgaaatcttcataagaataattctgatggaactgaacaaattcgatacggtcatcatctttttcacccatcacagagtaggctaatcttttagctgcaaatgtctttccaactcctggtgctccttgcagaataatgttctttttctttttcagaaccgctgcaagcctatcgtatttggcttctgtcatatagacttctcttaaaaaatctgttttcgtatattcggtattgcctttccctgacggagccggattttcctctcggatcatgtctatgataaaatcatattctcctcgtgtaagcttaaacaagctgccctgtgtcatagagaaatattccatcttctcaagctctgagcattctttcaacgtcgaaaaatcaataggaaaggaaaggccttctactttttcaaaatagattttttgcccatcttgctccgcactaacgcgcagaattgcaacgatctgctttactggtgtcgattcataaccaattaccatatcaccagccttagcatctaagaagttctgaaaaatcctgcgtttatttccattgtcgttataaagggtatagtcctgaacctcaccaattggcatactggacatactccatattttaggatttgcatttaaaaaccagtagtgcaaacctgatgtatcattcttcagaagttcttcttttgtaatgtcaaaataaggctttaagatatagtcttcaaagagctgtgtttcacttttgggaacaacaatgcaagtcgagttctcgtttggcgtccaccactttttatttccagaataggcacttgtatcacgagactccgtaataaccgtataacttctctcataccagccatcctgcttttctggattttcatttacttcatccgaatcaatacgtcccaaaagccgtatgctgtttccacggcacaaatagaagaaatcgcctttcttcattgtagccataaaatcttcgccctgagagacttttgatttaccctttgcagctgtatccttatgtaccacaattacttgtcttttttcaaatgctgctgcctctacatcagaaatacagtcattaccatggcttatcttccagaaattaggctccaaatttgcatacaaattcaccttagacaaatcaactcgtccaagagcttctgcaagctcatctctaagcttccaaatataagatccttcttcatccttcttgacagccttgccaacataaagaaccggccaccatttactttcatcgttgtcccgcgacatgattggacagtttgttttatttacaatccttctagccagcgctgatgatcctgaattatagaaattcttactttcaccgtattttatcgcaagctgagtgcaggtagccttccctccataatcaagaatgcgcttcattatttcaaggctactgtctgtaaaaatatccgcatcattaagcaatacttcccaatcatcgactgataatgccggagtataatctgttggccaccattcatctgatgtcggtgcagattcatctttattcagatatcgacttataaagaatccaacatcaattgtcagtgtttttaattctggatctggatagcatgttcccgttatttgtgatgcaagcatatttttgagttcttcatcttgattcaactcttcacagatttcattatagaaagcaaagaaattacgaatgttatctgcatacgcgccctttttgaacgtataatcgctttccagctcattggaaactgccttgatctctgtaagtttataaatgtaatacttatccggataacgcaaccataaataggtgcatatcgcattctcatactgataatgctgtgccgcgccgttgccatatctttcaagaaggctattcgatttctgcttgaaggagtcgatacgttcatacacatctttgccttcatcaaagagctcgatgaacattgctctgacttcttcctgtgctatctccgcaaacttgataatcattttggccggaaagttatttactgaagccagcagattgcctgtctgcgacaatgcctttgtaagcattgccgcaaaatcatccgcattaacatcccagttcacctgaaagcatttcacagcttcccacttatatttttcgtccggccactgtgtctgtataaatcgtttcttgtattcaacaagcgctgactttagtcgcattttattgaacattacaaatcaccaccttatcattttgcattacgaagactcttgtatatctcatctgagaaaataccaagaacctgccgcttcatctcatcattggagagaagcatggagaagaagtcctgattctgtgacaatccctcaatcaaagcgtcatcaatatcatcaaaataggaaaactcaaaatcctgctgcgtattgttgcgtgcacttgtcttcaacttttctgacttcatcaagatatcacgaatttgcagcatcgctctaaccactaaatcattgtcataattcttaccggtgcggctgttaatttcatcgatgatctcagatagtctcttttccttgtcttctgtcagcccaaaatgctctgctgtcgggagcttcataaccggatcggcaacgagatcagccgacttatgctcttcgcccttcttctgcacgaaattagtagccttaatctttccatccagattaaaaccaccgcctggatgtttgatattgatataagccagcagatacgacacaaagttatattttttatgtaaatctgtatcttcaaagctagacacctgcagcagaaattcatagaagcgaacaaagcttctcatatcagctacacactggcgctgcgtattgtattcataatgttcaatcagcttcttgctcttctgaaggaaaaaggttaatctctgtttctgcttaccattcactttgtcatcatacaggatatcattagccgcttcgatatccgcaggatctaatatgccgtaagcatcaatcttagcttccagatcatataccgcactcggtgttacagaattggccagtaatgtcgttgtataaaatggcgcgaaagcagatttgatatcttcatagctatttacaaaatccagcacaaacgtcttcttgtcataaggtgcacagatacggtttaagcgagacaaagtctgtactgcattaacacccttcagctttttcaacacatacatggcacagagcttcggctgatcaaagcctgtctgatatttatttgctaccagaagtacctgatatttatcagtatcaaattcctttgtaagacgatcctccgggaatccattcatggaggcttctgtatactcccgctcatcatccgggagctttacttttccagagaaagccaccaaagcatgaatgccctcgtatcctttcttcgcaatgtaattttcaaatgcctgatgatacttcactgcactctggcgagatgccgtgatcaccattgccttagcctgaccgcctaattcctgcatgaccgtggtgcggaaatgttctacaatcacttctacacgctgcgcaatattggtatcatgcaattctatgaaacgtgcaatctggcgtttcgcatcatttgttttacagcgcggatcatcctcaatttctttgttaatctgatagaaagttgaatactccgtataattctgcatcacatccaggataaatccctcttcaatagcctgcttcatggaatatacatgaaatgcttccttctggcctttggtattctggtgtccaaaaatctgtatggtggtaggcttaggtgtcgctgtaaaagcaaacatcgatacattggcctgtttaccattccgcttgatttcactggaaatcatatcttccacatccgcttccgtatcttctccggaaccaagcgtcatcgtaatagcagccatatccttaccggctgtcgaagaatgcgcctcgtcaatgataacggcaaaccgcttgttcttcagattagctacactatcaacaatataaggaaatttctgaatcgttgttgcaatgatctttgtattgccattcagcgcaatcgccaggtctgcggacacacacttgtcatccatcacacggatgagtcccgccttgtgttccatacccatgatggctttctgtagctgcctatctacaacaactcggtctgtaacaataaccacattgtcaaagataatcttgttgttggcatcatgcagtgaggttaaccggtgtgccagccaagcaatagagttagtctttccggatcctgcactatgctgaatcagataattctgtgctgttccattttcgcgaacatctgccagtatcttacgtataacatccagctggtgataacgtggaaaaatcagattttccgaacgctttatttttccggtttcttcatcgaccttttcttttacttccacaaagataaacttgctgatcagatcgagaatcgtatcctttgtaagaatatcttcccacatataggacacactgtacttatcctcaaatgccggatttccagcacctgctgtgactccatgcccgttacccatgttgaaaggcaggaagaatgtggcctgaccatcaagtttagtggtcatatacacttcttccaaatccatagcgaagtttacaagtgttccagctttgaatcggaagagtctcgtctttggatttcggtcagtacggaactgatagatggcatcctgataggactgacctgccgcattacatttcagctcaaaagccataatcgccagaccattcaggaaaataactacatcgattctttccttgtcgctggcccagacctcctccatcacagagaaaatattctggctgtatttctttgtcaattccggattaaaggtagtcgcgggcttggtatacatgagctcaatcttctgattcgaaagctcaatgccatgcttcagaacctcaatcagactaccacgtgtcttcgtagtctccgcattgataaagctgacaatcgtctcttccagatcgtctttgtaaatcttgcgcagatactccattgtatcagactgtgtatcgttcaagaatttaaagagcatctcacgatccacggcataatagcggtcaaaattcgtagccttacggactacaaaaccattgtccttctccaaacgctccagaaggaactcctggtattccttctctgaaacaatggaggtctgatgaatcaggcgcttatgatattctgcggctctttttgcagtaccgttggtatcctgctgttccacatgaagctcaaatatatttttatcatccattcgcattaagcctcctctctgatccatctgccggttttcaaatcgataaactcatccagtttgattttcccttcaaaatccgccccatattcaccggcacgagtctggtcatcaaacttgaagctgttgttatagtatctaccggtcttagttttcctaatcagctcattgtccatcataaactgaatcacacgcttatgattctcaatatcatcgccattcaggtaaaagcaaatcactcccgtcggagcaagctgcacttccatgtcggtacacttgcactcatagcatacgtgctccgcaatggccttctcgcatatctgttgtgcaaaggactgatcttcaaaaaaatacatccatttaccacatttatgcttttcgagcttgctctcctccccggaaagataccagtaccatccaccttgtctgatcatatagctggcacctccttctttcctgtgacgtattcatagatcagggattttttatattcattgagtgttgtgagctgttcttttttttcgatggtaatcgcatcaatttcactacacttttcatctagatatctaacaatatccatctgatcctttggtatcggaataactactcgtatttctcccaactcatcttgattaattttaggcattttaactctgtcatgtataacaatagatacctgttcaacaaaataatccgaaagcatcatatataagataaactttgtcatttggttactttctattggatacatatctgcactacataacccatcaaacggtgcaattataaccttatttaaattaggacgaattttagaatacagaatttgtcccttataaaacaagtgatttccgctaattattcctgcttcttcaacagagttgtatgccagcaatttacctgcatttttctctatgttatccggtgatatttgaggatactcttcatatccttctgggctgaccaaattagatttaatttctgccacatatttaaatctggtttttatccatgttcctggaattttcccaacctcttctatgccactatccttcatctctacatccgggttcaatcccttagtaacagtctcggtaatgacagaacgcatatattgctccaaggtgtcaatctgcgtttgaatatctgctgtgagggcatcaatctcagcacacttggcgtcgagaaaattcgcaattctcttttgctctgtaattgtcggatacacaatatactgtttttttagctcagcaaaatttaatattttgcgaactcctccacccatattatgaaatgctttacagctatcatatgcctttaacaaatatgtaaagaattgtgtggaaatatcatcatctaaaatcggtgcaaaggcaatatatgctgatgtgataattccacgttccttgacaagcgccactctttgagttacaaaatcgaaattaagattaagaccgttaagcattatcgtgcccgggttcacaaccatgtaattcaagatggtatttgcaacatagtcgtcatcagctgcatcaaaattatcctttttaactatatttccatatgtaaatttgagtgcatttttttcgattccaagtttatttttctccgttacttctctaaactttgctcgaattggtttgacatcccaagaaaatggaatttgtcctacccactcaatcccgctgtctttcatctctcgcatatcttcaccgccttactcgaacaattttgacacacgttcagaaactgaaagctctagatccataaacctcacttccagttcttcgctcggtgttggctgttgatacttgtagaaatagcgtgtaaacggaatctcggcgccggtctttatgactggtttctttttgcccagatcctcttcaaagaatgctttagcatccgggacatgcggcagtacttctcttgccatataatcggagatattttcttcccatttcaccagttctgtatctttggtttccttatcatagagaatattgccctttttatctttctgaatttcggcatccttatccatgacagacaaaccatctgcaatcctatcaagcagcttcttatctgctgttgcattggcaagggcctttgtcagaaccggcataaatgctttcggtgaatcataaacctgctctgatactgctgcctgcagcgctgcaacgattgctgcataaaccggctggttgttctgataattttccagcttctttaagtccttaccggatagttcttccatattctccagctcatccaccttagtctgatcgtaaagagaagaaagagagccctttgacagcatcgcttcaattcgctctcctgtgatggcatagcttctctggagaggctgcattacggtgtactcacgatagataaactcttcattctcataaatcttgcaatactcattctcagcaaaatccgcatacagtttcgtaatctcagaacgattctccgttgagatttcatttttcttatccccaagggctttacgtaatttgttataaaatcctgacgcatcgatcagctgaatcttaccttttctttcacgtctcttattcttagaaagtacccagatatatgtagcgatacctgtgttgtagaaaagatccataggaagtgcaataattgcctcaatcagatcgttttccaacatccaacgacggatctggctttccccggaagcagttccaccggagaacagtggactgccattttcgataatggcagcacgtccaaaattgtcgtccatcttatctatagcagactgcaagaacaacatctgcatatcgccagaaccaggaagccccgcaccccaacgaccgtcaaagccctttgtgtattcatcattaactgcctgttccacaccttctgctgcatctttaccgccccagggtgtaccgaatggcggattttcaataacgaaacgcatcttggttcccttgaatcggtcagctttcatcgtgtcctgatagcaaatattctctgcattctgacctttaatcatcatctcagccagacagatcgcataagattctggattaatttcctgaccaaacagacgcacatcagcagacggattatagcgcttgataaagttgtaactggtggaaagcataccgccggttccacacgcctgatccaatacggtaatgacctttccatcgtcaaaaatatcgtcacaaccttctgccagcagaatattgaccatcagcttgatgatgtctctgccggtatagtgatcaccagcctcagcattttctgagaatcttctgatcaagtcttcaaagatgtagcccatctttacgttatcgattgtcaccggattcaaatccaattccgagaaggccttcaccacactgagcagacgattgttcttgtccattttatcgatctgtttatcaaaatccaggctcttaataatatcctgaatgtttgcagaaaaaccctgaatataggatttaaaattcgctgcaagatggtccgcatcatttaccagctctgtaaggtcaaattcactggtgttgtagaactgatatccggatacacgatacattgcctttgcaggatatgccggattcgccttgaactggtctactactttctgttttgttggtgccaatgcgcactcaaatctacggatgataaccatcggaatgatgacatccttgtatttgtcactctggtatgtaccgcgcagcttgtttgcgatagaccagataaaattcacctctgtagaaacgtcaacaggggagtcatcccacattgcgtcaattgtctgcttttcagccattgctgtatcctccgttcatcaggatcagatatccctgtctaaatctattttaattcttaccgtgccccataatcaggactccgtattcatcatcattttgtaatgctgttcctgctgcattgcctcaaaaatcatcttgaacacttcttttatctgctctgcatcaaatcctttatagctgcatcaaatgttggtctaagtgttttgctttgattcagctgctacggacttctttttatactcttccgcaaccgcactcttatcagcttgaagggcctctatcttttttggcacttctatatttgtttcgcaaacggtaaatacaccggccagattgccatagttggcgaaattggcatcaataaattctgtattgtatgtaagcacatcatagtctgatgctgacttgccatttttccattctattcctgtattatcacgaagagatctggctattgtggattttccagcaccattctttccatagaaaaagtttacgaaagtcggctcaattacttctccagtaaaggtcgcatcgtttaaggttattctttcaattgctgattgcatctttggcttcatagaatatacctcacctcttttcccttattccttgattttccctgttctaacccactcatcaacttcggaaattttaaacttatatctcttacctgctttgtaaaaaggcagctttccttcttttatccatgttctgacggtatcctggctgagactcaaatgtactgctacatcctcaaggtttacccatttttctacgttcatttcttcgtattccttgctcattttctacctccattcattgctgtctgcgagctgtattacatagagaaaacttgaattcccccgcaggcctaattcaaataaaagctcatttagtttctgctgtggaatcgaattcaaaaactgatagtatatctttattcctttatcttgaacttttatatcggtgataattccatagtgagcataatgcgcttcatcagttttcccataactatggttttcagtggctattgccaaaagggaaataagtgcctcctttgtttttgcagctcttgtattccgacgtattccctttaatggttgtcatcatactttctagcggctcctgaaaatcaggcaccaagaccttagataatcctatcaatacttctggttcagacagcccatccttttctcccgcgtaatgttctcttactccagcccgtggctttctatcctcaagcagtaaggtgaagaacgtgccgccacagagtcttatattctctctattcgtcattgattgtccctctttttcaaaacaccaactctactaactctgccaactatgacacgttaactcaagcaactattggatgtccttgtgagcaaatcacagggacttttttatttggatgcaggattttctctggtacacaaatcagattaaaccccaataaaccttaataaagtatatcacaatccacactccttttcaattgcacgcaacgttttgtgatgataggaagatgagaatttcgtgatagccaaatgcccctacgattgctcaacaaagccaatcactggaggaaaatttatggcaaatcacgaaaatcttagtacaccattcatctatcttcgctctacaggagagaagatctctgtcacaaaggaacagcgtgatgctttctataaggagtccgaccgcatccgtcataaagagcagcaccatcatcgttgtatgtgtagcaaaaaacatctctgggaatgcgatggagactgcatcgcatgcaaatatcatgcagccggagatacgctttcactcgacattcctaccgaagacggtgaagtcaatatgtacgactacattcctgattcatcaccatcaatggaaaatgtaattgcagacaggctccttctcgaccagctttttaataggttgagagaacttgatccggatgctgataccatcattcagctctcatgtctacaccaacaatagaagcaacaagcattccgcctttcagaataaaattattcctgtattcagaaacagaaactctttctaagaacctttccacaaaatatgttctaattaatgcttgcgcaacttcactattcccgccggacatgttttttactttgtctttaagttgtttcgctgtatgaatcataccattacctccacatacatcatcacttcatcccttactccaagtttaaccgcatattcaatcaatcttgaaagattcttttccttcgaggacatatattccttgattgctgtctgatataactgaatttcatatttctttcgatctttaatcaaatcacaaatacatctttccttgtcatatactttaaccaaattaccgctgcttgacaggatttcacaagttcccataccaagaatctctgggtttgcataacgaacttctttgtttttctttttgatatgtgttgcattatacccggtaggaacattgaaacaaatatgattgtattctctgtcgataagaccatgcaaataaagggcggtctcgcccgaataaataatattcttatttcgttgctggagtacaaacaactcatctggccacacattatctaagatataaatgccatgtgccactttttccatgtcatgctctctgacgtattttgatacagatgactttgatacacctgattcaacagccttcgatgtaatcaaatatccattgtctttttcaattagcgattccaaaatatctgatgttgccatagttgtcctccttatccttgatatttacttttatgcttaaattatattgtatttaagcgtaaaagcaaatataatctttagcttgcagaagtaaaagataattcttctttattatgtttttcttcctccaactcccggaggacttcatcgccgtacttatcaatcatcagttttgccggataaaccgaaaagtgtaaaatctgtacaaatgtttccaatataaaattattcataatcaaaatgacaactgccaatgccaaataatgtgttgcagtacttatttttctttttgtatgaaatacaaaccggcagttcacgccttgataataagccctttgttcctcctgaaaatgtgcatggtcaacaatttccatataattttctatgaaattactttgttcatcagaaagctcagagcgaaatttctcatatatcattgcagatccctacgaattttcttgtatttaaaacgccaatatcggcgaaaaaaatacaaaagcaggtaattttgtattataaaaatgctttattttcgccaagtacgcaaataaaagaaattccgtacaaaaattcctgatttcggaacttttttgtacggaatccattgtttttatactatttacaccaaactgacttttcagttacttcttctgtcgtgtcaggagcgtaactgcttcgcaatgccatgagcgtgcaataaagatgcacatcccttggcttttcgttaagccttggattaaaaatgatataaaatgctccctttcggagcctgctaaacagcatactttataaaaaaagagcgactcaaggtaaaaatttaccctatcttcattcccgaccacaaatttttataataatatttccttttttgcaaatgctctatggggatgaatactctcatctgttaccacctttacttttatcgttcctccttttccacgaaatcttgtaaatgattccttgcttatttccctacaaatatcttcacaaaaagcagcactatcaaatgccgtcttcacaacataaatctcatcttccctttttagcatatcaaaaatactaatataactttctgcaaatgcaagcatttcttcaaaagatattgagacattacaaaatgttattttaatagttcctttttgtgtatgcgtaaaagaaccattaaacaattcttttgcggttattaaagtacacggacatgcatttataaacggaaccgaaatttcaacattcttaaaaatattcctcttatttaattgtacagcaatatttaaggtcacatctgcaaaagtatttttatttgtccttggtgtctttatctttttcagcaaagtgcattctatttttaattcactatttataccaccattaaatcttactaaattctccatatcatctaacaaattttcatggaatgtgcctgcaaaagaatttaactgttctactaaacgtgacatatgtattccacgatgaaattcatctaattctatagatgaactacatgtagccacagagtcagcatatccttttatgcgagttggtattctcaaattctctatccccacataatccaacgcaatattataaattggcattgttttggcaatatccgttaaatattctacattttcagttgcccctgttcggttcttaatctgttttgttctatccaaagttttattcagcatatctattgcgatttgaatctgtttctctgcagattctatagatgaactatcatttatttcattataccatttttgataacattcacaatttataaaactctctatgtcttcccacattaagttcctgttaatcttcagcaactccaataaatctctactacatctatcacaattatatgctgagattattggctgtggaaagtagtctaatcccgataaatgaatttgtgggtttttttctcttatactttttaaccttgtattaatttcaattaaactccatacccatacaggtctatacattttttcttgcagtaaaaattccaaaatagtgttattttgcactgcaatcggtgtataactaatgtttttaatacctttaccaaccaattcgtttacagaatttacaacatcatcaatcgcttgcttttcagacaaaaacggaggctttataagtaaatatacttttatactacacaatttttccaactggtttactaaagaatagaaatcttctatatttattcctttatttaaacacgtatttctcacaatgtcatttgtagactctattccaaaacatacttcaaattctaaattagtctttacaatatagttttttaatttatcaaagtttacaaactctggtcttgattccacacaaatctttttaattcctaattttattttgattttactaataaagttaattgcaacattaaaattcaattcatcttcattaaaaaaagaaccgttgatatacagcttgagtttctcatgatttttatttaaatttactaaattttctattattatatcttcattatctgtaattacctcagtagccttgaatcctgttctatctgaataattgcacattgtacacccaccaccacgacagtaccatgcacacatgttttttattatcaaacggtaacagtcccctgcatcctcaaccaaaaaatccattggcatcgtttctctaaatttccaattttgattaaaaattttcatcagattattaatcatttgttcttcctcccatagtaaattgaaagtaaaatacctattgcagataataaaagacctaagtaccctaccaatgttgaatttataaattcaactcgttccttaataaattcatgaaaatataatccaacagctcctacaataaaatacagaataatcaaaggccaattaaacacatatttatgtaattttgttgcaatcaatgaaattgttaatttaatgttcttttttaactcattcttaaatttacatttatccaatacaaaatcctgatatgatgtcaaagtttttattgcatacgaaaccggccatatcctgctataactgtctgaatttttatcataccattttccttctttttcattttccaacagtcgtgatatagacttagatatgcactcatctatccctttcatgtattcatatatatctgaacatctatatttaattaatgtcaatatcattatttccaaactaccgccaccatactcatgattttttaactcatctcccttcttatataactccatttcaatctctggaacttttgcaacttgaccaccatctaatgtcaacatccaatatattgactttctaactttcttaagtattttttccttatctgttttttcaaagttatagttttcaagtgcataaattaatgcatatgatgtccatgccgtcaactcaactccataagtatattcttggaactgtccatactcttccaaacttataatctttcttttacaataaccttcttctacatattgttgaacaatccatttgcatgccttttttaccttatcctctatgtgaataaatggctcgatatcagttttcccaacataaaaaccacattctatgagggctataacgcacaatgctgtagcacgcaaatcatctataccttctttatatgttccccatgcaccactatctctttgttcttctaaaattcgtcttactatatcaatatatccaggagctgctattggttggccagcacaagtcatagcaagtaaaacaaatgctttttcaaacaccctatcttgctgttcaaaatgattattacctatttcagtatttattgctgtcaacaattcaacagttaaataatgcgttttggaatatattccggaagatgttattgcccaaagcatctcacaagctgtgaacatagaaaaatccggactgtctcccttatgatatgtatccctagctttaatccctaaacaaacattattacgaggacatacagtttcaataatatacatggatctttcaatactactttctattttgctaataatatccttttccattatgtccccttcctattctgtcaagcctaaatctattgattttactggctttgacgatttttattttacctcaaacaaaagccgagagtgatggatatcgtagtatcatgtaccgaatagcggataaataagtatagctaataaagcatccttttagttcgctttataaaggctattttccctctgatcaactatgatgatgaaccttccgtgtctaaggggatcatgtcccaacttccttcgtcccatctaccatacactgagtgccggccaagctcctaaacggggtcatgccccacggaaaaaaccgatgccagctacagctcttgtttttatgtttgattgttactgacctgcattcacctgtcgtggtactgatttactcagtggacgctataccatttcaagttcttgttggtcttttgcagatgctgtccgttccagactccatcatttacgggtttctgttccagaaccctgtccagtctccgatgcattccatcagccactcgacagagttctggatttgcttcttttatttactatgctgccattggtgcctgtgaagctgccggatgtttgatatctttcaacagtttctgcggatcataagttgtccctgtcttcaggattgtgtaaatcaccctcagtatcttgcaggctatcacaaccagtgactgcatctttttcagtggattattgcttcgggttgtgtaatactcatgcagctgtttaaattcatccgcatgcgacactgctgactttgccgcctgaaacagccagtaacgcagtctcttgcgtcctctgtggctgatctttgtctgtcctttatgcttgccagaactgcatgccaccagacccattccacttaacttctggatttcctttacatcatcaaacctgctgatgtctcccatttccgccagtattcctgccagaatattttctcctacaccattgattgcaaggatgttctcagcataaggtatttccctgcatttttcatgcagagcactttcaatctctgcgagctgttcatccagtctcaggatctgttctgcataccatttcacggcttcacgccctgcatccgttccatccgttaatccaacacttttctctgcatagctcacgatttcattggctctgttgtaaccgcgccctcttagttttgcattatgccagatatttttcatgccttctgctcccagtgctgtgatatccgttgggatagctgatactttcagtacttccagagtaaatgctccatctatttttccaaatgcgtccatgtattctggaaaatagattttcaattcccggtgaagacgattgatatttcttatcctgtcttcggtaagctgatccctgaacatggagagtcttctcatgtctgcgtaaactttttctggaagataaggcattccgtagtttccatctttcacaagatttgcaatcagtttcgggtcttttctgtcgtccttgagttggctgttatcttcaatctctttgctctgctttacggcatatggatttacctggacaacgctgattccgtttgaaatcatccatgtagccaacgcaaaccagtagtgacctgtcggttcaagacccagcactatctgtttcttatcgttttttgctgcaagtgccagcacccattccttggcattcgcaaagccttctgaagtattgctgaactcgaatgctccacggcttaactcccttcctctgacatcaatcgccctgatataatgagtctcactgcctatatcgcatcctactataagcatgtcatcggtaatgaaggagagtttatcattcttggcaaacttaccgtttgtttccaagtctcgccatgtataggctctcagttcttttttaatcacctctattttcttgttcagttcttcttttgacaaaagattaattgcctgattttctacatttacttgtttttttgttcttcttgctttaacattcatcttgaatacctcttgtttttttagattttactaactggccggtcagtaataatctaaatttacttgaggtattctttttggtcaattccctttactctttaaagtatacaggaagcttattctatatcattctctctaacaattcttctgcacctctaactgacagcatcttttttgcacacatatgaccttctctacagcattcttcataattgcttccatacaatataccttttatgaagcctactgaaaaagcatcacctgcaccacctggatgtacaattttcaccttattatctactggtactgtaatttttccatcatgatctttaataagcacaccatctttccccattgttacaactaaaatagtatttcctatatcaagttcatcacaacaattatcaactatgccttgattaccatcccattgtttttcaaacactttgagtaattcgcctctattcataaaaatataatccgaatctactttcaatttattcttttcaaaataaggactggttaacccactagccaaaataatacttttggtttttttaattgatgtatttttttcaaaaattgattttatctgtttaaatggtatgcaacaaaaaaaagttgcatcaaattccgaaaaatctatttttaataaatcttctgctaaaacttcattaggagtatatgagtagcacttgcgttccaactctgcattgtaaatggttagtaaaatgtttgcttctttatcattgatatcaatcaatctagtattaactccaacttttgataatttcattaacatatcattgatactatgttcttcttttacttttgaatacaaaaatggctctaaatttaaaaaagcggctattgctgatacaacaatagctgctccactaatacgagatgttacatcattagcaacaacttcactatccttttcacaaaactcatctactaaaaatgattttgactcaaatatattaccaattgctaatattctcatattataccttcttcctatgtttaatcaacttcattagcaaatatttttgcatatctatctaaaccttcccaaactgtaactgcatataacccctctattcctttcaaatgtctaataatatatacagctatattttcaactgttgctcgccccattccctctatatcattcaaatattttttatctattgtatccagtaccgcatttactttatctattgcatcgtgaaaatcaatccctgacaccatgtcattctcaacagttcccgcaaaggtaacatttaccttaaaactatgtccatgtatttttcgaccatgtgcactatcaataactctctcaactgctaactctgccatatcttgacctcctcatcttaacactaaattccttcttaatttataattgcttatattaatattatatcactttgagtactgaagtcaatctcctatcaatttagttctctacattgatttttcattactattcgttgaaatccaaatgtatctgaattcttatatctcgctcacctttgccagcaaatataaatggtaaagtccatgatatactcaaagactttaccatttatgtttaccccaacaaatattcaaataccgccgccatcgcagcatttttcatttgccttgctttcttttctcccacataatatgctttcattaaatcactttccgtgcttcttaataaatctcctatgttctctatttttaatgagtgtaatttctctacctgccaaggtgtcaatgctaaaatatttatacttttctccaattgcaattttaataattcacccatattaggttccgtaaaatcaggaacttctttcaataatttctgataccatttactgttagctccaaattcagtcatcttccccaaagacaaattattaacaatatccaatacaatgtctccttaaagtaaaaaagaggagcccccgcaggttctcccccggtcgcaggcctcacaggtttctgcaacgcgatcactgtattcagtttacttgactttaaagtttatgtcaagcaatttctacagctactatagtatatgctatttttttaatttaattccttacaagaaaaatattattcgtaaaatggccgtgcctatatctttacagcacatcttcatcatggtattaattcaattctattaatgcttcactctattggattggattgccttgcctttagtacctaaatacctctttggcgttttcacaaaatatatccatcatatctgactttacaatatccgatatttttaatgctgctctattaagttctttttctatttcttcaatatgttgaactttgaatgtaaatggtgcatctgtttccaacaacatgcgttcaacaggcacagtatttattatctccaatcctgattttgtttttaacatacttggattaatcgaaaaatagcatcctaattctattgctttctctagctgtggtattgtaccggtaaaccagtggaagatatatttattacttctttgtgttctgtattctctcagaatttcaataactgtatttgccgacttaagagaatgaacagaaaccactttttctccacactgttcacataacttgacaatatcacgaaatacatgcacctgcacttcttttgtctgaatatattctttgctaaaatccaagcctacttcgccaatatagtgacttttttcaaataatgccttaaacaagctcatatcatcatagccgctagaaattaattggggatgcatccctaatccaactttaatacgaggattacttctgcaaaactgtacttctctatcatatgccttgggggtagtaccaactgcaaatagactcatatcagaattttgcatctcttttataaatcctgccatgttgtccattaaatccaaatggcaatgtgcatcataaatcattattactaccctcttcagctaaattattctgtataaaattatctacttccaataaacctctcacatatatatcagccaattcctgcaaatattcatcatcttgcggtaatggtcctggcttatgtatatagaataaagcacgattactatcctgttttattttatcaattgcatactggaaagaacgcaattggattcccattccttctgaatttttactttgcatttcatgaatagatgtctcggtatatacagtaccatcactaccaaaagctttatacatcgctgctcttctaattaaacaaggaacacaatacccacaatgttgcggactaagttttttccatcttgcttttcctggtgatgaacatgaaaacgataacttcatagtctcatatagcacatctttgttcttacattctgaagccatttctcccttggtcttattccaatagggatttttcactgatatatttaaccttaatccccgcagtaactcattccataaagaaaggtaaaacggatgcgttgttcttgtactaaatgaacctactctggtttcatccaatggtacatttaatgcaatcaaaccattttccggaaccagcaattcgctaatattatccataccagacattgcaaaaatcgcataaccaataaaaagaaacgatctacttcttgtattattatcattaccaccttccggaatgtaattattgggaaataccatccacaagtcgagccaagtatgtaatacatctggatatagcagttcaaatttatccactatatttttttgcgcattttttgtaagtccttcacctgcatgacttatcagcaaggtatttttcttgtcttccattaaattaatagtacttataagactatccattcctcctgagaacaatgatacttcatcatatttatttgatttttctcctatttcgtcaggtttactaaactgccacattctacttgacaatgtgattttccataaatcgcctgtaagaaatttaagcatacgttcaaccgtataaatctgtgtttcccacaattctacatttgataccggtatttctaattcaatttctctcgaccaagagtcttgtccatgtaccactctctcaatacgtgtatctgccaaataaaccattgttgccagagacataatatcaaatccaatttccgtgggatatacattttctttatatagtttctccttaacatggtttaatccatagtttagttcacccgcagaaagcataggaacatcaacaacaactgtaccattctctctccttgactctatattctgaatttcataatttgctcttaacctatatcgattcattcattttcacctgcacttaccataatatcaaatgcttccttatacacttgattaactattcttagcgaatctccctgtcgaatattccctgtctgtatgttcagatttgctactgcatcagatacagaacctttaacaaagtctttcatttgaactattatactgtccgatgtggccctatcctgtggcaacaaaataatcttatttccaatatcattcgtaattctactaaatatagcatttgccatagtgcgttccacaattaccataatctgttcagaggtcaaatcctcaaatttaattgtagctatctctggtgattcttctattgcagaaatatatgctgaccgcgcaatgccttcatcttgtggtcctccatccggacaaacaaaatcagtaatagcaataaatgcatcacttgcagtcttatgggaaaggttttcaatagaaagatattgctcgacagctcttgctccgcctgaagcaaatgcacccgcaatatttaacaatctcgctgtactgcttctggctgctcccattctttgcgtcgcatttgaactaccacctaaagaatttcttatgtaattagaaacacttttccgccctaaactgctatcccgtccaccagaatttatatatcttgtaaattcaccacgtggtgctgtaaaacgttccgcatcacctgtcggtggaatttgattaccattgacaccttgaagcgtttcattttgcatattttcatcagggtcctgtaaccatgatggtactagcggtgttcctcctttttgtcctccattatgtgttgatgttcccattatcaatcacctcacatcttttttaaagcagccttaacaactgatgtaccgccacttttaagtttgtcaaaatattgatttaaagtctttctttcttcacagtccttcggaatagctttatcccatccatgtataatccacacaccaacattagaaacaggaatagcatctataaaatttaccaaacttttccgaagatcaggtttattctgtaccaatataattaaaccatctgtccccttcggtttcgtatcaaattgacctctttccatgattttttgaacaacaacatcaaacacttggtcagattcttgacttgtcaagttttgcaaatcctcaatatgtccaacaatcgtcatttcatctctaaaaagcaaatcaacaacttctgataaatcactttgagaagatttacctgaaaagtaatcaatcttttctttgcaagcataataatatggtctcaagtctttgtcagtaatttccggttccgtaataagccattccccaatcttatttaaatcataccaacgctcttttgcttccactgcttccttgtcttcgaccattttttgaatatcagaaagtatttccggtatttctccccattttccttctgaatccaaatgattaggtaattctttataaaaatctgtttcataatattctgccagcatcatctttgctaaaattgcaagttccagttcatctccaaacccacgattcttcgcaatttcataacgtaacagcagcatatttacaaaccgttttatcttccttggatttccatctgtattctgtgctagcaaatggcatatttgtgtcgcaatcaatacttcatttgcagccttctcataatcagttccaagaagcccttttacatcgtcaactgtgagactttctacattccacggcttccttattcttgataatccttcttctctcagctttttataattgggattttcatcagcaaaaaccgaacctaccataagcaacattatgtatatacaagcctctacctcacctaacgcaggaattctaaatggaatctgaatcaatttttctaaatatctatttgcaaaagcgtctcctgtattaaatttgttttcgtcaattgcatctggaaaatgctttttgactgcataacgtatcatactttcatctgctgcaattacaaacgctgttttttctgtaaacataaacaatcttactgcttctaatgtattgattgccacatccggtaaacatctatccaaatcatcaattaatacaataagtttttcaatagatgcatcctctaacaattcattaaaattatcctgaaattcagaaaattgtttattacttgatgtatcttccgtaatgttggcatcctttaaatagccaccaatagactcaattgctccagcaattccttctttagtggttaccgttgctttcaaaatatccatcgttgaagatagtaatgtaagaggtgctgtacccgtagcaagtcccaatgctgtttttccggcagtcttggctacgctcatccaatttatatttctccacagtttttttaatatttctccagccttcgcaccaagtttttcttttttttcaagctctgaaataatagaactcattaaagcaactttggagtcttcaaatccttgatgcttccaaccattaaatcgaatacatgcatactttttacctgactccgtggcagacgtctttacttcattttctaccatttcaagaatactagatttgcctgctccccagtccccatgaataccgatagaaattggttgctctttactgtctttaataagagaaactattgtctttgctatcgcctcattattaagtaaatcgactttggtttcattatcagataaaatcatctttctagctcctccattaattttttcttgctttccttaaacaatcattgagaatttacttcatttaataccccttctatttcagcacaaattctcttatatggtaatggctcattattatatgcctcccatggaatataaatatatatattatctttcccagaaagcatttgggacttaatatcttttctctctaaataatcctcatcatttctaccataaacttctataactatttttttatttgtcccttcaaattcgataataccatcttccaaatatttgtccccataggcaccatatccatattcaaaaggcttataaaagaacacacctttttccttgtatctattttggttcattatttcacaaatggcattatacatctgcacttcataattactctcagaaaacaacccataatcgtttactaaaagaaatcttaagctatacattgcatacttatctcgaaatccagctaaaataatattcctatttgataggtcatcggtcgcataagtattttcgtactcctcaagcgctctaatcaattcttgtgtataaaccggaactgttaacgccttaccatctttctcttcttttattactaaacgtgtaatcctatcatctgctttatatgtaggtatctctgctaattctttatatacaaattccagaccatcttttagacggtctaaatcagcaatactctttttcttagttcctatccttgtcctcttttccgcccaaaacattttcttaatcattacattcgttttaggatacactgtctcattatttcctttgtaaaatgcaacatgcttaaatgtaagcatattcatcttttttatcatagcagaaatcgtaatttctccttgctgatgctgaggatatcttctgtctcccccatcatgatttcgtggaacattttcatttggtccattttcattcgcttcatcatcgttttgctcccgatgcattagtggttctgacaaatgcacccggacctcccctgtctcatcatcaatcaaaaatccagcattataatcgcgtttatctaagtatactttcgatttcgggcaccaatcctcgtgttctgcttgttttccttgactacatggatatattgcccaatttccattacgcactttatattcacaagccccattacaattgcaaaaaagtttcagtttttcatctttgcatttatcaaataatgatttcttttcatgcttctccatttcgcttgggcataatacttcatttttactagtttttattctaaactgtgccatttgtctttcctcttaatcaacaataatttcacaagtccttctctttcaacattatacaacaaattatatataactccaatccaaatctcttattattaatttatgccaacaataaaacgcccgaacccatcgggcattttattcttaccataaatacaggcaggaattccgtttccctattcagttgtcatccctgcctgtcatttactcatatctgatttcctgctccatgacgattcccgactggaactggataatcagcttctcggcagagactaccttgatgcttgctatcagtcttctcacaaggtcattatcaaattctggtatctggcaggtctgcttctctaggaaactgtccatatccttcaaccgctgttcataactgtcagccagctttttcttccgtctggcctctatctgctcctcttttaaggtgttgatttcttctgcaatcctgcggtatctctcatcgaattcatcggtgtaagagcctacccttgcattctccgcaatcagagccaccatctcttcttccttttctttgattttttcatcgtattcatccggttcctgctctccgttgtagcttccgattacctggatgacgttctggcggaaggctcctacaaaatccccatctcctctggtaattctgtttatggcctccatgactgctctgttcaatactccctcttccagtgtctcggattttttacagtgcttggttccgtttgtcagtcggttgctacaccgccacacaatcttctttttgccatttctggaccatgtgactcttctgtactcctgcccacagtctccacagagtagtaaaccggtgagggcatattctgaggaaaatttacttttctggttcttcttgcgcgtgaccgctgatttattcatggatgcacgtctcgccagttcttcctgcacccggtaaaataattccttcggtatgattggctcatggtcatcttccacataatactgtggcacaattcccttgttgatgacctttttcttggtcatgaaatctacggtgtaggtcttctgtagcagggcatctcccatgtacttttcattgcggagcattttaaagattaccgagtcataccacttatcctgcccggttgctgtttttatgccattctcctctaggtactggcttatctttttggcgctgtatccttccagatatagcctgaaaatcaacctcacgatttctgcctcttcctgtacaatgaccagatcgccattttcgtttttcgtgtaacccatgaatttgttatggttgactatcatcttgccattttcaaaccttcggaccacaccccatctggtgttctcactgatgttacggctttcttcctgtgccagactgcttaagatggtaatcagaatttctccagttccgtccaaggtgttgacaccctctttctcgaaaaccaccgccacattcttctctttcagttttcggatggtcagcagggagtctaccgtgtttcttgcaaatcggctgaccgactttgtcagtatcatgtcgatttttccgtccagtgcatcttttatcatggcattgaaatcgtcacgttttttagtgttggttgcactttttccgtcatcggcataaatcccggccatcttccagttgtctgtttcctgtatttttcgggtataatattccacctgtgcctcgtagctgctctcctgctcctcaagctctgtactgactcggcagtaggccgccacacgcagtttcttttctgacagcttgatactcctgtcatactgcggtttcgcaggtatcatggatactttcttctttatcgctgtctgtggcatatctgctcctttccggctcctataaatcccggtagcctatctttatactgttattgttaggaaaaatcactcttatggaatcgtccttgtacactactatctgctttatcagcttccggtacagtttctcatcaaattccccgatttcttctttcccggcaagtgcttccctcatttcctctgccatgatatcctcatccctgacctccagcgttttgtaccgctcagaagcctgcttaaataaaagtgccatcatctcatcggctcctatatcttcagcatctgctattctacttgtaattctgcggtattcgggactgacctgctgttccttcttttcatatttctctgtcagtccgggattttgtatcagcttatttatggctatggtacatacctcttctacctgcctgtccgatataaaaccgccaccacaggataccctgttctggtacacataatttttacatttccacttgggtattccattcactctcttactgtgtggctgaatatggctgtaggggcatccgcactctgcacatagcagcactccgctgaatatgagcctttcccttttgttcggtctgtgttttccacggctccccgtggtccgtacctgctcccttcttttctgtactctttcaaacagttccttatctatgatctgctcataatcctcggtaccaaggtagttgtaattctccagtatcctgcctatggaggtgtgggaccagcctaccctgtcatgggcattttttatgcctctatcttttaaatcctttgctatccgaagggcagagattccgctgtcgtaatctctgaaaatctgctctacgattttacggtgttcctcataaaccactatttttccattcagaaccttatacccgattggtgtatgccactgcatcttcactgcccccttccttttccgtcagcaccagaccgttctttaagcagaaactgatttcatggtccagggatatacgaatctcctttactgccatatcaaacaactcttcctgaaactccttctggtatccttcctgctttaaaagtccgataagctgctccgtcctcacaatctctttggtccgcttatactttcttgcaaggagcgttttcctccgcctgcattccgtcagcctgtgagccagcagattatttttctccataaaaagagcagagtccatatatcccttcttcattacttgattcaggatttggctctgctcgcttaaggagtgtatctcattatccagttgttcgatttcttcggtatccggcttacttgctgccagctccgttaaggctttcagtaaaggttccagcacggttccctgattggtgtacagcttattccacatatctacaaatgcctgctgcaatacatcctctctgattgctttcatatggcaggactccttatcctccacatgcttatggcaggtccagatgattttctcatatggttttcctatgtatattttctgcctgcggaaatgacttccacaatccccacaaataattttgcttgagaaaatatacctgttctggcatctttccccattcatattcagcgtcctgctccggtattccatgatgctccgtactgcctccgcttcctcatgggttataatctgcggatgggcatccttggtcagatacatattcatctgtccgtagtttacctttctggtaaatgggaattgtttttcagtataagttctctggtgcagggcatctccctcatacaccggattcattaaaatatttttgactacgctgtcctgccatttttcgctaccacggatagtaggtatcttatggtcattcagcattttggcaatcacataggctcccattccgtttaggtaggcttcaaaaatccaccttaccacctctgcctcagtttcctctatgataaggtttccatcctcatccttccggtatccgtatgccggggttcctacgataaaggtcccgttctcaaaacggttaatgattgcccatcggttattgcccgaaaaatcttccgactcgccctgtgccacggatgccagtatggtaagcattaattcacttgcctcagtcagtgtgttaataccctctttttcaaagtaaatccctacaccgattgctttcagttttcttatggtctggatgcattccaccgtatttctggcaaatctcgttatggacttggtcaggatcaggtcgatatctccctcttcacaggcggctaccatggccttgaaatcatccctgccctttaccttggttccggtgattccctcatctgcatacacgcctgcaaactcccagagcggattattctctattttttccgtgtaatactccacctgtgtggcataagattctgcctgcgcccttgagccggtactgactctggcataggcacacacttttaacctctgctgtggctgtgtatgtatgctttcggaaatcgcatttatgaccgttacttttttagccatttgggttctcctttccttcattttcaaggaattgctcccttgttagcaacatacactaccacacttttttcattatatctagcgttattacagatatacttttgcaagttcgggagaaaaagtctcaatgttcaaaacagcgatttttcccctttcttcctcgcttataagaccgctttcatgcatccttttaagtagcaattctgccagcttatatctgacttcattggattccttcttcataaactgctcctaatccaactcatataaactgacggtttttaccgccatgcaggtagccactaccagaatcacgcctgtcgcacatactataataatgattactctcattgcttttcctccaaattttagacaaagtaaattcatcccccaaagaaacacacttacatcatctgacattctgccatcgtgactgcttggtcctctgcagcaaaatacatatccgattcttctttggttaccatcaaaatttccccggtttccttctctcccatctgtatcggtgcaagatagggaataatctctgcacacagcttctgatccgggcaggtattgataaagccaccataggtatccaaaatcaaacggtcaaccatatcggtaattatcatcttctctgcatcataaaaatgactgccaaggaaattcgccatattctctggtgtagtggaaataaaaaactcctgtcggtttcctccgtcacttggataaaaataggcatatccaaccctttctgtatccagtatcttttctaccatgctcctttctttctctgccacttgtgttcctcctaactgctcgatgctgtttactctcatataacctacaaccttcatatctttctccgcttcacacttcgttaatttctgtgctactaaaacacacaagaatgcggcagaagccttctgtacctctgccgcatggattctgtgatttagtctcactgccataatccttcacttcttataagtgacttgctcctattcgacactacttcccggagccggaacgctgcaaagacagagaagcatgaaaagaatttctagcattccaaagtacggaacgcaagtaattctatgtttcatgccgaagaacactgtgccagtgttcttccatctaggggttttccttgggcagtcaatccagactgtctgcggttcttgccacaaaaggcatacagacatcacaggaatctcacctccaccactgcgtgctggctaatctcaaggtgtatcattataggccattcccctcttcgcgcctgtccaccacagacaggctgtaccccggctttcccgctcggctccttagatgcgatctttttcacagcatggctggcagaaagaacatctgcccgattgctgcaggagtgtcactgcgccccggttacggc

SEQ ID NO: 11380 - DNA, 11241 bp, Unknown
  gut microbiota DNA sequence
cagcgaattcatccctgcctggcttatcaagatcattgctgcatttgcatttctttattttgccgcatcaacacttgcgggcgatgatgacgaggaagaggagggcagcggcagatccaggatccggttcgcaccgcttgcggtgttctttacctttttcgtagccgagcttggagacaagacacagcttaccgccatcacctttggtgccaatgaaggtatgagttccgcactgatcgtatggctcggctgttctctgggactgtttttagcagacattctgggaatgcttttaggctatctgttaaagagcaagacaccggaagggctgctcaatactctagccttcgccatcttctctgtattcggcgtcttcacactgtatcaggggcttaaactcatcaatacagatatcagtgtaatcccggtactgccgatactgatcgttgcaacgattgtttttgccggtatctgtgtgtacctgttcttaaaaaaagagaaaaaaacatggggagcaaactaaaaacggctccccattctatgcttattccccagtatttcccgccttgctgtgcttgtgtctcttgcgcacttctctggcgtgatctctgcgggcggcgatagcttctgcctcttccttagggatcagctttgtggtcttgacaatatatacaccgccgtcatatgccttgcgtacccggatcttgcccttgagatagccgtgcttctcgcaataagccacgcagtaataatgcctgccattagcgctgaaccatttgatcttcttgcgcaggttacgatggcagagataacatttactggacaccacttccttatctgcgaaggcttctgtcttgtccttgaattccctggaaatatattttacataggtatcaaactgcgctttgacttcatccctgcggtccttcggaggacagaaggtatcgtaggacaggttcaccactacctccgggtgctcctccaggatccggatcaggatctttgccgtatagtaggcatcactgaacgcccggtggaagggaatatccttctcaatatgcagaaaatcgatggcatattccagatttctgcggatcttgcgctcctcataggcaatggcgaacagcttctgcacatccagataaggcagcggtcccggtgccagaagcggcatctcataatatgccatattccgctgtaactccgtaaggtctaacgtcccccaggtacagaacagttgctcctcctgtccgcaccatctgacaaaatctcctccaacctcagggaacggtctcccacgctccagctcctgcatctgaatatggatcagtttgctggtgatcttgtgcatctcatggtagacctgtggcttgatcagttcattgaattcgctgaccataacacgttcattattcagtttgatggcaccgatctctatgatttcaaaagggagcttctccacagcgtcctctttgccggtgttactctgattccattccagatccagaacgatatattccatacgttcctccatattttgatgtcggggtcaaaagcccctgactttgatgcctgcggattgctccgtgctacagtcttggcagtgcaatatccaatacctcttcatgccagcagtggtctccctctctgacatcgtggatcggatattcctcttttccgtacaggctataagccttccgtacaatatctagctgctccgtcacattcaccaatcctctgggaccgttcagatggtcatcccggcaggactggaccgccagcggtctcggcgcaatgagcgatgcaatatctcccatatcaaagtgttcccacagatggggaacataattacagctgcaattaccgttgagtaataacaacgcgtcacgatatccatagagatatccgctgatgatacacttttttacacggtcatccagagcagagatccacagcgtctgcatcccaccgccggaaaatcccatgactcccaagtcctcagtatcccattcgccacgttcatatacataatcgatcagccgggaagcgtcccaggtgcacatacctgccacggtctctcccaaaggctccgccatatgtgccagatgaaaacaggtactggtcaggaaggatttctcatcggttcctttctgcaatgcctcatccctgcgttctccgaagcctctgcaatccggacagattgccacataaccacgcttcgccagctgcatgccgtaatcataatggtagaattcgatcatccgttttaccgcgggaatatcatcacgacctgccacgctgaatttgcctgcaccctgatgtcccggaagggcaagaaaacatttctgcttcccttcgttctgcttcggcgggatcaggatatacataggcatatatacttccggctctacctgaatgatcactttttcccgacgaatgccgttctccagctccacgacttcttccacgcgtgggtccagatcacaggactccatgtatttccaccccaggaggtcttttaatgtctctctggaagtctccttccaggcttcccattcctctctggtggatcctgtgaacgcatcctgccttgcatatttatcaaatttgttctgcattcccttcagacttccgtagaaatgagggatctgaatgatcgtatctgcctgttccatgactgctccttgcgttttcattttcgtttattactattcttaccattctctgccctgtgcgtgcagtccgtcttccacatctcctgcaaaaaggctctccagccaggtatgcgccagccgaatccatgaggtgcattcctcctgtaccgctctgccatcattggtctctgtcagcttatttgccagtgccagcccgtgcgctcccttttcatatatatggaattctgtgggcactccggctctgcgaagagcactgacgaataacagggaattttccaccggtactgactgatccgcaaaggtatgccagatgaaggtcttaggcactttacccgtaacctgtttttccagggacagcttctctcccagctcttgctgtctgctgcctaacagattctcaaaagatcctctgtgggcaaactctccagaagtgatgaccggatagcataacaatagtccgtccggacgcagcagctcatgctcggaagcggaaagtccctgactctctgccagaaaatcttcatcccagaacaccccaaggctggctgccaggtgtcctcccgcagagcagccttccactacgatcttatggggatcaatgtgccactctttcgcgtgctcccgcaggaatttgatgctgtaagccagttcctttaaggaagtgggatattccgccggagcgcaggaatatcgcagcaccgccgcatgatatcccatcgacaggaatttcagtgccatgggctccgcctctctgtcggaggttctgctatagccgcctcccggacacagcaggatcagcggtctgtcgtgaatcgccagggcatccgaatcctcctgaatataggtaactaaatgtgctcccggcagggaaccctcctgatgcagttcgaatgtatgatagatcatctttttcctcatttctgagcattatcattgaaaaataaggcgcagaccatgtagcaatactaccggcctgcgtcttcctctgccttattaatattatcataactatccagaatcgcattcactctgaatagttatatatatcttagtatgctcttccccagtataccatctttttcgcaggttttccacaacatacgcaggtatctgcgatctgttcctgttcaaagggcatgcagcggctggtaacagcaagcttttccttgatctgatcttcacattcccggcatccgcaccacatagccttgacaaatccggacttctcattgaagatctgctcgaactcttccatattgtgtgctacataggtatggctgtcacgatgtgctctagctctctccagcatttccttctgcatggtctccaggatctcagctgccttggtctccagatcctccagcgccacctcggtcttctccctggtatcgcgacggcagatcacgcacttgcctgcctcgatatccttggggccgatctccacacggataggataacctctcatctcagcctctgcgaacttgaagccgggggtcttgtcgctgtcatctaccttgacacggaaatccttcgccaggcggtctctcagctcataagccttgtcaagaacgccctcctttttctgcataacgggcacaatgcagatctggatgggtgccacacggggagggatcaccagaccttcgttatcaccgtgtaccatgatcagtgcaccgatcagacgggtggtcataccccaggaggtctgatgtacatattttaaagtattgtccttgtctgcgaactggatgccgaaagccttggcgaagccgtcaccgaagttatggctggtaccggactgcagtgccttgccgtcatgcatcagtgcttctaccgtataggttgcaattgcacctgcgaatttctccttctcggtcttctgtcccttgatcgcggggatagccagaacctcctccaggaacttcgcatatacattcagcatctgcagtgttctctcctgagattcttctgcggtagcatgtgcggtatgtccttcctgccacaggaactctctggaacgcaggaaaggtctggtctccttctcccaacgtaccacggaacaccactgattatataccttaggcaggtctctgtaagaatggatgtcattcttatagaaatcacagaacagggtctcggaagtaggtctgacgcaaagtctctcgggaagttcgttcaatcctccctgagtaacccatgctacttcgggtgcgaaaccttctacatgatccttctccttgtctaacagggactcaggaatgaacatgggaagatatacattctgtactccgactgctttgaaacgtgcatccagctccttctggatcagttcccagattgcatagcctgcgggcttgatcaccatacatcccttgacactggtgtaatcacacagctctgccttcttcactacatcggtataccaccgggcgaaatcttcttccatggaagtgatcgcttctaccattttcttgtctgccattttctctctccttttctttttctgaaaataaactgctcatacgatctacggaaacgaaaaacgccgggtcatcgctcccgaaaaagggaccgatcactcggcggtaccaccctgattgatacaaatacgtatcctgctctgtcaccgttaacgccggttctacgctgtgcttcgccgcttccaggtacattgcgtctcgcacaggactccaagggaggtttccgatcctctgtcataaggggttcccagccacacgtcaccgtgtccttcccctctctctgggatgctttccgatcgtactgatccttttcatcgtcattgtcgtatgcaagtaattgtagtgcatgcttccgggatttgtcaaggttctttccctattccagtcctaatttttcccggatgctgtccgctgcaatattccagtcgcccatttcttcgtatgccgcatccattttttctttttctctggcagcacgttcggtatcgccggtctgaagaaatgccttatacatggacgccgcctcaaaatatcttgccacaccatagcattcctttttcgttccggacagcaagccgccgtacaccatgtcctcgtgataatttactaacaggtaggcataattttcattttgcacattattctccatccagttggtcttcgcaggacgggaaaaggcgtcgtttaattgccggaacatatgaatggttccccaaaacaataccagacacagggctatgatcaccagattcatcacaagcagcgcgcctctctgcttctgtacctgtttcagcttactcttcagatttaccataacccatcacctcacctttttcttccaaaaataagattttttgtgcatttgacatcgtaccaaaattctctgcctcttccggtgtcatgtcaaaataggtctgcagcagtgccttcacattctcttccatccggagaatggcttccttctgctcctccggcagttcccgatattgttttgccctataatcattatctacaggatgcagaatcctttccagctgctcgtaataatccgaaatatcttcatacaggccgggaagtatggatacattgccggagttgatagtaactgccttcatcagactttcataaaagtaacgatacgctccgctggcttccatgagcagctgatatttttcataactattattactgctataaggccggatgtaatgcctgtcgcaaaaagctgataagcctatgtaatcctcatcttccagatattgttccatctgtttcatatagctgccctgccggatccctgcatcaaactgcagcaagcctctgtggatgctccagctacgggcagatactacaaacaccaccacacacaggatcaccagcactgtgatgattatcatatgtgacatgatctccgtatttttctccgtcacttcatagacatcgcttttggtatcctcaaagttgctcttgtaatgctccatgtccttgacatgctgtgcggcttcttcattcggtcttccgcaatgcggacaatatgcctgctccagtgtcaggttacccccacaatatttacatttcatcattgcttttatgatcctttcctattcgttatgcttcgtaatgtattctttgcaatcctcatatctgggataaccgtaattatttcgcagactatcctcgaattttttctcttcttccgcagtaaacgtatagcggtctgccagactgttcagggtttcttccacatagggacggatatactctttgtcttcctccgacattcctctactgtattccagtccccgcaggatccagtaatcatctaaaagctgtgtctcctgataatcgcgaagtgtctctccactctgttccagcgccagatattctctcgcatttcggcagctcatgagcctcgtgaaaataccgctatgctcccatctgccgatcgttctgtcctctatgacagcctgttcataaaattctgtcagtccttcgaagtcctgctcccggtataaccggtccagaaccggaaagttttctttttcccacagataatccgctctggcatccctgggttctatatactgtgcccggaacacaattaccgcaagaatcgctgccaacgctgccaataggatcagaagcttaatcacaaatttctgtttctttttcagttttttcttcagttccttctccggtacctgctctaactgctgcatatcctgccgcatgctttccagcttccccagatattccgcttcggcgcccttgtaattcaagcttccgcaatagggacactttggaagggtatcctcgaattccgctccgcaggaactacaaatgatcttttttacttccgtatctgccatgataggattctctccttgatccgggctgattgccctactactcatgttctttatttctcgcaacatgtaaatttattttatcatacaacactaaaaagcatcttgcaatccaggaaacacttttttacataccttgaggtttttgtcgctttcctgtaaaatagactcagttggaggactttcctgcagttcatcttctgcaggctgctgaaaggaatgtattttgatatgtacgagaacagttttctgaatccggcctatatcacgccggaagaacaacagatcttagacggcgacattgccgttcagaagaatctttacaccagcaaacaggattttgtggtggagagcaataaatttttagagcattccgaggatgatattacgctgcggcgccataccagatttgtggattttccaaagcataagcatgactatgtggagattttctattgtctctccggttccgtcactcatgtcataaatgaggaagagatccgcctccgccccggagaactgttattcatgaaccagcatatcgaacacgccgttatagcgtgtgggcaggaagatctgggtattaatatcatcatccgcccggcgtattttcagaatatcctcacattgatcaataagaacaatattctggcggattttattatcaacgctttagaaggtgacagctgtgtcggacagtatctgtacttcacggtctccgacaatccctgtatccagaatctgatccataatgccgtatttctattattgcagcagcctcagaactggcataagctctcggagcatactttcgctcttctgttcatgcacatcttaagcaatgcggaaaatattttattagaccaaaaggacgagcagagcaatgtcctgatggtggtagtacgcagatacctggcggagcattacgacaccggaacgcttcacgagctggcggcacagatcgggtatactccatcctccctgagccgtatgatcaaaaaatattccggcaccaccttcaaagaaatacagacaaagcagcgcatgcgggtcgctatgaatcagctgtcccacacggcgctgccggtgtctgagatcgccctgtccgtgggctatgaaaatcagaactttttctacaaacagttcaaaaaaatgtatgacatgacgcctaacgaagcgcgtttaaagtctcgccaatagcatcaagtgttttatatatgtaacgattcgagaatcctttgtgtatctcttggatcgttatttttcgtataaaaattcctcgggaagggtcacgccgaagtcctttgccagatgacggaaatcatcgggagtaatggtctgtctcttgtcagactgcatggacagcatcttcaccaggatctctgcagatttttctacggtatgcatcagaccgaaagtcaggtcgaaatcttttcctgctgcgaaggttccgtgatgtgcccagatcgccagatcgtatttcttcatcagctcggaggtagccacagcgatctctctgcctcccggcaccatccagggcactacgcccacgccatccgggaatactacgggacactcggttgccatctcccacagttctctggtgaacaccttatcctccagaggcaggacgaaggtcagtgcgatgatattagtggtatgtgcatgatataccacacgatagtccggatcctgtaacttcttcacttccagattcatcaggtggctgggaagctcagaggtaggtctgccgccgtttaccagtccccatacgatacggtaattctcacccttgtcatccagttcgatcatgcagatggaatcttccggcttgatgctgacattgcggaaatatttaccgctgccggtcaccaggaaatactctcctgccagtgcgggtacggtggtgccgatgggctggaactccttcggctcgaagttctcctttaccagtgctacctcttccggcttcacacggtaggacaggttgccgccgttacgctcatgccagccctgctgccatccatcatctgccattctgataaatccctgtacaaattctgcatctaaaaatttcatgataatacctaacctttccattgcctgtgaactcccgcccacaggcataattttttcaaattgtagctattcagcaccccattcgcaaaatcgttttttcatagctcgctttttgctcctgtgatgactgcgccatatttacacaagtacccttaccgtgtgatcacatctaccggtacgttcagtattttagcaacctttaaaatcgtatcaatatgtctaccggctgccgctgccatatgatgggtaggtcctgcctcgctccaacggttcacgaactctctgcaggggattgagaatttggtacgcatattggtgtcgccgaaggtgaagatcggtccgggctggttctcgccctctgccactacgaacttaaagttgccattcttatcctgtgtgatagccagatacgtcacagggcctaccggaggatagaactgtgtcagatagccgccacccaccttgccgtggaatacctttacgatcttcatagtgggcttatgtgccagcgagatgtccgcatcaccagatccggaatgaccgatgatacagatgtcttcattgaaatcaatggagtacatctcggacagctgtcccattccggaaatggtcttcagaatggacattgccatggcaaccttcatgtcaccttctaccgcacatgcggtgccctgcttgatcagcatggaaaatgctgggatcagcatggagtccagtttgccggctacaccctgtgccttacctgcatagtgggaagcgatcatgcttaaatcttcatccttcgcccactgctcaaatgcaagcacatgctttgccatgtccataatatcttcatcatcagcggtagcgccgccttctacttcgaaggtatcgatgatgtcctgtgcctttgctttaatagcctcggtatcggtaatgtcatccgcaatggcccacatatcctcccagtcaaactgcttggtatacagacccatccggttgtaaaggttggtctcgtcgatatagagatccatcataccgggataaggacgtccgatctgggcgatattggtctgacggaaacgtctgcgcacctgcgctgccttacaccagtcggcgatctgtgccgccacctcggggtcaccgccttctacaacaccggtgatcacggcatgtcttttgcctgcacgctctaagtcagctaccgcctcacctacggcaccgcaggcatacaaatcccccagccagatgggaatatctgtgttcgcatagtccggagccagcttcttctgcacattgatacatactacgggaacatccagatcacggatagcgggaagtacgttataggaagttgcataggtcaggagctgtaaaaataccagatccacatctgctgcacggaacttatcgcctgctgccatagcctgttccttggtggtcaccataccgccgtcgatgagctctacggtatcgggaattgtcttcttaaaatcctcatactgtgcctcgaaattgggcaccagctggggaaactggggcagatatgctcccaaagcgatggaaaatacaccaatctttgcctttgtgtttactaacatttatgatttcctcctttttctaaggttatatttttacttttccggaacaaatgtcttaatc

SEQ ID NO: 11381 - DNA, 5796 bp, Unknown
  gut microbiota DNA sequence
gccaagaggttaccgatagctgttgcctcaccgggacctgcatatacggtcttgcccgtggcatccgctgtcagctgattcagatatgcggcattagaaccgccgccgatgatgtggatgctatcgtaggtcctgcctgcgatcttctccaaaccgcttacggtctctccgtaggattgcgccaaactgcgatataccacagatgccaactctcctacagactccggtaccggctgtcccgtcttctgacagtactgctttatagcttccaccatattgtccggcgagaggaagcttggatcgttcacatccactctggaaggaaaatttttgctttcctctgccatatcgcacagctgcgcaaaagagtaggcgtccttatactcatgtcttacggactggatcatccacaatcccatgatatttttcaagaaacggaaccgatggtcataaccaccctcattggtaaagttggctgctgccgcctcttcgttgataatgggttttaatgactcaattcccatgagagaccaggttcccgaactgatgtagatgccgtccccttctgtctgaggtactgccattaccgccgatgccgtgtcatggcttccgcacaataccacttccagattgaaaccaacttccttctgaatctccggaagcaactgccctacttttgttccgggcatcttaagtggcaggaaaatgtcctccgggtagccaagcttccggatcagatccgtatcccactggaaagtgttgggattcaccagctgtgtggtggaaccgttggtatactccgataatttgtttcccgtcagacggaatccgaaataatccggcagcatgagcagtgtcttcgcccgctgtaaaaactccggttctttctgttttacagccatcagctgataaatcgtattaaaaatctgcttctgaatgcccgtttttgcatacagctctgtctccggcagaatctttgccacttctgcgtccatgccgtccgtgcggtgatcgcggtaaccgtaagtatctcccaggatgcgatcctgctcatccaacaacacataatccactgcccaggtgtcgattgccatgctcaccggaatctttcccagttccttgcatttcttcatgccattcaggatctcaccaaacagccggtccacattccacagaagctttccgtccttatgatccataccgttctcgaaacggtagatctcttctaactttatttttccgttctccagatgtcccagaatgtgccttccgctggaagcaccgatatccacagccagataatgttttcccataagatatccacagcctcccttatctgaaattaaatacctgtgtcagaagcggctgtgctcctgtgacaggatccttctccatgatcagaatatctttcatatattcatcccattttttcaccacgctgctctccgcctgtacttttgcagcgtactctacgcctttttcacattcatagtatccgaacagttcctcgccctgcatccagatggagtaattcacgattcccgcatctgccaggacttccttcatctccggccagatatcgtcatgtcttttcttatattcctcctgcattcccggtacaatttttccccgccatgcgtatttttccatagtcgccaccttacctttcttcgtatttcaagcgtttcctatgcgcagatggacagaccgcccatttccgctgattctgtatttattgtagcctgtggattccggttctgaaatgacattatttgctccgggcactgtccgattttgcccgaatgaaaatggcgccgttcattctgttgtgcacaagatacaggaattatgttatgatgagtaatcatagagaaagagagtttttcatggaacgaacactgatttatactgctgataattccatagtctccatgccggtcagccgctttctgaaacagaagggcttctcctcacagaatctggtgcagttaaaaaaagacccctccgctgtactggcaaacgggatcccctgctttatgaatcatatactgcagcccggcgataccctgacactacatatccgggaagatcactcttcggaaaagattcccccggtaaatctgccgttaaatattgtctacgaggatgcggatctcatggtgatcaacaagcctgcgggaatgccgatccacccttccatgaacaattattacaattccctggcgaatgccctcgcgtactattttgaacagcagaactgtcctttcgtcttccgctgcatcaaccgcctggaccgggatacttccggactgaccatcgtggcgaagcattatgtcagcgccggtatactgtctgccatgattgccaataaagcgacttccggcatcacgagggaatatcttgccattgcaaaaggctcggtacgtcccttagagggaaccatcaccgcacccttagggcgcaaggaaggctcgatcatcgagcggacggtggattttgaaaacggggaatctgcggttacgcattacagagtactggacgaaaaaaatgggcacagcctggtctctctcatcttagagaccggccgtacccatcagatacggattcatatgaaatacctgggctatcccttgatcggagattatctgtacaacccggatatggaacagatacaacggcaggcgttacatgcctggaagctgtcctttgtccatcccatcaccggggagaaaatgcagttcacagcacctctgccggaggatatggcagcggtattatacccgtagttttttcaacgctttttcccggatcagacattcgctgtgctcttccaagtatcgtagcttctgctcatctgcggcatataaggctgcgaactccatggcctggatacatgctctgctgtaacgttcataggaagcgccgccttttcgtacataagcataacaggtaccatcttccattcgatacagagtactgtcgatgcgtaagtttgtaggcaatactgctgcatattcaatgactctgccgatattgcggaacgcaaaaattgcaaactgaggtttctgtgcctccgctgcctttttattctttttgccggattctccggcgttttctcctgcctgcgcttttttctccgccgcaccgatctctgcctttttctcctcgaagactcgcttcatctcctgcaaagcctgcaacagctgtgcaccgctcttattctccagcggctctttctcggaaagtaccagtaccagtccctcatccggcagcatcatgatctgcaggtcaaatgcatacttcggcggcttgtagcccacctcttcctctgcctgctcgatgatctcctgtactacttctttggctttgtcactgcgggtcacaaaatctttataatcaatatcgtactcttccagctcttcgttggacaggaagcactttacggttttgtcatcaattctttctattttcatagctatcacctcttactgttatatgtatgatagcataaaaatgttgtgatttccactgtgcgaattatgaaaacaatataaagtcattcatacaataaagcatataaatatagctgaacctcatttcttgtgatatgatggaacaagacaatattcgacatttttccacgaaagaggtgctcttatgacaatatcctggttatccctgttctggctgtttttcttctattcttttatcggatggtgtatcgaggtatgttctgccgcggtgcagcatcggaaattcgtcaaccgaggattcgtagcaggtcccctatgcccgatctacggtttcggtgccatgctgttcgagatcttcctgccggagctgacggaatatccgttcttcctgttcctgggcggctttgtactgtcctctcttttggaatattccacgggaatgttttttgaaaaagtctataagaaaaagctgtgggattactcccgcttccgctataatgtgggcggttatatctgcctgccgttttccctgctgtggggcgcattaagcgttgtgaccgtgatgttcgcggatccgctgctgtgtgggctgtttgaccgcattccgcattttctctccgtaatacttctgttaatcctcggagggctgctcctgttagacaccatcggttccgccctgtccacgataagcttacagctacaggcgaagcaccgggcggactatgcattagaaaaacagaccgcccggctggatcagatcaccgaaggattaggacagacttcccgtttcctggaaaatgctctgaccaggcatatgcaaaagcgtctgcaaaagtcttatccttccatcagtctggatgccctggtaaaagccagagctgaacataaaaaagccactgttttcgccgagggctgttgcttttataaattgttttccctctttttcatcggtgcctttttaggtgatatcacagagacgatcttctgccgtatcacagccggggtctggatgagccgcagcagtgtgatctacgggcctttcagtatcgtatggggactgggttgtgcctttctgactctgctgctctatcgctaccggaataaaagtgacggttccattttcctggcaggaacattgcttggtggtgcctatgaatatatctgcagtgtcttcacggaaatggtctttggcacgattttctgggattacagtggattcgcctttaacttaggcggtcgtatcaacctgttgtactgcttcttctggggaatcgccgctgtggtatggctgaagttcatctatccgaagctgtccgactggattgagaagattccgaaaaaaatgggtacgatcatttgtaatattttagttgtatttatgattgccaacatgctgatctccgcactggcacttgccagatacaccgaacgtaacgatgcctcctattctgtggaaaccacagagcttaacggattgcagcgttttctggacgaccattatcccgacgcacgaatggaacgcatctatccgaatgcgaaaatggtggattaatttggatttattaacgatgggagactgaccgaaccatgcagattgatgacttgacctcagggttatcccttagctttatcattcatctgaataacgaagagcttcaatttgaatcccgcattttggaagtctattcccgcagacatacactgttggctgagggtgtgtttactgatgataaaatcatctctttccggggaaaagggctgctcgtcgatctgctggtcactctcccagacgataaacctcagctgttcaaaaatgtcaccaccaacgtggtgaaacgcgccgatggaactctctgttacactgtcttcagcattgccggaagcaaaacctacaaccgcaggcagagctaccgctgttatatcggcatcgaaactgcgattcaatgcggtctgaaccgttctgcccacgatgttattatcaaggatatcagctacaacggattcgccgtagtcagcaaggaagatctggaactgggtgtcaaccagaccgtgcacgctgtcctgaatgatcatctggaggagactgcggagaactttaatttccatctgtatggactggtcgcccgtgtgcaggaactggaaaacggaatgtttctgtacggatgccgtctgaacaatccggtgccggggctggaacaatatattgtaaaaaaagaacgggctgtcttacgaaaacggcaattaacctgaacttctctctaacgcaaaaaaccgctgcccttacgggcaacggtcagactgtagacaaaacgcttttggtcag

SEQ ID NO: 11382 - DNA, 178 bp, Unknown
  gut microbiota DNA sequence
gctgaaagacagggggaaagcggacacgatgtccgcgtcagccgattgtcgacatggatgtcgactgtaggcggccccgtcatgacgagaactactcatcacttttcgtagaaaattcacatccggagaccttacatcgagacatgtgtatcgcatgctccgggagttcgtggatttt

SEQ ID NO: 11383 - DNA, 1971 bp, Unknown
  gut microbiota DNA sequence
ccattcttttgctattatacaccatttttgattcgtctgtcgttttttttatgaaaaagctcaaataatccacaaaatccaccgagttatccacatatacacacgtgtcatatgtggttatgtggattgtcatgttgtatatcaactctgttatcatatcgaatgtcatcgttgctgccacaaccaggcgtcccaaaatcgctccacctttttagccactgtatccactgtcacaggcactacctgttcccactccctggggaacattctgcgataagaatactgcctgaaacgctcatccagcaggacgataatccccacatcttccgcggtccggatgacacgtcccgccgcctgcaggactttattcattccgggataacggtaggaataatcaaagccgttttccccattgtcatcaaaatagtccttgaggatttccctttcacagcctacctgtggcagtccggttcctactacgatcacaccgatgaggctgtcctttttcaggtcgatcccctctccgaagatacctcccagcacgcagaacccgatcagtgtctgttcctcttcctcctcgatctccataccgataaggctctgcagatcgcagtcctcatttccccggaagcggttcaggaagtattccctctctttctcattcatggattcctgctgtaccagacattcctcttcttctgtcataaaatactgctcataaatctcataaatatgctccataaaggaataagacgggaaaaacaccatgtaattgccatgccggttcttcacgacttcatgaatatagcgggcaatattgtagtactcctcccgggatctgcgggtgaacttgctggtcacatccccagcaatcagtattgtacgcttctcgggatcgaatactgagtgcgcatatacctcatagtcttccttctcgccacccagcagattcttgtaatactggatcggcagaaatgtggcagaaaacaggattgtactgcgtcccctgagcatgcattccttcagattttccctgggattcacacagaacagcttcagctcaaagcttccgtcctcacacattctggtatatttcacatagttttcgtcctgtctttcataaatatccaggaaatggctgagcttgaagtagaagtccagcaggttctcccacacctccagactgaccttctcctgctcctccagataatcgctgatgatgccgtgaagtctggtcagaggctgtaccaacatgtctatatcatccaccagccggtagccatcacaatcccgcttcatggacaacagctgggcgttgcacttctccagcatctggctgatccgttccgcatagccttcccgcacaaaagtactttttccatcggatttcttcagcttatgccccttgatatacagagaatctgttccatcgctctcctccgggatactaacctgtggcagttgttttgacgcatctgtcatttctaatgtcatttgtccggaaatctcgtctttatcgcgttttttaaatgctgcctcctccatttccgacatgattgtctgttttatctcccgcttcagttccaacaggtcttccttccgcagaggtgcgctgtacatctctctaccccgctctaagagattatgtgcctcgtcgatcagaaagacataattcccctggctgccgtccccgaaaaatctcttcagatacacatggggatcaaagaggtaattataatctccgataatcccatctgcgaacagacttaaatccagtccgaattcaaaagggcatacctgatgtttcagggcatactcttctattttgcttctggtaaaactctcttcccgggtcaacagatcatagatggcatcattgatccggtcaaaatgtcctttggcataagggcactgctccggattacattcggtacgttcctgaaaacagatcttctctttcgctgtcagaat

SEQ ID NO: 11384 - DNA, 40304 bp, Unknown
  gut microbiota DNA sequence
cgccaccgtacgggtgatggtcttggctgtcagatagaacagcttgtctcccatgtccttccccatcgccttcaccgcaggaaatatggtggatatggtcttgcccactccggtaggcgcttccagaaacagttttctcttatgataaatggtctggtacacataactgaccagttccttttgtccgtcccgataatcgaaggggaattgcagtccggcaatggactgctgtctaagctctctccactgccaggtataatccgcccatttacggtaatcaccgatcaattgctgaaaccatgcctccagcttcgcgaattcataatcttcataaaaataacggatatcttccgtctctatattacaataagtcagacgtacacggatataaggcagctccttctgcagactgtacatataggcatagcactttgcctgcgcaatgtgcaggggtaacggtgccttcagcttcgccagatctctgtaggttcccttgatctcgtcgatggtagtctctccgttctgttcaatgataccgtccgcccgtccctccacgatgatgacatagttctccgtgggatgggtgtatttcagcgccacttccgcctgatactccgctcccatgcggcgttggatcatgcggtggatccggctgccctcctgcattgcattctcgggtgatccctgtctcctgtcatcgatgtcgccactgcgcagaatgaactccaccagattacggaccgatattctgacttctcctgccatgcggcttcacctcccttgacaaattcctatcataaccgcatgcctgcggcttgttccgggttgcacactctcacatgcccggtatacgaaaactccccaggtaaatagtactctatcttacctggggagtcaaatcacattctgttatcacaagatgttttagcacgcgatcgcatactgtctcaacagctcttcgaatttatcattgtagccgtcataagatacagacaatggcttcgtgaaatccaatccatacactccaaggaatgacttggcatcgactacgtatctgttatagcatatatcaatatcaaaatcacactttgaagctacatcaacaaaatgcttcacgtcttcaggtgtcaaacggatcgtctttaacatttcttgttccttcctttcaatagtaagttcgatcgtaagtaaaataatacaccaggtactttcccctcacatctgaaatcattactattatagccaaccatccccaaatgtaaagcggtttttttcttccagaaaacgcacattttgggcatttttaccactctgttatcattttcacaatatatgttcgccgtatggaaaaccttttcggcgttttgtatatttgttgcgttaccgcggtaaaatataaatcccaatttggcgaaatctactgaaattccaccatatattcttggaacctgaggggcagcatatttcgttgtaattccctgttttcccgctcttttatagctattgtatgacaaaaggaacggaaaagttcccggtaatgcagctccgccgtggacagcttctccgtctcagactgtactctctcccaggcatccttcccctgcagcgtataccatggtctcccggcgggatgtaccccgaacaggtatcgccccgcatcaaacagcagaaaatcttccatgggaaaacggtcggcgaaatgtaccattaaaaaggtcaggatattgttcttcggtgcgatcttcgagtagaggatcgtattctccagttcttcaaaccgggtaaaccccttcagatgatgatactcattcccggctgcccttgccaggctgaaggtctggttcacataggtgtctgcaatggcatccataagatgccccgccgtacacttctcagccagtcccttcgcaatggtccggtataccgcctgtgccttctccggcttcggcgatgccagtgccagacacagggtctcataatctgcttccccgaatctgcgctttaacgtacggatcaccttgatcgtcttctccggatccggtatgacctccaccgactccgagaacagcaggttctcctcgatggtggtgaccatagtatcccggatgatacagtgatcttcataagtattataaatagcggtgaagattccctccagcgaatcctcacagtgataaatcttcatatgatccgtttctcctcctgccgtaccccgttcgggaacaacccatcatcaaataaagtcatctgccggtaactcataccgtcgcttccgaaccggatccggtccttcggatccgtcagattccgcacgatataatcctcctccagcttcgtaggatacatcatcctgccgctgcaggtaataaaatacactgcccgctttaataccactcctaacttcttcagatcctgaaaagtcagcttcgtactccgcctggctgcaaggatccgcctggcgctcttcacgccaatccccggcacccgaagcagatccccataaggtgctctgttgatctccatcggaaaacattccagatgccgcactgcccagtcctccttgggatctaacatgacattaaaatacggtcttctctcatccaacagttcctctgcccgaaatccataaaaccggagcagccagtccgcctggtacagacggtgttcccgcagaagcggtggtcctcccggaagcgccggcaggcttttgtcctcgttgacttttacaaacgcagaatagaagactctctttaactcaaacttctgatacaggctctccgccacatttaaaatctgataatccgtctccggcgtcgcaccaatgatcatctgggtagactgtccaccggatacaaagtggggactcttacggtacaggatcagttcctccttattcgcatggatgccgttctggatctgccgcatgggggtcagaatattcttccggtgcttattcggtgccagtgtccgaagtccctccgctgtagggagttccaggttcacgctcatacggtctgccaggtatcccatccgctgcaccagctccggatctgccccgggaatcgccttcacatggacatagccattaaaatggtagtgattccgaagcagccaaatggtccggtataataattccatggtaaacgtaggatcctgtacaatgccggagcttaagaacagtccctcgatataattccgtcggtagaactccatggtcagtgtacagatctcctccggggtaaaagtggctctggggacatcgttggacttccggttcaggcaatatttgcaatcgaagatacattcattggtcatcaatatcttaagtaaagaaatacatctgccgtcggaagaaaagctgtgacagatccctgccttcgcacagtttcccatatgcttcccgtcccccttacgctccacaccgctggacgtacatgctacatcaaaacgagctgcatccgtcaggatctccagcttctgcatgatggacaattccccattttgtataagatattccaagttatcaccgcctcttaccgaaaatttccataataagaacatttgttctgatgtatatctaaattagcacatatgttcgatttttgcaagtggttattttttccgaaaaaaggcttgcaaaatcatgcgtttcgcagttaaataatataggagtattttgtaacacaagccgccaggcggcagaatgagaggtcagtatgtcagatattgtcatacctaaaaattataagtctcagctgaacctgtacgagacacaggttgccattaagacagtgaaggactttttccagggattgttagcagagcgcctgcacctgctgcgcgtatcagctcctttatttgtggatcccacatccggactgaacgataacttaaacggtgtggagcgtcctgtaaatttccatattgctgcacagggagaccgcgaagcagagatcgtacagtctctggccaaatggaagcgctatgccctgcagaagtatggtttcaaacccggtgagggactctacaccgacatgagtgccatccgccaggatgagaccaccgacaacatccactctatctatgtagatcaatgggactgggagaagatcatcaccagggatgaacggaatcttgaaactctgaaggagaccgtccgcaccgtatacaaagtattgcgcaaaacagagaagtatatgtccatccattacgattacattgaggagatccttcctcatgacatcttcttcgtaactaccagtgaactggaggaaatgttccctgattattctccgaaggaacgcgaatactacattgccaaggctaagggggctgtctgcatcatgcagatcggcgagaccttagagaacggtaagcctcatgacggtcgtgccccggactacgatgactggtccctgaatgcggatatcgtggtatattatccggtcctggatatcgctctggagctgtccagcatgggtatccgtgtagacaaaaaggctctgttagaccagttacagaaggcaggctgccccgagcgtgctgaacttccttatcacaaggcagtcattaacggtgagcttcctcttaccatcggcggtggtatcggtcagtcccgtatctgtatgttcttcttaagaaaagctcatatcggcgaagtacagtgttctctgtggtccgatgaagttatggagactgcaaaggagaacggcttacagctgttataagacattgaattcaaacttcaaaatccccggaagatgaaaatctcccggggatttgttttctgtttttattcaaaaatcacaaatttctcattttcaaaggttttctcgtatccatatgcatccatgaactcaccgatcaacaaaagtttggcattatccacgatgagacttcgttctctttccgtgggttgtaatgcttccagagcattctctcccgcttccagatacacggcatattttttctctaacagtaccaccggacgataagtcgcatccatatccatccgttcctgcatcttatgcatatcctcttccagctgtgcgatctgataggaatccagatccggccagggattgaatgccgcaggcatctgcagataataggacaatgccgggatctgaccgtagagcagcacatcctttcccgcaagtcctccggtattcacatactctgagatctcctgcatccatccggcgcgttcctcactcatccacacacccttcaaagtctcgttgttggtcacctgcgcattgatctcctgtacaccggtgccttcggcaaatacaaagcttctgccaaacagtcccacctggataaaaaataacagaaaaaaaacaccaaagagacattttgcaggaatcggggatatggtcatccgcttccatcggaagcttccggcatatttgcagaaccggtaaaactgccaatacatataaggtaatgccaggaacagattattcatgctaggataaagcttattgttacttccaagagaagtgatcagtacgatcaggaagatcagtccgctgagcagcttttcctcccccggtgcggaaggcatgaatatccgccacagcgtcaccaggagcgtcagcgttaaaaacgttacaccgggccagataatagcgccgtagttcgtatattccctagcgcagaacccctgccggtacagccagaataccatgatcacagcaagtaccgcacttacgacccattccaggatccgcagcgccttttttatcgtgtctttccctgcataagagtctcttacacaagctgcggcgaattccaagaatcccaccgctatcattcccacgatcaggaagacgcacatcctaagctcccagtacagattctggagataccagtcgaacatccccaggatcatggatgcggcggtataatccgttgctacctccgtcatggaaaacagcctctgaatgcctcttacatactcatccatgccatagcggatctgaatgtaaccgaataataccagcagtgcagtaagataccccgccaggcacataccggtatcctgcaacagcttcttacgaaacctcctgcctgctgccttttttcgtgcttccctattttccgtttccgcatttcccgcaacgtcaacacaatcctgcgcaatgcttttttgctcttccagccagcagatgattccatatgcccacacacctacgatcatcgccgcttccggcagattggaaaaccttgccagcacgttacagcccagtgccacccctgcggcaaacagtaaacctccttttccccgggacagacccagatacagacagatcacggaaatcaggaaaaatatataggtcacataattataaaaagatcccgtagggcaccagcaaaagcttactgctgtaaattcgcccaaaaaggcaagcccggctggtatcttcagcacttttgtacaaaaataatagcccagaaccgccagcaggctgatacttaagcccgtgtaaaaattcatgccgatcagcgtcttcgctccgggcagcagactaaggcaatgtccgatgacagtggtcagataagtggaaaacaaccacatgggatccatatgcctggttcccatatattcaaaattcgcatagccgtagccggtatcccacagatccagcccccaggcaatatgccgcaggggatacagtaccagaacagccacgaatacgaactcccagaatcgcctatgactctgaccgccggttcccgccattttattttttacgttatctgtcactatgatacctctcttttgaacatattatctactgcttggattttttccgtaagcacacgataaggacgaatgtgcaggaatatcttatgcaatccgccacagatatttttgcggataacatctaccagaattcccaatataaataccacgatcactgcgatgacagtccataaaagcaacgatacggcaccgtctatgcgatccgagcccagccacttctgccatgcataacgcacccccaggttctcatgcaacagatacacccctaacgtatagggtgcgatcttcaccgccacgctgccgatcttcccccggatatcactgtccaggaacaggcagaacagtccaacggaagctaagaacgggaatatatgattatattcataaggaatcttcagaatcagttccaggctgccggtgcgctgataaaataaatgcagcagcattgcctctccgaaagttccgatgacgccgatcagatacagcagcagcgcccgggattttttctgtaaaaaaggaattccgaatctgcgaagataagcggctgcacaaaacacgcacagataccagatgcagtcatatcctttgctgtcctcctccaaccggaagggcagaatggattttatcagacaaaatgcagcaaataacagcaccagggtcacctgaaactgctgcttcgtcatccgtctgagcccgattcccacgaagggtaacaggatatataaaaatacatacgctgtcaggaaccagtaatgccccatggtcaccgggaacaataatgtcagataataatgcgtactcacttccgccgcgggaacgatccctgtcaccaccgccagcacaccgatgcccacagaatacagccacagctgcagccacaacgtaagcagcctgctcagtttaaaagagctttcgcataaaaagtatccactgatcatcatatacacattcacggctacaatgcagaatgcttccaacagccaggctgccatatcctgcactgataaaggcgctgtcagatccggcagcagtcctcccttgccctgatagtgcagcaccacgaccatcatcattgccacacagcgcaatacttccagatttgccatacgttcttttttctgcatatcgattcctgtttccttcctgacattgcttcgtgctacgcactcccacaatcctacccaaggtctttcgcccacttatgagcaagctcatgtgggcttagaccttttgaccctggtatcatcattatattactttgtaacatattatgtaaagcaaaagcgctcctgcctattaaaacctatgaaagaggctcattttaagaaatcgttttcacattaatgtagatatttggacaaaactttggtaaaatgtatccattaatactaaatctgcatcggaggtgtctattttgacaaaaaatactaagaaaaaccctatccctctctggaatcggatacgctttaagctgatcttcgcttttctgatccccgtggtctttatcattgtcttaggtctcgtatcctatcagaaggctaccacacagatcatctcaacctaccgcgactccgtggaccagaccgtcagcatgatgaatcagtacctgacgctttcttttgacacggtccagtccaactacaagggatatatgaatgaagataccctgaagaaatatctgaacggtctatatgatagcgatgccactaccttgtacaatactccaaacacctatgaagatacctttatcaaagctgtgaccacggatgccctgctctccaatatttacgtgctctctgacaaggagaagacgatctctaccacgaaaacgaaggagaccggtctcttaagtgcgtaccttgaaagctctcagggtcagatcttatccgcggacaaggcaaaatattacctttttggcaaccagtccgaggtcgatgcaaagcttggcacggattcctccaaatacagtgtccgcctcgccagatatttctccaatgctccggcgatcctgatcattgatttcaaaccgagtgtcctggatacctccttatcctccctggatggcggcgagggcagtctcgtaggctttgtcacctgcgatggcaccgaatacctctcctctagctccgatacggcagcagaaaatacctttatcggcaaatcctatgtagatgaggcatttgcctctgaggaagagaacggctcctcctatgtggaagaggcaggcgcagaatatctcttcctctattccaagatcggtgcccgtaatgccatgatctgtgccctgatccctcaggcaaatatcatcggtcagacagcggagattaaaaatgtgtctctgatccttgtcgttgcagcaagtgctgtggcgatcttactggggtctctgctggccgggcagtatggcggctccatctactattttatccgccgcctgaaaaaagtctctgacggagatctgacgattgaagtccactccaagcgcaatgatgaattccagctattagctgatggcatctgtgatatgatcgcacacatgaagaagctggtatccgggctgaaggatgtcaatgaagaattatcccgggctgccaccgatatgtctgcggcttcctcacatttcctggcgacctcccaggatatccagaatcaggtaggtgaaatgcgccagggtattgaaaaactggatgaaagctctgaggactgcctgcagcagatggactctctgtccgacaccatcggcaacgtatcctcacattctgaccagatcagtgcgcttgccaccggcaccaccgctgcgatccataccggtatcgaatccgtggagcatctgaaggagaacacctcttccaccatgcagatcacctccaacatcgtagataccatcggcaggctgaacgagaaatccaaagccatcggttccattaccgaagccattaatgagattgcagagcagaccaacctcctgtctcttaacgcttccatagaagctgccagagccggggaatccggaagaggcttcgcagtggtcgctcaggagatccagaagctggcggatcagtccctgcactcctccggcgagatctcccggatcatcgaagagattgagattaccactgacgaagctacgcaggttgccagacaggccgagggcattgtagcggatcagaaccagtccgttggcagtaccacagactccttccgtgagatagattccaaggtaacagagcttctgaaattcctgcagcagatcaatgcaggcgtgacggaaatggagcaccagcgcagcactactctgtccgccatctccggtatctccgcagtatccgcagaaactgctgccgggtcctccaatgtacagactgctgccgaaaaacagctgcaggccattcaggatctggacaaagccacttccgcactggcagcccgctcagaagagctgactacgattctggaaggtttcattgtatagaaatggctatacaccctggagaaaatatgttatactgataacatcttttgacgaagaaattcttaggaaaatacatatagagaggtaatcttatgagcaaaaaaagagttgtcgtatctctgggacatgatgccttgggctataccactaccgagcagtgggatgcggtaaaagtaaccgccaaggcactggcagatctggtggaggcagattatcagctgacgatcacccacagtaacggtccgcaggtcagcatgatccataaggccatgaccgagttacgccgtgtgtacatcgactataccccagcacctatgtgtgtctgctccgctatgagccagggttatgtaggctatgatatccagaactctcttcgtgccgagcttctggaccgcgggatctccaagcctgtcagcaccatcctcacccaggtcacggtagatccttatgatgaggctttctatgagcccaccaaagtcattggtcgttacatgtccaaggaagatgctgagattgaagtaaagaagggcaattatgtcaaggaagatcccggcaagggcttccgccgtgtcgttgctgcccccaagcctatcgatatcgtagagatcgaagccatccgtgcgctggcagccgcagatcaggtagttatcgcctgtggcggcggcggaatccccgtgatcgagcagaagcatgcgctgaagggtgcttccgcagtcatcgagaaggatgccatcgccggtaagcttgcttccgacctaagctgtgacgagctgatcatcctgaccacagttccctatgtctataagaatttcggtaaggaggatcaggcagcactggagactctcaccgtagcagaagcaaaggatctgatcgcagcaggacagttcgaggaaggcaccatgcttcccaagattgaagcagctatctcttatctggagaaggttcctgccggcaaagtactgatcacctccatggatcatgtcaaggatgccattaagggcaaggcaggcactgtgatcaccgcataatttcattcgtatgtaaaaggagatatccattatggatatctcctttcagactgtagacaaaacgctttgggtcagcactccagaagccaaacgtagagaaatggggaaccttgtccatcatttccagaccgaggaaccatcggtatgcgacattgacttcgatttcttttactgtctggcgcatacttcggatgccgtacagatactggatgaatggaattttaatgagcatgaccggatccatgctggggcggccattgtctgcactgtatttatcgatcacaagatcatagataaaactccagtcgattgcctggtcaatcaggcgcagcagatgatcctgcggaacaaggtcatccatgcagaacatctgaatctgttctcttttcttatctgcattctgtgtcatcataggaaacaccgcctttattttgatactttcattataccaaagaagtagtgaaaagtcccgtaaatacggcattttcactacttcttatatgcttgtaagtacataatttttgcagtcatgacacaagaaaagctccctcacaggaaggagctttgtctacagtctgagcctgaggcttctttagaagcactcaggctttatcattctgaaaactagatctggaactgatgcatcaactgtaacatagtatgtacctgcgcggactgttcttcgctgacagcggcggtctcctgagaagatgcggagttgttgtccacgattccggccacatgagcgatgttttcatcgatctgctggacgctggacacttcagcctgaagggcctgtgccatatcaaccatacgcttggtagaagcctcggcttcttccattacctgatccatgctagcttcggtttcttctgcaatggcgattcccttgttgacagcatcgatggtgctctcgatcagctttgtggtctctccggcagcctcggtggactgttccgccagattcttgacctgctcggctacgacagcaaatccgcggcctgcttctccggcacgggcagcctcgatggaggcattcagtgacaggaggttggtctgggaagcgatatcctcaatgacctgaatgatagaacgaatctcctcggaacatttactgatctcaccgattgcgactttcagttcctgcatcttggcattgccatcagcaaccgtctgtgcggactgcttggagatatctgcggtctcctgtgcaactctggctttttcttcaatactctttgccatagcgtcgatcatctgggatgcttcggaaatcttggaggcctgtgcggtacagccttctgccagatcggtagctgcctgtgccagctgctcggaaccaccatcgatctcctgtgcgctgacctgaatggtggacagtgtcttcttcatatcggcaatgatcttcaccatggaatccttgatctgtacaaagtcaccgacatactcttccgtaggctctacacggtaattgccctgacccatctgacctaagatctcggaaatctcggtaatcatcttggtaaagttgtcgttcatgaaatgaacggcctgaaccatgatgccgacttcactgtcatcctccggcagatccagacggctgtcaaaatgtccctgcgcaagtactttcatctgctcggatacttttacaatgggaatcagcagttcctgttttgcaaaggtcagtatggtgacaatcttgcgggcaatggtcaggaagcagagaatgaaaatcaccatggtagtgatcattatcagattcagagtattttgcttctgagccatacgtgcctggatatcattgatacaattatctgtggttgcagtgatctcctgtacggtagattcatattcctcaccaaatacataagaaatagctgcttgtgtatctccggaaccggccttatccatggcttcttcttccagaggaaccagaccgttggacatttcagcaatatggtttaacagtgcccattcattgtcggtcagaccgtctttctgaagaccttcccaggcaatgtcacgatttttatcctcgtttaattccttcatataattgtcatagtaggtctggtctccggtgactgcgtaagactgtacggcagcggtcagcgtcttggaacccatacgatactggttcagatacatggtagcttccagctgctgggaattgatccggctcagatacatgttggatccgatgaacaggatcagcataacgatgctgatgatcagtatccgataggttgatcttgtgttttgctgcagcatggcagactgactggttactttgctttgctttttcatttgaaatataacctcttttctgtaatacatggtgaactgatgtgttacgaaaattcttttcctacagtatactacaattatcggaattatacaaatcttgcacctttaaaaatacagcaaaaacgcgtaaaattatttatacgaaccatcagtgacgacttgcaccctatacaggaagatggtactataaaaagtaagaggcatgattcggaaaaaagaagataacggtaaaaataacgataaataaacagactgtagacaaagctccctcacaggaaggagctttgtctacaatctgaaaggagatatccattgtggatatctcctttttactcatatttttccaagtagaaggaatacaggatccgctccttcacgggcatctgcatcagcttcgtcaacgcttcctcatagtactgaatctggacgttgtagcggttccagagagcttccagggagtcgatcacatcggtcttgtagtccagcagaacaatctcaccatcttctatgaaaaagacatcgataataccctgaatgagcaccttttctccctcgggcagatccggatccaggcgtttcgcatcaatgcccagcacaaagggctgctctctgtatagaagcccctgttcctgcgcacgccacatgcggtatgccagctcctgctccaggaaattgaggatcttcggcagactgactgctttggcatattcctctgtcaggcgtaaagatatcgtttcccgctgtaagaattcttccagtcggttctgtaaccgattcttgtccagtcctctgcgatattcctcatagttgttcggacatccggtgaacagcccggattctgtgaatagatatgtgaaatccagaagctccatggtacggtgaaacgcattaccgcgcactgcaccgctgaccttctcctgctctctgcggaatcccgggatatagggaaccacttctttttcttcaaaggtatggaatgccgcctcgtccttttccgccatggctgcgatctttaactctgacactgttgtcttggtatacagcttttgtaacccgggatgtggatattgataagcaaaacgctcccgcagatgcataagcttccgctcattttcttccgggtccccggtcaaaggtgtctctccacaggctatcagccgcagctgttctctgcgatcgcccatgcgcagctgctctccgagttcctctgccgccagatcctccgttctcagtgttttcaccgcaattcccgtctgcggcaggatcggcagcaggaaatccatataacttcccgcctcgcagaaatccagatacgtcagcttctcctgtccggtcatctgggacagttcccatttttcctccgctttctccagtacggaagttaagatcagcttttctctggcacgggtcagtgccacatagagcacacgtaattcctccgccagattatcttccttcatttttgcagacaggattgcccggcggagagtcttatttttaatacgccgtacggaatctacataatccaccgcaactcccagatccatgtccacgatgagggattggttcgcatcctgcatgttgaagcgtttcgacagtccggagacaaataccaccgggaattccagtcccttacttttgtggatactcatgatcctgaccacatcggcattttcatccagggtgtctgcctcaccataatccacgtcatatttttccagctgctccatgtaacggataaagtggaacagtccgaaataactggtcttctcgaaagcggatgccttcgtaagcagcatctccacatttgcacgccgcttgctgccggtgggaagtgccgtcacataattcagataatcataatcgtccaggatccgctgcaacaggtcacggatcgaggtgaaaggagtcaggtcacggtagtggccaatccgttgtaagaaggtatctgccttttgtgaaagctctgcttcttcaccggcgctttcgcccgctgatatctcttctccctcttccaccgtccggccgctctgtgccacttccttcagtgcctcatacagtgtcatccgttttctggaatgcccttccccgccactgcggatctgcgcgatctcttcctgggtgaatccaccaaagacggactgcatcacgccaaacagcgggatatcctgccttggattgtccagcacccgtaaaaactgcaacagctcctgcacctccagcgccccgaaatatccggtcttagatgtgatgtagacagggattccctgctgttccagtatctttttgaattcttcgtcccagccgctggtggtgcgaagcaggatgaccatatccgaatatcgcaccgggcgaagttctcccgtggatttctccatcacctgcagactgcccttcagctgttttatacgggcggcaatggcgagcgcttccaactgtcgtacattatcgtaatccacaaggactcccgcaccctcggcatgctgctctccgatgccgctctcttcgcgctctcccttttccggcttgcggatcagtagcagttcgctgccgtaggcgggatcctcctgtgcaggatacactgctccgggatacagtgccgccttgtcatcataggcgatcccgccgatctccctgctcatgatccgggaaaatacatcgtttaccgcatccaccacctggatacggcttcggaagttcttcgccagatcgatccggcacagatctccggtctcctgatagatatcgtatttttccaggaaaagctccggtctcgccagacggaatttatagatgctctgctttacatcacctaccatgaagcggttgtaacgaccctcttcttccccggagatagcgcttaacagatactcctgcaccaggttactgtcctggtactcatcaataaggatctcctgaaaatactggcggtactccattgcaacgtcacttggcacaatacgatatttcgtttcggcgtgatccgttcctgtgccgccggtttcttccactttttcccgctttaacaggatctgcagcgcataatgctccatatcggaaaagtcgatcagatgtctctcctgcttggctgcgagaagccttctgtcgaattccagtaccaggtcaagcagtattcgcagcggctctctgcaggcttttccctgctccaccgccagttctaacggggtcttaaaatagctctctgaaaggtcacttaaggtatccttcacactgtttcgaattgctttggcaagttcgcgtttggcaggatccacactgtcatccttcttggaaggaaggcgtccaaatgtcaccgtaggaactttggccgcctgttcctccaggtccttacaggatgtcagtctctccagctgctcgatctctgcctccgtcagttctccgtacatatacgggccgtccggtagttcacacagccgctttacttcccgcagtttttccaggcatccctccacggtacggttcacccgttccgtcagatattgtccgtaatcgctgtgaaccagtgcttccatatctcctgcagcatagtcatttttgcgctcctccagccattccgcaggccagggaaaacttcccgcataccgggacagattcagaatatgctgctccagcacgctctccctgcctcccgggcagaaatactccacacaggtgtggaactgttccggggcttccgggacaaattgcccggcataggcatcctctaaaagctgtgccagtacttcctgctgaagcagcttgatctctccctcatccgccacgcggaaatccggatccagtccgatctcattgaaatggttccggatcaggaacaggctgaagctgtcgatggtagtgatctgtgcattatgtaacagtgcagactgcttctggatatgctcgttgccggaatccgcctccagtctggcagtgatgcccgcggcgatccgttctctcatttccgctgcagcggcattggtaaatgtcacgatcagtaatctgtcaatatccgccggatgttctccgtcacagatcatgcggatgatacgttccaccagcactgccgtcttaccgcttcccgcggccgccgataccagaatattgctgttatgcagttcgatcactctttgctgttccggggtgaatttcattcccatacgctacctctgtttcagtttcttttatcctacacttccatcgtctcctgcatccgctgcatcagcgtctgcttatccagatcttccagctgcctcttctcatatccgggaatactgccatcaaagccgcagacctttttataggcgcaataggtacatgcttcctcatttcctttttcgtaaggatttgccgctattttaccgtccaggatttccctgccaatctggcgtatcttcgtatccacataagcagataccacctgcagctcctcacggcttaagattccggatctggcgctgaagcttccgtcctttttcttttccaccggaatgactttggacttgtcctgtaaaaatcgatccaaacgttccaccacggcgggatcgctgttcaccacaccgttcatgcgaagttttgtcagaatctcttcgttgatctgctcctgggtcagttccaccggagtctctatcgtaggatcatcaatatgataatacagcagtgccgccggtacgatctccttatccggatgttttctgctctccagctccattgccgcattcatatataccaccagctgcagctgcaggccatagtacagtgccgccaggtcgaatttcttattgccggacttgtagtcaatgaccttgacatagacatgctccgcatcctccgatacatcgatacggtcaatgcgtccctgcaggtgcatcttctcttcttcagacagatccacatgaatactgtccagattctccgcaaaccggaaggacaactcataatcgtccggctgaaagtttccctgcttcagatgctgctgcaaagtcagcaccgtccgggtcaggatcctgctcatccgggtaatagcatattcattccttgcagaactgtacagaacggtctccccataggtcgcagcataaccttccactgcttctttgacggcctgagtcgcaaaattttcatcaaaatcccaccatgttcgaccggattctgcaagttttcctgcgaaattctccagtaccgcatgatacacatttcccatatccgacacttcaaagccaaattcttctctctcctgcagagacaggccatattgcaggaaatgtctgcatgcgcaggcagcataggtctccaagcggctcacactgttctccagctgcctgccgtacaatgctctcgccacgatccttgacagaccgctctccttatatcttctaaatgctgccgccgtcagacggtctctgccctccggatctgtttcataggcacggtacatgagataaaaatcctgccgttcctcttcccgcagcgttccgtccgcatattcccgcagttcctccgccagatatctggcaccttcctgtctgccctcgatctgctctaagcggctacggttttggggatattccacagcaagctgcggaaaaagcttccgtaccgtatcgatcaggtaagacggacggattcccttcccatcactgtttaccttggcataagacagatacagccgttctgagggtttcgtcatattcagatacagatacagtctctgaatgtacatctgttgtctgggactcggtgccatttctgttccggattcgattaaaaattctctgtccatatcggagataatgccgcccttggaggcatttttcggaatgtttccatcatttacccccaggaaaaacagtactttaacctgttttaagcgggtccgctccatatcacccaccacaatacgatccacattctgcggaatcgtacctactgtgatctcgccaaaaccagcctctaaaatatccgcaaattcctgcagggaaatctcttcctcacccaaaagttcatagatctgatccagcagatccatgaccagacggtagatctgtgcatattccctggctttcgccaggtcgccctcctgctcgaactgctgttgatagttcaaaagcttctgctgtacctgattctgttccaggaaatcatacaggtgatccacatactcgccggcttttgcccggggagccatatgcaggatctccacggtatccgcaaactgctgtctgatacggttcagacgctccatggtctcttccgcccgctctgtgtcttcctgcccactgccttgctgcatctcctcagtttttcgtgtgaacaggcggctgtaggtgcgataccctctcgccccggtgcggatcacataattctccagttcgtcaatttcctctctggagatatccgccatgccgctacgcaaaaaatgaaatacggtatcatacgaaaaatccctgatatataactgcaaggcgcttttgatgtattcgatcatgggatttaagacaatccctctggtccggtccagaaaacagggaatctccagctgcccgaattccgtctccacataggaagcgtacccctccagatctccaatgaccacagcaatatcccggtaagtaagtccttcttcccggatcagcttccggatatacaatgccgtctgatggacttcctctctgggagaaagtgcctcgaacatacggatctcacactgtttctccgtataaggctcatactgatagcgaaacagattctgctccagataacataacgccggtgcctcggtgaaacggttgggaccgccctttacaaatacatcttcccctcgtgtcacctctgtctccgccgccagcttcaccagatccgccactgtctttttactcagatggaacaatttctgctcgccgtccatctgataagggtcttcttcctcaccaatggtcacagtgacaatggtctcctcgcacacccgcatcaattcctggatcagacggttctgtataggggtaaatcccgtaaacccgtcgaataccaccacactgtccggaaggatcttcgactttaccagggatctgcgcagcacatccagtgtctcctctgtagtgataaaatggtctctgatataatcctgaaatccccggtacagagtctttaaatctctgagcttcattgccagtgcgccccttttttcggcgctggcgatcagtttatccatatcctgtgtgctgatgccgtactgcatgaattcggagatggcactttttacctcatggatatagccctgcttatgcaacagacttcccatggcaggcagctgctccttcagatctgccgcgatcttctgcagcaccaggcttttcccggtgtcatccagtacaggcatttccttcgttcctacttcctccaggatacgatggctgagtctgccgaagcttaagacatcgatattcaggataccgcctctgtcactgtgcatgaccagatccttctgggtctgcatggtgaactgatccggcacgatgatcaggaaattcctccccggctcctgcgccgcccgctgcatgatctcttcatagattctgtgactcttgccggacccggaaggtccaaaatagaaacgtaagctcataggtctccttttgcagtcttctgcctattgtatatcaagctcgatcggacaatggtccgatcccggaacttccgtgtggatcttcgcatccgccagtctgtcctgcaggcactgtgacaccacgaaatagtcaattctccatccggcatttttcgccctcgcctggaatctgtaagaccaccaggaatagattccggtctgctccggataaaaatagcggaaagtgtcgataaatccattttccagtactttggagaagcaggcgcgctcctcgtcggtgaatcccgcattgccgcggttcgtcttcggattcttcaggtcgatctcctgatgcgccacattcaggtcacccgcatagatcaccggctttttctcttccagttttttcagataagccagaaaatccgcctcccattgcatccggtaatccaggcgctttaattcctgctgggcattcggtacatagactgtcacaaaatagaactccgggtactctgcagtgatcactctgccctcatggtcatgctcttccacgccgatgccataggtcacctgcaagggttcctccttggtaaaaatggcggtaccggaatacccctttttctccgcgtaattccagtactggtgatatccgggcagatctaagtcaatctgtccctcctgcaatttagtctcctgcaggcagaaaatatctgcgtctatttctttaaaaaaatctaagaagcctttctgcatgcaggctctcagtccgtttacgttccatgagataaatttcatgctgttccctctttcttatttttgattgtttaaccattcctgttccttgcgggcagcctccagggacgcttcgtacccttttagaatatccgtaagtctctgcacatctgtgattgcgcttgctttattttccgggtgatccatccagggatgtctgtattttgcaggatatatgttttctatggtattttctccaattatgtaccattttttctgataacagatggtgttgtccttcgggtttaagaaagcgaacaactgtgccagcggatagctctccgtctccgtcgccatcttccgattcttcagattctcttctctgtcggtctgagccttacgaatcttcacgttcgttccttcgggttctatgatcagtgtcataggttcttccggttttttccatattttgtccagtataaaatttaacggtcccagcagcaggatcgtcatgaggactgccagcactcccgtcagttccgggatccagtcgcccagtaccagcatctggaacaacacatgatcactgtcccgcacgccccagactttcattacgacaaatgccgccgtcaccacatagatcaagactgttgctatggcaaacggcatcagtactttctcttttttgataccccagtcggcgtaagtgttccgctcttcctccgtgaacagcacctgcagttcatagctttctgtcatgctctgattctcctttttttgttattctccgagaatgatacggagaagctgcttgtccaacatcaatgtccggttccagggattcaggattacgccttcaatgccgtctgcggtcagcgtcatgcgaaacagctgctcgatatccgtgaggaacgtagacatcacactgccgcttccttttaattgttcttcgaagccggtgaacgccgaccaccattttttcccatcggaggtctgcaccgcctgtaaacgcatagcggttccggcggcctgcatcaccgcttcttgcacatctgcggaaggcggctccactgccacgatgaactgcccctgctcccgcatccgtctgcgcaccactgtcagtgcgtgtgccagaagctcttccgtgggctcctgctgtaatgccagaattgcctcctctattttttcgtttccttgtaaacctttatccttcttctcatccatatcactgatcgtatccttttttatttgtcattatcaggcagctttactgcgtaccccaccacacacatctatgcctatcataccataaaagcttacgcaattccacttacgtttccctcctctcattttccctccgtgcattttagcttcgcgcgctgtcttttccttgacagtaaccacattcattgctaacatgaacctgagcatttcaagctcagaaatgaggaccattatgaacacttttgacccgaagcatagatacagcgatgccgctaaactggctcgtctgaaaaataaaaagcttttcctgttcgacattgacggaacgatcgccgtgggcgataccctgtacgaaggcagtgcggatctgatccgctatatcaatgccatcggtggcagggcttattacattaccaacaattccacgaaaagcggactggactatgtgaagaaattccacgatgcgtttcacctggatagcacagaggatcagttcatcacctccggctatatgacgctgcgttttctgaaggaaaattatgcagagaaaaaaatcttcgtactgggaactgcttccttcatcgccgaactgagaaaaaatggacttcatgtcaccgaggtctgcgaagagaatatcgactgcgtggtggttgcctacgacagtgaattaaattacggcaagcttacggaagtctgcaaagttttattcacccaggacgttcccttctacggcaccaatccggatctgcgctgccccatcgacttcggctttatccccgattgcggtgcgatctgtgatatgatcaccgctaccaccgataaacagcccatttacttgggcaaacccagcaaagaagtcgtaaacttatgcctaaaggtatccggtttcacccccgaggagacactggtagtcggtgaccgtctgtataccgatattgcctgcggcattaacggcggcgtggacacctgtgtactattcaccggcgaggcacaaaaaaaggatattctgactcccgagggggagccgaatacccagtatctgccggactatgcttttgaaaatgtgcaggaactgttagatgcctgcaaagaataaattaagagttactctctaatggatttcttcacgacaccgattcccagcggataaggtccggtgtgtacgccgatggtagcaccgatctggaagatgggaatggtgtcgatgtcgtatcccttctccttcagtctgcttaccagtctgtccctaaactccacggcttcttccttatcgtagccatatcctatacagatactgtaatctgcaatatctgtcttctcctctgccagatatgccagcagcaggtcgatagtcttgtccacggtcttgcggcggcttctgccgataccggacgggaagatttcgccttcctttaaggtgatgataggcttgatgccaagcaggcttcctgctacacttgctactttgccgatgcgtccaccatgctttaagtattccatatttccgaccgtgaaaaagattcttccggagctcttgatctcattcaggcgatcaatgctctcctgatatcctgcacccgcatctctgagccttactgcttccagtacatagattccctgaagaactgtgttcacacaagaatcacagacatagatctgtgattcgggatattcctcttccagaatcgccttcgcattcagcgcggactgcatggagccactgaatttggtcgtaatgcaaatacagataatgggtgtacccgctttgacataaggcagaaatgcatccaggtaatcctgtacggacggcatagaggacttgggatatacatccggatgatccaccattttctgatagaattcacgtacaccgatctctaccatttctttttgatattttccctcttcaaaagatacatagaagggaaccactgtgatattcttctctttggtaagctccaacggaagatcgcaggaaccgtctgatataatatgaaatgcttcgctcattctcgcatacacctttctgcttcttttcaaagtttagcttaccacgttgtagagtaaaaagcaatgcgtttttgactttgcatttcatttcatggtattttaaatctttttatgtagtttttataactatataaaaatttggatagttttccgcgatatttgtcgatgaaaggatgtcaacctttatcagactttcgttgacaataggttcttctcccgatatactaaagttgttaaccattcattcctttggttgacatttttctgcaggaatgacccccctttcattctctgcaaactgacaacagcccggcagaaaacctgccgggctgttgtcaatccttatgcgagcttaagtctttcgaccctgatatcatgctatatggagtaatccagattctccagtctctttttcctacgctctacgagatctgctatagttacgccatctactactttattcacagcattatacagttcctgccatacctccagggtctcacaggtatcgcagcgttcacagatgtccgcaccgtcttccagacaggccaccggtgccaacgatccttccgtcagccgcaggatcattcccaccgtataatctgccgggtcttttgcgatgcggtaaccaccctgtgcaccacggacgctcttcacatatcctgccttattcagcacagcaatgatctgctccagatacttttcggaaatcccctgtctggcagcgatttcttttaccttgatacactctccattgttgttcaatgccagatccagcatgacacgtactgcatatcttcctttggttgaaattttcatcctatcctcatttccgagcatcctcctgctctgtttcacttttcatatcagcctgcttattccaaagcagttcaaaactgctccgatctttctatggtttccacagattctaccctattttttctttatttttctttttcctatagttcatataggatttgtggaaacaacagaaaaatctggagagcatccactcgaatgctgttcggaaaaatctcctcccattcctcggaatgctctccggattttcgcattactttactggcacttcaccttacttgtaagggataacgccaccattataattgtcattgatgaactgcttgatctcatcggacttcagggtatctaccagcgccttgatcttaggcagattctcgttgccttccttaacagcgattacatttacataagtagcggctgcttcggaatcatcgctctcatacagcagagcatcgtctgcaacagtcaggcctgcttccatagcatagttgccgttcaggacaccgaaggatacttccggaagggttctgggaacctgtgctgcttccagctctacgaagctgatgttgtgagggttctcaacgatatccttagtagtagcggtcagacccacaccatccttcagagtgatgtaaccgttatcctgtaacagtaacagagcacgtgcttcattggtggtatcgttgggtactgcgatggttgcattgtcaatgttgtctaagctggtctcggttccgggatacagtccgaagggctcgtaatggataccgccggcatttaccagatgagtacctttctcctcgttgaagctctccagataagggatatgctggaagtagtttgcatcgaaatcaccggactctactactaaattaggctgtacatagtcatcaaaaatctgaatctccagagtataaccctgctccgctaacagaggctttgctgcctccaggatctctgcatgaggtactgcacttgcagctaccttgatagtggtatcggtttcagctacttccttgctttctgttgcctcggtagtctgggcagtggtttcctggttagctgttgttgcagctgcctcgctggtctgagcagctgtttcgttgctgccgcagccggtcagtgcgctcacggacaatgctgcaactgcgatcaaagcaatcactttctttttcataatacttctcctcctaaatcttttggtaaaaaattttagtctattgaatcagatgccttacatctgcctcaatcttttcgttttccctaacgggttctcttatccaatttcttggaaatcgtcattccgatatattgcagcagctgtaccaacagtaccaacaatactactgtcaccagcataatatcggtctggtaacgataataaccgtatcggatcgcaatatcaccgagtccgcctccacctacggcacctgccatagcggagtagcctaagattgttcccagtgcaatggtcgcattcacaagcaatgaggttctggattctgccagcataaccttccagatgatcgtccacaggttagctcccatgctctgtgctgcttcaatcactccgtgatctacctccaacagagaagattccaccattctggcaatgaacggtgccgctgccagagtcagaggaacgatggtagccgtcggaccgtagctctttcctacaatgatacgggtcaaagggatgatcatgatcaacaaaatcaaaaacggaatgcttcgcacaatgttgacgatcacatccagaatcttataaatgatcttgttcggacgcagtcccttcggtgcggtaatcaccagggcaattcccataggaagtccgagtacataccccataaatgtggaaacaagggtcatatacaaagtaacaaaggtgccttccaccagcatcataatcgttgcattatcccacatagtctttcagctcctccacttccagttttctctcctgtaaataatggatcatcttgttcgccgccatttcatcctccggcagctgtaagatcatctgtccatgggcgataccgccgatgtccttggtatccgctaacaggatattaacgggagccttgcactccagcaccatattggcgatcacaggttcaaaagaagaattctcggtgaaaacaatgcggatgcagcgtttgccggacatttcctttgccttgggatccaccatgaacaccagctttcttgcagctgcggactggggtctggagaatacctcctccacagtaccatgctctgccagttctccggcatcgataatggctacatgggaacagatctcctgtaccacagccatctcatgggtaatgatcacgatggtgatgccgtactgtttgttgatgtcctgtaataatttcaggatctccttggtcgtcgtgggatccagcgcactggtcgcctcgtcacacagcaggatcttcggcgtattggcaagagctcttgcgattgccacacgctgcttctgtccaccggagagctgggaaggataagcgtctgccttttccttcagtcctacgatctcgagcagttccatagcacgctttctggctgcctgcttcttcacacccacgatctccatggggaagcatacattgtccagaacacttctctgcatgagcagattaaaatgctgaaagatcatcgcaatgcctgtacgaaccttacgaagttctgcctcggtcagtgtcgaaagatcctgatcttctacgactacggttcccgtggtgggcttctccagatagttcaggcagcgtaccagggtagattttccggcaccactcataccgatgatgccgtagatgtctcccttgttgatatccaggctgataccctttaaggcttctacctgattatctttaccaataaaagtttttgttacattcttgatctgaatgatcggttccataagttcctccattccaggttcgtgcttttaagggaagaaaagcgcaaattccttgaattcctagtaccatgccatacattctaacacaagaatgcaagtctgtccagttctgcaaatttcgtcttaagcttctgcaaacatcggggtggacaggtatctgtcaccagaatcgggaagcaatgctacgactgttttgcctgcattttcagggcgttttgcgatctgtgctgctgcgtacagagctgcgccggaggtgattcctaccaggataccttccttatgagcgatgaggcggccggtggtaaatgcctgatcggtagtaacggtaaagatctcatcataaatgccggtattcagaacggaaggaacgaatcctgcgccgataccctgcagcttatgaggtccgggctgtccgccggaaagtacgggagaatctgcaggctctactgctacgatcttcacattggggttcttggattttaaataagtaccaatgccggtcacggttccgccggtacctacacctgctacgaagatatcaaccttgccatcggtgtcttcccaaatctcaggaccggtggtagctgcatgtgcggcggggttcgcggggttatcaaactgtccgaggatcacggctcccgggatggacttctccagttcttctgccttggcgatggcacccttcatgcccttggcgccttcggtcaataccagctctgcaccgtatgccttcaggaggttacgacgctccacactcatggtctcgggaagggtaagaatggttctgtaacccttggctgcagccacacttgccaggccgataccggtgttgccggaggtgggttcaatgatggtggagccttcttttaaaatacccttcttctcggcatcttcgatcattgccagtgcgattctgtccttaacgcttcctgcgggattgaagtactccagctttgccaacagttctacgccttcgatattctgatccttcgagtagtttgtcacctttaaaaggggtgtatgtccgatcagctgggttgcggatgtgtaaatcttactcataatagaatcctccttaaacttgaaaatggtgtttgtttttaattcctacttatctgatatggatgttatgaatttatactatactattccgctaggaatgtcaaccattattttttaaaatttttgagagttgtgccgtgaaacggaaaatggtatgatttagatagtgagtccgtagccccaacagcaagtaagaaacgcggcacgctcgtactttagtacgatgcgctcatgtcgcagagcgtagcagtacctaagcgtgaaaagtactcacgcaatgcgtcccttgggacgctatggtaccgacgtctgcttacggcctgcttattcttacttgctgtcgtgactactgggttattcattaatcaggaaggaaacaccaatccatggcaaataacatttaccgcgttcctactatatataataaaataagaaaaacaaccgacccgctgacggtccgggtaccgggttctaagagtatcacgaaccgcagtctcctcctggcgatgctggcggagggaaagtccacgctgcgtggggtgttgttctcggatgattcgaggcattttcttaagtgtgtgcaggatctgggatttgagatgacggtggatgaggagagttgtatcgtcacggtagaaggactgggaggaaagcttccctgtgaagaggctgtgttaaatgtgggaagtgcaggaacggcagcgcgttttctgacagctacgttaggtgtctcggaaggtgtttttcacatggattcttcggagcagatgaaaaggcgccccatggatccgcttctgtcctctctggcagaattggggtgtgaggtccgctgcgaaggagaagatgggcattttccttttacgctgaccgctcatgggttcggacaggatcatatctccatcgatatcgggcacagcagtcagtttctgagtgcgctgctgattgcttcgactttgtcttcggaagattttacgattcaggtagagggtacccatgggatggcgtatatcgaaatgacgcagaagatgatggagcagttcggagtctgcgtggagcgtcccatgccggatcagttccgtattcccgccggtcagcattataaagcattagattatcagattgagccggatgtctctgccgcctgttatttctatgcgatggtaccgttactgggaataccggtctgtgtagagcatgtgcattttgaaagtctgcagggagatgtggaattcctgcgtatcttagagaaaatgggatgtaccgcacaggatacggaaaagggagtcctcctgctgcctccttcagctttatcggacgccggaacgcaggctccagctttccatggtatcacggtggacatgtcctcctgttccgatcaggcgatcacactggcagccatcgcaccgtttgccgacagccccacctgtatcacaggcatcgggcacatccgtttccaggagagtgaccgtatccatgccatctgtacagaactgacccatatgggcatccactgcgaagagacgcaggacagcatcaccatctatccggggacgccaaagccttgtaccgtagccacctacgacgaccaccgcatggctatgggttttgccctcaccggtctgcgtgcagagggcatcgtgatcgacgatcccggatgctgccgcaagaccttcgagaattattttgaagtacttgaccaggtgatcgcggagatatcagagggttaggcatataactgaaaaagagagcatccatggctctatatttctgccatggatgctctctcttactttctttgttcagtttatgctgttttcagcaaaaatgtcttagttctcctgaccctttaccgcgaagcatacgccggtgtcatcgggcttgtcctcatcgaacgtatagtccttgccgggcagtactgcattcaggataataccggccagcgcacctactgccagtccggacaggctgatggtgatctcgccgatatggaatgcgatagcgcctgctgcactgtagttgataccgatggacagtaccaggatcagagcggcgatgataacgttacggctcttggtaaagtctacctgagtctctacgatgttacggacaccgactgcagagatcataccgtacagtaccagagatacaccaccgcaggtagcggtaggcatacagccgatcaatgctgctaccttcggagagaaggaaaacagtacagcgaagcctgctgcaatacggataactctggggtcgaataccttggtcagagacagtacaccggtgttctcaccgtaagtggtattcgcaggagcaccgaacagtgatgcaataatggtagccagaccatcacctaacaacgtacgatgcaatccgggttccttgatatagttgataccaacggtggaagaaatagcggagatatctccgatatgctctaccatggtagccagtgcgatcggcataatagtgatcacggaagtaattaacaaagaagtgttgccgtcggacagtgcccaaaaagcggtctcattccagtggataggaagtccgaaccatgcagcttccgcaacgggtgtgaaatccacgcggcctaagatagctgccaacacataagaaccaacaacaccgatgatgatcggaacgatcttcaccattcccttaccccagatattgcagattactaccagtgcaatagcgaccactgcgatcagccagtctgcggaacagttgttgatagcggactgggacagggtcagaccgatggcaatgatgataggtccggttacgatgggcgggaagaaacgcattactttgccggtaccgaagatcttgatcaacagggataataccaggtacagcagacctgcacaggctacaccgaagcaggcataaggaagcaatgcggaattgtccgcaccgtctgccataggtgcgattgcggcataaccgcctaagaaagcaaaggaagaacccaggaatgcgggtacctttctcttggtcagcagatggaacaataaagttcccagacctgcaaataacagtgttgtggaaacatccagacctgtcagcatgggtaccagaatcgtggctccaaacattgcgaacatgtgctgaagtcccagcagaagcatcttgggcacgcccaaggatctggcatcgtaaatgccattttcgccgagtgtagtcttctcgctcatttttctcctcctgtgtcatagacatgtgaacttgtaatatttgccgcatagagataggcagatagtcctctacctgcccacacctatgtgaccttattagttacatgatagcttttcatcgttccacagtcaagaaaaaatttattccactgcatgttctttcaaaaagtccagccagatgggaatatactgggccttcaggtgcactccgtcataagtataggatgccaccattcctccggtctcatcacagatcagcggattcacatccaggtaatatatcttctcatcatccgccagcttcgcgatttcttcattcctggcttcaatgccctcattggtaatatagtctccctgcccggagcgctccgtggtcaccttcatgatcgcctgcaggtagatcaccgcatcgggctgcagctgttgcaaatgctgtactgcctccccgtatgccttcatgaaagattccaccgtaccggttcccatctcgttaataccgatcatcagatagatcttggcaaactgtttctcggatagtgcctcttccaccgtgatctttttcttctgccccggcaccgctactattttcgaatcgaacatcttataaatcgtaagtccggtagaggcataaaatgtggaggtctcttccagtccaccgtattcatacattcccactgtccgggaatccccgataaatacagcatcatcaaaatagctgtcatccaccgtatggtagaccacttcttttggcagttcttccgaaggctctgtcggttgtggttcctccgttgtcattgtctctgtctgcgtatctgccgatgtctctccgactgccggtgtccgactttcccctgtgggatcttctgtgccttccgggaccgtatcccccgatacggttccgtcctgctgtccgggttccgatgtatgacccatccgggcaccgcctgccagctgcacacccctgtgatacaattcccgaaggggatccgtatacacctgccagttgtccgtccatgtaaaaaacaggactcccataagcagcagactgatgggaaaggataattttcttatccattgtcgtagtttctgtaacatatttcctatcctatccagattttctaaaaactaaagtacataaatgggttatttccctctaatataagtctccagacacaataccaaaataccgctgccagcaatattttcatcaggatcttatccttgccgtaatcgtacaacttctcgattgccggcgtacatgccagcccggatacggctaacagcccaccgtaggtagacaatgctttccacgcatcctcatagccgccgctgatccccggtaccagccacatcattttgtccagatagacctgcagctgtgacagatccgtaatagcaaagcacatccagcttacgggaatgatcagccacagataaatgtgcggcagtactttcattttatgtacgaattttaatcttcccagctgccgttccagtacaatgcagatccagagcaatccgccccagcagaaaaagttccagccggcgccatgccagaaagctgtcagcatccataccaccaacagattaaaaatcgtgcaaagttcccctcgtctgctgcctcccagcggaatatagacataccggcagaaccattgccccagtgtcatatgccatctgcggtaaaaatccctgaccccccgggccatataaggtctgcggaaatttctgggcagttcgattcccagcatcctgccaagccccattgccatcaacgaatatcccgagaaatcaaaatagatctccatggaataagcaatggctgccagccatgccagcggagtggagatactctcgaatccggttacctgcacttcatgccacaggatccctacgcggtccgccaacagcactttggctgccagtcctaagacgaacagcttcatgccgtcctccagtccctgcatagtaaaagtcctgttgtacaggctgtctttcacctcaccataacgggtaatggggccggagatcagcttcggaaacatgaccacataagttgcaaattttaaaaaagaatactccctatctgcatctccgcgatatacatcgatcagataagacaatatctgaaaggtataaaaactgatccccagaggaagtcccgcagaacctccccggcacttaaaccagatcagaatgccaatgttaatactcaatgctgtcacgaacaacagcctcttgcgccataacgtcctggggctgcgctttgccagatgcagtccgataaaataattacataaaatggaaatcatcaaaggtgcaagatttcctgcatctcccattgcataaaagacaatgcttcccataagcagtgtcaggtttctgtatttatgcggtgtgattccatagacaatcaggaaaatcggcaggaaccacagcagaaattcaatactgctgaatatcaaataaatcacatctttctattttcgctttacacttgtactatcatagtagcttgaaatgaaatgtattacaacaaaacaattcttaattttaaatgacattattttacaaatcagtaatctttttgcaattatttcaaacatcgtttacaatagttttcatacagacagaatatcgtcaggaaaggatcgttttctatgaaagaacagttatacacaattcccttaaatgatgccgtaaacgcccaggacgaatgtcctttctgcttcatccacagaagtatcgaacaggatctgttagacttcgtcttaggctccggttcctcctacatggaagcggatattagagaacagaccgacaaggccggattctgccgctatcattttcagaagatgttcgactacggcaatactctcggcaacgcctggatcctgaaaacgcactaccagcgtatgatccgggaaatgcagcaggaatttgcttccttccgtcccggaaaaagttctcttctgggaaaattcaaaaaagccgagggcagtgaaaataccatcggtatgtggatccgcgcaaaagaggactcctgctatatctgttcccagtacaaggatacttatgaaagatacctggacacctttttctatctgtggaaaaatgacgaaagtttccggaataagatcataaacggaaaaggcttctgcctgcctcacttcggagacctctgtgaagccgccggccgcaagctctccgataaggaaaagcaggaattctacgactgcctcctgcccgtcatggaagcgaatatgcagcggatctctgaggatgtatcctggctggtggaaaaattcgattaccgaaataaggacgccgactggaagaactccaaagatgccatccagcgcggcatgcagaaattaaaaggcggatatccagcagatcccgcctataagatgtctaaatagttatcattttcttcaaaattatgatgcaaataggatgctatttttctgaaaacgcttcgtcagagggctgtgtggaacgttctgccagccttctgcttaagttcagatactctgtgatctcttcatacaacatctctggctgaaaagcatcctctaaaatcctctcgttcatcagtcccttaatggtcagttccagcattttacgaagtttcacggcatcctctgcggaagcatatttacccagatccgctcttgcgaaaacagactccagataatcttccagctgctgttttctctcttctaccgccagcaatgcttcactgacattttccgtctgcgcccggttcagaaaaggctgcagataaggataaccgcacatggcatgcatttttccacattccacctgctgtagcagagcaaacagatccgtctccttcgcatccaccgccgtagacaactccagcaacaggtaacggacgctgtaatcatagacaaatgcatatacacccagtttgcttccgaaataatggaataacaaacccttgctgatagccgcctccttcacaatatcatccgtacaggcatggcggtaaccgtgcagtgcaaatactttcagtgcggcattgatcatacgatcctgcttttctttttttaaatcaaaaaatttctcattcatatcgcaacatatcccttttcattttacgcaataaggtttatcatataactgtatggacaaatgtataaaattccgaaccgttacatacactacaacatggaaggagcaaccctatggctaaaaaatttggcaaatttctgctgttcactgcagcagtaggtaccgcagccgcagctgcttactactatatgcaacaaaaaaactctctgctgatggaatccaccgacgcagatgacgattacgatgatttccacgaggatctggacgagagcacggagttctcccgcaattacgttcctctgaatgcttccgttccggcttccgctcccacggaagaaaccgctgaaaccgaagcttcctcttcctcctctgatttcacaccgctctccggtcaggcagccgatctgtccggcgaagaaggcgaaaccgtcgaagatgtggaagaatttttcgatgaagaggatgccgaggacgaagagcctcccgtaaccgaagaataatagcagtatcctgagaaggtctcacagccatgcattttgcaaccggcggaggccttctttcatgtctgcctcatccatacttccgaatcccagcagcactgtcgctttgtccgcagcggatgccaccatattctctgacatcccataaaccttcacattttccgccgcagcggcatccagaagctctttttccgtcacatttcctttcgccgtcaacagcagatgcagcccagcatcttccccggagatccggaattttttttgaaaaggctccagtccctctaacagctggtcgtgtttggcacgataacgcatccgcatcttgttcagatgcctttcgaaataaccgtcccggataaactcattcaggattcgctggtcgattctggataccgtacaagaatagaaagaacaatccctgcggtacacctccaacagtgtctccggcaacaccatatagctgacacggatcgccggtgcgatcgccttggaaaaagtaccgatgtagatcacctttcccctatcgtccgaggactgcagggacggaatcggtttgccgcgataccggaattcactgtcgtaatcatcttcgatcagatagcggtccggctttttctccgcccagcgcaacagctctgcccgccggccgatcgtcatcaccgctccggtagggtactgatgggagggcatgacataggccaccctgaccggttcctgttccagtctgtccgcacgcattcccttatcatccatatccaccgtcacaatatgataggcgaatgaccggaagatacggtacgcacgtttatacgtaggattctccatggcaattcccacatgtctccccaatattttctccaacagtaacagcagataatcatttcccgcgcccacaatgatctgctccggacggcagttcacccctcgggaagaatgcaggtaacggctgatcgtcagtctcagatcataatccccctgcgcctctccctgggcaaacagttcactgttactgtcattcaggatatttttcgtaatccgtttccagacaccgaaagggaaaccgttcatatcgattccatagggggaaaagtcaatccttttttcctcgtcccggtcttctgcctgtggatcccatgcctccggttccggcaccctgccagtttcctgctccagagtgaagattccctccaatttgcatacaaagtatcccttatagggtctcgcctcgatatatccttcacttaacagctggtcataagcataatccaccgtactcctggccacctgcagatattctgccaaagaacgcgtggagggaagcctctctcctgccagaagcttcccttccctgatttcctgtcgtatatgctcatatatctgctggtacagacatttgtcactgtctgtacgcagccggatcgtcatatcatacataatgttgtcctactttttctgactcttcagttcctccaggatctggtctttcaactctcttgccttgtccttggtacgggcattggccgatggagatgtgaggattgaagccaccatacggcttgccacatcgtatttctgaaatctggtggccaatactccgatcaggaactccaccgtaatttcatccataccgcacatgggaaatccttcggtctgaagtgcttccgtgaagccggtataagcattcttcagataggcctcttccatgtttttcacttcccggagacgggccatgtccgtatctccggattcttccagatattcctgatatcctctcatgagccatccgctctttaagcagatataagccttctcgctggcatgggcacgttttaccaccgcatttgcgaggcacagcttatagcgttcgatcgcctcttcataggtatagatatcgtcatcataggtgtgcagctgtactttgctgctgatattctctttgatcagtttggcatataccttggtaatgttgttgaaatatctgttcaacgccgcatatccgcaatggggacacaggatcacatcatattttaccgcatcgattccttcgtattttgcacgaagatcctgatccgtgcctaaaagtctcgccttgccggtcttcatgatcttggcgggaaaatcttctccgcataccgggcaggtgaaattcttgtcgtagatcaggtccttttcttctatcttaggtgcctcggccgctgcctgttcttcctttttctcctgtccgaagatatccatatcctccaggttatccaggcccagtccggccagcccacacaatttgtctgacattcttttgtctcttcctttccaaacttacttaggcagtacataagagctcttcagagatacgatacggttaaataccggttctccgggtttggtgtctttgcagtccacgcagaagaagccctgtctcacgaactggaagcggtcgtacgcctgtgcctttgcaaatgcaggctctaagcggcactctgtcagagtggtcagggaattcgggttcagattcagacttccgtcctcgttgtatacccccttctcctcatcaata

SEQ ID NO: 11385 - DNA, 109125 bp, Unknown
  gut microbiota DNA sequence
ggaaagctgatcgctttccttttttcttcctataaacctataagggtttgacataataaaaagaactttttctttcaaatcctatctcacgataattcatgatctgttccgtacttccgataaaaagcattccaccctttgccagggaatgataatacttccggaatacttcatcttttgcttcctctgtaaaatagatcagaacatttctgcacacgatcagatgatattctgtcggataagcatccttcaacagattatgttgatgaaaatcaactcttgccttaatctcatccgcaatcttataagagggaccgatcttcgtgaaatatttcttctttagatcttccggtacaccttctatgctcttctcattgtacaatccagtctttgcctttgcaatcacctgcttgtccagatcagtagcatagatatggatctgttgtaacggaacatgccgtgacaaagccataaccagtgagtacggctcatctcccgtagaacaggcagcgctccagatttttaaattcttaccaaagcgctgaatcagttccgggataactgtctcatccagatatttccactgttcgggattacgatagaactccgatacattgatggtaatataccctacaaattcctcgaaaagttctctatccgtcttcagtgcctgtacatacttatcatatcctacgatcttgtgttttgcgatcagagtatcgatacgccgcttcatctgcttctctttataagcattcagatcgatcgtagtcagagaatatatctcctttttaaaatactcataatcatatatcatgaatatcaaccacccagctgttaattattcctcagtattctcagcctctgcagcgatcacagcatcgatatctacagatacaacatctgcatcagactcttcctctgcctctgcaggttcgggagctgtcagagcctttacgctcagggagatcttgtgatcagcctcattgaaatctacaaccttagctgtaacttcatcgccaacgctcagtacatcggaaggtttctcaatgtgctcctttgcgatctgggatacatgaagcagagcatctacaccgggctctaattctacgaaagcaccaaagtcagtcattcttgcaaccttaccggttactacattgccgacagcatacttctgtgcagcatccttccaggggttagcatcgtcaaacttcagagacagtgcgatcttattgccgttgatctctttgatcaggactttcagcttatcgccaaccttgaataccttcttgggatgttcaactctgccccaggacatctcggagatgtgaagcagtccgtctgcgccgccaagatcgataaatgcgccgaaatcagttacgttcttaacaacgccttctacgatatcgccttctttgatcttctcaaagagttccttctgcaactcagccttcttggctacgatcagctgtttacggtcgccgatatatcttcttctcttgggattgtactcgctgatcacgaattcaatctcctgtcctgcatacttggtcagatccttctcataagtatcggataccaggcttgcggggatgaagattcttacttcgtccacaattacgcttaaaccaccgtccagtacctgagatacggttgccttaagtacttcgtgattgttaaatgcttcttcgattctcttgttgcctctgtctgcagcaagacgcttgtaggtaaggagaacctgaccctcaccgtcatttactttcagaaccttgacttccatggtgtcaccaaccttggcaactgtggtaagatccacgctggagtcgttggtatattcgttcttggtaagaataccgtcagatttatatccgatgttcagaatgatctcttccggtttcacatcgatgactgtaccttcgactacctctcctgcatgtattgtctttaatgattcttccagcatttgttcaaaagttaattctgacataattttgaacctcctcaattaatttatttggggtggaagcccccgcggtaatacccactagtcgaacagctttaggtagatctaaatgcaagtcatccagtgtctgtataaaataggtgtgctcacattccctttggcagatttcgtaaagctttctgctgttggaactgtgcttccctcctattacaatcataacgtcagcatccgctgcaatggtctttgccgatcgctgtcgctcttctgtagcattacagatagtgttcacaacactatcattgtaaccttttttttcaaaaatttcaactatatattgaaatttattgtagttatatgtcgtctgagagacaatgcagagtttttcgccttctgtttttacaaaattttctgcctgatccggagtctccagaacggtaacgggtcccggacaccagccgacgatcccctctacttccgggtgcttcggatctcccacaacgatcacatgatacccctcgttactttttagttccacgatacgatggatctttttcacaaaaggacaggtggcatcaatgcattccagaccgtttgcctccatgatgtcatagatctcttttgccacaccgtgagcacggatgatcactgtgggaatgttctccccggctttcagttgtttcagatcctctttgttctccagaacccgtacacccttttccgacagttctctgaccacttcctcgttgtgtacaatgggaccataggtatatatagtcttcccgttttttaattgttcatacacggtatccacggcacgctttacaccaaagcaaaagcctgcacagtctgccagtcttacttccatatatcgtctcccatttagccaatcagtgccacgatccggtcaatgacctgttcaatggtcatatcggaggtatccacaagtaccgcatcctccgcctgctttaacggagaagtctctctgtgcatatctctgtaatctctgtcctcgatatcctgacggatcttttctaagtcgcaggactcacccttggcagtcagctcgtcatatcttctttttgctctcaccatactgctggcggtcagatagattttgacctgtgcatggggtaatactacggtaccgatatcacggccgtccatgatcacatcgcttttcgctgccagtgcctgctggagttctaccagtttggtacgtaccgccggctgtgcgctggtggtggaagccatgttgccaacctcctcggtacgcagataagcattgacgttttcaccgtttaataatacgacctgttctccgtccacatattgaatggtgatatctgcctccttacatttatcggcgatcgctgccgcatccgtaggatccacaccctctcttaacatgaacagtgccatggcgcggtacattgctccggtatccacatagataaagcccttcttttttgccactgctctggcaatcgtgcttttaccggcacctgccggtccgtcaatagctacattaaagctcatattcatatcctcttttcttcgtattttctttatgattctatttttcaaaaaaattattgtatgctttctcccgccaaatgtcccgtagaccaggcaatctgtaagttaaagccaccggtcatggcatccagattcagtacttcccccgcaaaatacagatgctttaccagcctggattccatggtggaaggattgatgtcttttacagagattccgccctgggtaatgattgcttccgcaaaagatctcgtccccgttaccgtcatgggcagtgccttgatcagcatgccgaaagcttttctctcttccctgctgatctcgttgaccttcttctccggagagattcctgacagctctatcataacagggatcagcttcgcagggaacagatgatccagtgcatttttaaactgtttattcttcgcttcctcaaaatcccgaagcagccgtttatccaactgttccggtgtcagtgcgggtttcagatccaggaaaagctttacttcatcgtcacctttttgtctggaaatatttttggaataaaagctgctggcggacaagatcaacggcccgctgacgccaaaatgggtaaacagcatctctccgaagccttcgtaccaggtcttctttccacattgcatccggatctccacatttttaagagataatcccatcagtgctttgcaccagctctcgcggatctctaacggtaccaatgcgggccttcgctccgttactttatgccccgtctcttctgcgaaccggtaaccgtctccggtggatccggtagcggcataggagcagccacctgtacagataatgcaggcatcggcggtcaacttcttatgatccgtacattccactccgtaaaagcaaatattgtcgtcactttccttcgtcaggatctttttcacttctgtgtgcagatgaatatccacatgatatttatgcaattctctctgcagggcggcgatcacatccgaagaatgatcggataccggaaataccctgtcgccccgctctgttttcaggggacatcccgcctgttcgatcagatcacacacctgtgtattgtcaaagctgtaaaaagcactgtacaggaatttttcattggtgcagacattttggaacagcacatccatatccgctccattggtcacattacaacggccttttcccgtaataaacagctttttcccaagcttttcatttttttccaaaagggttacgttatgtccgcattttgctgccgctatggcagccatcatgccggcagccccgccgccgaccactatcacattgctcattctcatccttttctgccgacatatcgacgtcactgctccttgcgtcgcagagaataatctaacatcggttcatcatctataaaatctatctcgtcattcagatacacctgataattgttccaggtctcttccagtgtctccagattcttacgcacctgctccggacatttcaggcaaagtgctaccaccagcgcattgatcacactaagaggtgccaccagagaatccaccaccgacaccatgtcacttctcgccagcagattgcaggaagaatacagattcatgggggaatggatactgtcggtaatggcgatcactttagcattccggtcattggcgaactccattgcctttaacgtccgcatagaatatctcggaaaactgatgccgataaagcaatccttcggtcctatatggatcatctgttcaaaggtctcgctgacactggtagtgttcagtaaaaatacctttccgcggatcatgttcaggtaaaaatgcaaaaacgccgccaatggctcattgctgcggagtcccatgatatagatggtctccgcttctaagatcgtagctactgccgattcaaacgccgccggatccagattatctatagtatcctgaatcttctcgatatctgccgtgagaacagaggtcaggatctccgactgagaacttcttccatattttgcatccattttctggataccatttagtttaccctgtacacagctttccaatgccttctgaaatttcgggtacccatcataaccgatccctgcggcaaaacgaaccacggtagattcactgattcccagtgtttctcctaatttagctgccgtcatgaataccgcctggtcaaaatgttccgatatatagtccgcaatggctttatgccccttgctcatcttcgcatagtgttcatttatccgggtaaaaacatcatattctgccactgttcttaacctcgcattgtctcattgtaaaaagcatagtaggaatgttccaaaagctgcatcgtctgctgatctgtcagatcataatctccggtcagagacatgcaggcggctccatgaataaaaatccacattttcataaacagatctccgggatccgggcatcctgccactctcgccagattgatctcatagactacatttccggcatcaccgttcaagatctcatacatgcttttcgtcttatgcttactgccctggtcaccggatacaaacagaagttcaaacaggtgtctttcttcccgtgcaaaagctatgtatgccattcctaagttggaaaaaggtgtcttcccggtgcggggatacaggctgtaataatccagaaaatacgccgttgctctctcatagaccgcatcccacagttcttccatattcttatatactctgaaaataggctgcgtggaacatcctgccttcgccgcaacttttctcgcagtcacattggcaaagccttcctctctggtcatggcgaatgccgtatccaggatcctgtcaatcgtgatcatctctttacgagccataatccctctcattccgctgtatttacagcaaacaatgtgtccttctataacacttgttattttagtgggtgaagaggtggtttgtcaatatgtaaataactcattcgcaatccgggttatcgccctacttgcttcgctggttctttgtctaaataacagtttctccgtgcttcgcactcccgaaactgcaaaaccacattcgcaatccgggctatcgccctacttgctcatgtggttttgtttttctaataaagacaccgcactggctgcaagcagccgtgcggtgtctttattgaaaaattatttagacagggtatgcaccgtttttggtgtcagcctgggtcatatcaaccttttcctgctgtgcctgacgatacttgaagaagtcggtagcaacctgagggaacagagcgtagcttaatacgtcctcatcctgctgtttccattccttcatttcgccttccagcttatccatctcgttgtcaagcagatcagcgtaacggcaggtgattctctcctcaccggggataaccttgtcgataacttcctggctcatgggcttaacggtctggccgtactcaccacgcagcactgccttggtctccttggtagccatcttataacgctcaccaagcagtacgttgaagactgcctgcgtaccaacgatctgagaagaaggagtaaccagagggggctcacccagatctttacgaaccttggggatctccttcagtacatcatagtatctgtcttctgcattctgctccttcagctggctcaccatgttggagagcataccgccgggtacctgatacagcagagtcttaatatcaacacccataaccttgggattcagcaggccgttagccaggcactcatctctgtaaggtctgaagtaatcagcgatctcagccaacaggttctgatccagaccggtatcgtaaggggttcccttgaaggtctcaaccataacctcggtagcaggctgtgaagtacccatagcaaaggggctcatagcggtatcgatcacatcaacgccggcctctactgccttcaggtaagtcatgcttgcaacaccggaagtatagtgggtatgcagctggatgggaagcttggtaacttccttcatagccttgatcagttcagcagccttataaggtactaacagaccagccatatccttgatacagatggaatctgctcccatctcttcgatcttcttagccatgccggtccagtactctaaggtgtaagcatcgcccagggtgtaagccagagcaacctgtgcttcacctctgccttcctgtgccttgaacttattggtagcatttactgcttcctgtaagttacgcaggtcattcagacagtcgaaaatacgaatgatatcaataccgttggagatagacttctgtacgaagtaatctaccacgtcatctgcataaggtctgtaacctaaaatgttctgtccacggaacagcatctgtaacttggtgttcttgaagccgtcacgcagctttctcagtctgtcccagggatcttccttcaggaaacgaagggatgcatcaaaggtagcaccgccccagcactctacggaatgataaccaactttatccatcttatctacgataggaagcatgaattcggtcggcattctggtagcgatcagagactgatgtgcatcacgtaaaacagtttccgtaatcttaatcggtttcttttcaatttctgacattacgaatatcctccataatataattttcttttaattagctttaaaatactccgaaaattgccatgaatgtaccggctgctacggcagtaccgataacaccggctacgttaggtcccatagcatgcatgagcaggaagttggtaggatcggattctgcaccaaccttctgggatacacgggctgccataggaactgcggatacacctgcagaaccgatcagaggattgatcttgccgccggacagtacgcacatcagtttaccgaacagaacacctgcggcggtaccgaacatgaaggcgatcagacccagagctacgatcttcagtgtatcagcattcaggaatgcttctgcactggtggtagcacctacggaagtacctaacagaataaccacgatgtacatcagagcattggatgctgtctcagtcagctgacgaacaacaccggactcacggaacaggttacctaacatcagcatacctaccagaggagctgtggtgggaaggatcagacatacaacgatggtaacaacgatggggaacaggatcttctccagcttggataccggacgaagctgacccatcttgatctttctctccttctcagtggtgagaagcttcataatagggggctggataatgggaaccagtgacatataggaatatgctgccaccgcgataggtcccaaaattgccgtctgtcccagcttaccagcaaggaagatggatgtaggaccgtcagcaccaccgatgatggagatggctgcagctgccttgtcgttgaatcccagccagatcgcaccgaagtatgctgcgaaaataccgaactgcgcagctgctcccaaaagaaagctcttagggtttgcgatcagaggaccaaagtctgtcatggcacctacgcccatgaagatcagggacggcaggattgccagttcatccagcttgtagaaataatacagtaagccgccggcaccgtttgctgcattttcagggtgcagcatgatatcggggtaaatatttaccaacagcataccgaacgctatcgggagtaagagcaacggctcaaactcatgacggatagctaaataaaggaaaaagcatgcaaccagaatcatgacatagtttccccaggtcaggttaaaaaacgctgtctgatgaatcaggttgttaagcgtactagctatatattccatttgatgacctcctgttgtttatagagctgataaaaaaattagttcagagttgccagaactgcaccagcctcaacagtatcaccaactgcaacgtcaatgcttgccacggtaccgtcttcgggagctacaacagggatttccatcttcatagcttccagaatgatgactgcgtcacccttcttaacagcctgtccaacatttgcctctaccttgaagatcttaccggctgcaccggcctcaaccttgatgctgcctgctgcgccgcctgccttgggtgctgctgcgggagccttgggtgctgccttgggagcagcgggagcctttgctgctacgggtgctccggtagatgcgccctcttctactactacatcatatacgttgccatttacggtaatggtataatttttcattttaatatcctcctacgattttagattatctaactttgcggatagaacgaactacaaatccgtcagtgcttgccgcgccttcgtttgctgcgatcgcagctgcgattacggctaccagctcagtgtcatctgcttcggcttcttcctgtgcagcgatctgagttactgcattatcaatacctgcgttctttgtctcttccttcttgccctttttgctgaatgcagcctggatcctgggaatgaagttgaacagggaaatgatcagcgagatcatgatcagcattacgaatacagttcccataccgatcagagtattcagtgcagccttggtcatcagaccacccatagattcaacgggattcaatgctgcggactccatgctcaggaacatatcattgctgaagatcacttctgcctgtgcgttctggtttgctccggtcacatctacatgtacaatgatctgatcatcatcgatggtagcatctgcatcaccgacagcagtgataccgccgatggttttcttcgcggaattgaaagactcgatagcagtcttgtatgcataaccgtcaacggtgatacctacattttcctgtaccatgtatgccacttcatcagcggtatactcggaaaagctctcaagagtagcttcgtcttcaaagttctcaagagaagggatcacatactgggtagcgatctggatcgcagtatccatcttacgctgctcgtaatccgtataggtctcctcactgccgcacgccgtcaaaccaaagatgcaggtaatcatacatactaagcttaaaaatttcttcattttataatcaccctttcttatacagttccgtgtttcttggcaggacggtcttcacttttggtgaataacatctcaaatgcgccgatcacatattttctggtatcagctgcatttacgatctggtccacatatcctctcttggctgcactggttacattcagagtcagagcctcgtactctgcagccttctcattgatcacatcagcgccctgaccatcatacatgatcttggcagcaagcttgccatccatagcaccgatctgtgcatccggccatgccatagtgatgtcagcaccgattgccttggagttcattactacataagcggttcctaaagccttgccgatcacaacgtttaccttgggaacggtagcgttagcgaatgcgtaggtcagctttgcagcagccttggcgatggtcttctcggaagctaaagttgcctcataacccttgacattggtcagagtcagtacggggataccgaaagcatcacagaagttcacgaactctgcagccttctcgcagccttctgcggtcagcacagcgtctaacttctctgctactttgccttcctcatcgcagatctcggaacggttagctaccgcacctacggtaacaccatcgagacgtaagaacccggttaccatatttttagcatatccggactttacttcgaagaaattgttgtcatctgccagaatggacagagcaacggatgtgtcgccgacacagcccgcgatctcagggttcacacgattcagatcatcggtgcagtcctctaagaagcttgcatcatcttcgttgttggcaggcaggaagcttaccagctctcttaccttctccagaatggttgcttcatcagctaccacatcaacgataccgctctcttcagcctggaacttagcggaagaagaatcacacttggtgatcacattgccgtccaaagcattgggagcattcacgaacagtttggcgttcttctcttccatgaaagtgaaatccgtcatggtagggaacaggcccaggccgccgccacaggttccgaatacagcggtgatctgagggatcacgccggaagccatggtctgctttaagtaaatctcaccgaatgcagccagtgcatcggttgcctcctgcagtcttaaaccggcagactcgatcagtccgatcacaggtgctccggtcttcatagccagatcgtagaggtttgtaattttcttggcatgcatctcaccgatggttccgttcagtacggaagcatcctggctatatacatatacaagattaccattgatcactccatagccggtaatacaaccgtcagaaggagtttcattgggtttcagattgaaatccgtagctcttgcggttacaagtccgccgatttcaacgaaactgttgtcatcgagtaaagctgctattctttgactcgcttttgaagtagtgctcatatgtttcagccctccgttgataatataataaaataaagataaaaaactctattaatatagaagcacaaatgcccccatgattaacagtcgttagtataacataaaatctgcaactcgcaaagaacgaattgcagatttttacaaaaaatatacattgttttttattttgaacaatatccccttcattttttcatagggatctcaccaaaaaacgcaaaaggatctgcctgcagcaccatacgaagtctatggcttccacatcctttgctgcgatcagacgctctctgcgccataccctgccgtctaccaaatagctgatctctcccacgcactctcctgcctccacgggagccgtaaggtactgttccttacgatagaggatctccacattctcgtcagggcccattaaaagtccctccactccttccgtctccggatccagttccacaggcagcagtacctcctctgtcagtgcatcattctgtgcccgcagcaccggaatcgacataagcagctgttctctgcccgaaaacgtttcttctccaaagcttcgatatgtaaagttctccaatccataggtaaacaattccctgctgtcgctccatttataggtcctgtgattcggccatccgcaggcaagcagcgccacgatcagacatttcccgtcccgtttcagggctcccacatagcagtatcccgccttgtttgtaaatccggtcttgccggtaaacgctccgtccatcatctgcagaaaagcgttgtgattgtgacactgaaaggagcgtccgttctccgtaaaactgtaatcctgcgtccctgtgatctctaaaaacagatctctctgtggggaagctttcatgcagtacctgaggatctccgccagatcttttgctgtggtatggtgttccctctctaatacacttccgtccggcagtgtcagagtctccgtggcatccagcccgtttggtgtgatgaaccaagtatcttcgcagccgatctcttccgccttttcattcattgcctgcgcaaatctatgtaatgccgccttgctctcttcgccggtatgttctgagatctcccccgtctctcccaacagttttccaccgatgtattcccccagtaccacagcagcatcgttatggctttccagcatcagggagaacaataattctctcacggtatagtgttctccgcgtttcacatacagctttaccttgggcatggttgccgcataggcagagacgctgacggtttcatccacctttgcattttccagcactaaaatacaggtcatgatcttggtggtacttgccatagccatgggaatagtttcattttttccgtaaagcacgcgtccggaatccgcatccagaagcactgctccctgtgcatacagcttaatctcctgttgtagatcggatttcccggtctcataccggatcgcgtatgtcggttcgttgtctgttatcctatcttcacggaattgtgatccgcacagactttccagacatataattcccgcaaaaagggcacaaaaaaagcctcgcataatcgttgctcccaaaaagggttacttattactatgaggccggttctttgtcctattctctgtttatatattcaaagtaagctgtacttcctgttccgcctgctgcttaaattcctccacctgcaccggattcagttccggcagttcttccagactcttcacgccaaagcagcgtaaaaactgctccgtggtaccaaacagcaagggtcttccgggagcatccagacgtcccagttccgtgatcaggtcgtattccaacaatttgttaatagcatggtcacagctgacgcctctgactctctcgatctcaagtctcgttaccggctgcttataggcaataatggacaatgtctccagcacggtatccgtcagagtcattttcctcggagtcttcgcgatcttgatcagatattcgtacatatccgccttggtgcacagctgtacggaatcgtcgaactgtgtcagaccgatacctctgttctcttcctcgtaccgcgccgccatgtcttttaatatagactttgtcgtcttcacatcctcttcgatcacttccgcaagtctgctgatctccacggaatctcccatggtaaaaaggatagcctctatcactgcttctgctttactgcgttccattctaaaacctcactgtatcctaaacgttagatgtaatcataatatcatcgaatatattttcctggctgatgttgatcttgccggtcttcatcagttccagaatgatcagaaatgtaacgatcacttccattttgctgttctgcttctccaaaagcttacggaagctgaaggtcttatgttctctggcataagcctccacatacagcatcttgatgtccatatctacctcatccttctcgatattgccatactggctgcggacggggtcgatcttgtcctcctgcttctttacgatggatctgaagatctcatgaagcttgttcagattcatatcgccgatgagttcttcgtaatctatgggctgtctgtaagcttccacttccttcggaagtctctgctctctgtacatgttcctggcagcatccacctgacggtctctgagttcaaaggacatgtatttgtacatcttgtattccaacagcttctgaaccagttctgctctgggatcctcttcctcgccgtcctcgttcacttccttgggcagcagcatcttgcacttgatgtcgatcagcgtcgccgccatcaccaggaattcactcatgacattcatgtcttcccgctgcatctgcctgatgtaatccagatactgcgccgtaatctctacgatagggatatcatagatgtctattttatttttttcgatcaaatgaagcagcagatccagtggaccttcaaacgcttccagttttacagatattgccatttgataaaactcctatttcccctcgtccggcataagctccacttctaagatctcgcccggattgaacagccggatcgggatcgtgtgcattcccagtcctctgcttaagagcattctgctcttccctatggtaaactctccgccatcgtattttggaaaaagtctcacattgggagacaccacaccctttccccaaaaaggaactctcaccatgccgccgtggacatgaccggataacaccaggtctgcaccccagtctgcgtatttcggaaaataatccgggtcgtgggcgatcaatatattgaaatattcttcggagggctgtcctaaaatccccggcagatattccggatccatgggctgtatcccaaaacgtttgtagtacagcctgtctatctcagaaccatagatgcggatcccgtattccggaagatccttatgctcgttgacaagcctgtgaataccgatcttcgtaagagcttcttcataccgtcccgccatatccccataattttcaggatacagcttcaggcggtgttcatggttgccgttgccgtaatagacaggatacttctttgcaagctccgtaagaaatcccaccgccacatccagtgttgccttcggcttcgccgtcagcatatccccggcgatcaggatcatgtccggtccgatctcatcgatcgcctgcagcagtctctcattttcttttccgtatctcttattgtgcagatccgccagaaccaccgccttcacagactttttgattctctgatcccgcaggggataatgccgcaccacaaagcggttactgtcgtacagcattatccacagcattatcacaaggattactgcgatcacggtaatcactacatccaactcttttgcccccatggtatgttgccagattattgccaatttgttctatagtataacatattattttgtcttacaaaagataaaattccattatttttcgcagataatccttataaaccgccttcgccaccgcattttcatacagaatcggcacactgccgatctccacgccgttcagcagatagaccgccctgcctgccgtatctccttccgcaaaaggtgctatggcagtctccggcagttcaattttcttctccacgccgtccagggaatttccctccgtatccagataccggaattcactttggtatttgactggcaccgtatcctctacgccgccctgcacccgcatattctgcaggggatctgtattctcatccagatacagatcgcttatattaaaaccgtagctaagcaatgtccgggcgtccttaaaacgtgccttatagtccggtgcccccatgatcaccgcgatcagatcaatgccatccttcgttgccgtggcggacagacagaattttgctttggaagtggatccggttttcaatcccgtagtaaacggatactgtttcagcaatttattggtactgtttaacgtgaattttgagcttccctgactggtctcatgggtgatgtcctccatccagatacctgtatattcaaatattttcggatattttaccgtaagctccctcgacatgaccgctacgtccattgccgtcgtataatggccgtcggaatccgtcaggccacagcagtcctcgaaatgagtatccgtcatgccaagctccgacgccttcgcattcatctgttccacgaaagcttcttcgcttcccgctatgtattccgccaccgccacgctggcatcattgcccgaagctacagcgatacatttgatcagggtctctaaggtctgcacctcattttctgccaagaacacctgagaacctcccatggaactggcataggcgctcaccgttaccggatcctctaatttgatttttccctgatccagagcttcaaaagtcaaaagcaatgtcatgatcttggtaatgctggcagggcttcggcgttctcttgcattctgctcaaagatcaccttcccggtggagctctccagaagcaccgcactgggagcttcgattgctgccggttctgcacatacattgattccgttccaccagaatacctgcatactgatgctgaatagcaagatccccgtgcaaatatatttcctgattttttgcataaaaaagccacactcccctatccttttctaaaagatatggtcgtgtggtcctatatatacctgtaaacctgatgttttacgtcttaccatctggcgatcaatgcctggcagcgttccttcagtgcttctcccttactgcggacatcgatgtcgaataccttgatcagttgtaccgtataatcaatcgccacaagcaacagaatgccctggatcaggcgggttcctatctgcagctgcaccttatcgatgatatgatacatggcatcatggacaaactgcacgattcctatcgcataaaatccccaggcaacggtactctcgaggcaaatgatcccccgataattgaagggcttattattataatcccaccataattctcccaggaaacggatcataccgacccctaccagatattcaaaggccgttgccaggatagctcccagaaaatataattccacaagcttatcacgcagcggacttaagatcagataccccagcactccgccaaaaccatagatcgggcaaaacggtcccttgccgaatccccggttggtaagcttgcgattacaaaatgacatatacgtagactccagtgcccatccgagaacactgtacaatacaaatgctgctaacagatgatagatatctgttcccagtatttcataactccacatttgatcttcctcacaagtacaaagtccccggtgatcacgccgaggactgttgtttaacattagttatatttacgttttcttgctgcttcagacttcttcttacgttttacgctaggcttctcgtaatgctctctcttacgaatctcctgctggataccagccttagcgcagcttctcttgaaacgacgtaaagcgctatctaaagtctcgttctcttttacgattacgtttgacatcttacacccgacctcccttcagtcccttcaagtaacatgactgactgggttattctaatgcgcagttgttctacacacatttgatattatagcataaaaaatgtattcgtcaactacttttttaattttttatatataatattccacgtagttcacacaagaataagaaccgcagacccgctttcgcttcggacgcttaaccgtaacggtacataagcgaggaaaataccctcgctaagtaccgacggttgcttagagtctgcttgtccttattcttatgtgagctactggatcttcaaaatcttatttaaaaaacttatcgtatataccgaacaggaagatgaagatcacgatcaggggcagtccgtaggtcagataaccgcgcatccagtcgtggacttttaaacccttgccggtatttacttctgccttatagttctcccatccccagccgtatctggtcacgcagaacagcaggtataccagggatcctaagggaaggaacagattacttaccaggaaatcttcaaaatccagtaccgctccgccgaagacagcaaaaccatcccagctccacacattataccccagtacgcagggcacggacaatgcaatgatcaggaacaggttcaccagggaagatttcctgcggctggcaccggtcagttccatgccacagcagatgatattctcgaacacagccagcaccgtggacaatgctgcgaacgccataaacaggaagaataaactcccccacaggcggccgtaaggcatattggcgaaaatattcggcagggtaatgaagatcaggctcggtcctgaggtctgatccaccccataggtaaagcaggcggggaaaatgatcagtcctgcggtaattgccacgaaagtatccagtaccacaactctgacggactctcccatcagagaatgatccttgccgatgtagcttccaaagatcgccatggcaccaatgcctaagcttaaggtaaagaacgcctgattcatagcacctaccagtgtagataccacaccgacctcctgcatacgtccaaaatcaggcaccagatagaacttcagaccttcctttgctcccgtcatgaagaagctgttgatggcaagtactaccataatggcaagcagtgcgatcatcatgactttcgtcacgcgctccagaccgttctgcagtccaccggcacacacaacgataccgatgatcaccaccagtaccatccagaacatcatgacccccggatctgccagcatccgggtaaactcttccgctaccgcatccgcggaaagcccggaaagtttaccggcagccgtcatataaaaatagtgtaacatccagcctgccaccgttgtgtagaacatcatcagcagatagcagcctgccagtgtaaaatatccgtggatatgccacttctgtccaggcttctccagtgcctggtaagcctttacgggacttttcttacttgctcttcccacagcgaactccatggtcataatcggcagaccaaggatcaccaggaagatcagataaaatagtacaaatgcgccaccgccgccctgaccggccatgtacgggaacttccatacattcccgataccaatggcacagccggcagacaacagtataaagcctaaacgggatttcagattctctcgttccattatgcgagctgaccctccagtactttggacgcttccgcgatcgctgcgggaatgcctgcgggattcttaccgccggcctgcgccatattcgggcgtccaccgccgccaccgcctaccagcgcggcaattcccttgatcaggttgcccgcatgggcgccggcctttacagcaccgtccgttgccatagcgatcatatttaccttaccgtcctgtgcggaaagcagtacaacaacgccttcgccaagcttatccttgagctggtcgcccaggtctctcaagccattcatatccacaccgtctacgctggttgccagaagtttcgtacccttcacttccaccacctgatcgagtacatcgcccaatgcagattgtgccatctttgccttcagggattcattctctgcattcagtgccttcagctctgcctgcatatgctggatcttctcggtcagggctgcaggagttgccttggctgctgcagctgccttattgaagctctcttccattgcctgatagtatgccatgacattggcaccggtcagtgcttcaattcttctgacgccggctgcaacaccgctctcggacaggatcttgaaatagccgatctctccggtgtgctttacatgggtaccaccgcacagttccctggagaaatctcccatagataccacgcggacggtctcaccgtatttttcaccaaacagagccatagctccgctcttcttcgcatcttcgatgttcatgacatcggtaacgactgcaatatcctctgcgatcttctcattgaccagagcctctaccttcgcaagctcttccgcagtcatagcctgtccgtggctgaagtcgaaacgggttcttgcgccgtcctggtaggaaccctgctgttctacatgatcacccagtacgatctgcagtgccttctgtaacagatgggttgcggagtggttcttgcagacactctttctattgtcggtatctacagcaagctctgcagtatcatttacggatacgctgccggatacgaccttacccacatgtccgatacgtccgcctgcgatcttcacggtctcagtcacttcaaaagtaccgttttttgtgcggatcacaccaaagtcacccttctgtccgcccatggtagcatagaacggagtcacatccgtgatcagggtaccggtctctccctcatttaaggtattcaccagttcggtctcggatgccagtcctgctactttaccttctgcggtcagcgcatcataacctacaaattcgctggtgatcttatcatccagtccatcgaatacacctgctgcagtagtcagcttctgggagaagttctgtccttctcttgccttctgcttctgctcttccatggcaacggcgaagccttcctcatctacagtcaggttctcttcctgtgccagctctacggtcagctccagagggaatccgaaggtatcgtataagtagaatgcggacttgccgtcgatctcctttttaccttcacttctcttctgctccagaatcttctgcagctccttcataccgttctccagagtgctctcgaagcgggcgatctctttctgcagctcgcttaagacgaactcgcggttcttcttcatcagaggatagctctctgcatagatctcatcaatatacatagcagcaatatgcagtaactgctctgtagtcatatttaaagtgcgtccgtgtcttaccgcacgacggatcagacgacggagaatatagccggcaccggtattggagggaagcagcttcgcctcatcaccgatcagcatcactccagtacgcagatggtctgccagaatacgcatggatctggtcagcttctcatccgcattgtatttcacaccggaaacctcttcaatgtaagcgatcaccggagaaaacaggtctgtctggtatacatctctggtaccgtttaagaatgccagaatacgctccagtccccagccggtatctacgttcttctgctttaaaggcgtcagatggccgtcatgatgcttctcatactgcatgaatacatcattacccagctcggtgtatttgccacagtcacagccggggccgcagttcggtccgcaatccggtctgtctgcaatatagaacatctcactgtcgggaccacagggaccgtattccagtccccaccagttgtcatcagcgggcagataatatacgttttcttttttgaatccggaagcgatacgataccgtgcgccttcctcgtctctgggggcattcccgtcaccggcaaatacagtggcagccagatgatccgcatcaaatccgaacacctgggtcagcagttcaaaactccactggcagcgttccttcttaaaataatctccaaggctccagcttcccatcatctcgaagaaggttacatggcttttgtcgcctacggaatcaatatcgttggtacgtacacaaccctgtacgttgcagagtctggtacccagagggtgcttctgtcccagcagataaggcatcagcggctgcataccggcaacgttgaacataacaccggtagaaccgtcggataccagggatactgctcccacatctacgtgaccacggtctatataaaattgtttccaggcttttctcagttcatcagaagtgaattgtctcattctctcggtctccttgtctcaataattacatctttcggaaaataaacctacatttctacattataatgttatcgtttcgccgcgtcaaggataaaacatcactcatcctcgtcttccaggatctcgttcaatgcctctctggcctcctcgatctcctcttttttgccctttttcaatgcagcctcgaaaacagtgatataacgatccagttcttttctccggtctcccagtgcttcctcatacatccgctccgctctgagaagcaccagacggttctcctccaggtctctgggctggatcttcaggtaggacaattcttccattcgcttctggatctcatcatccgtcatctggttgtcctgtcccttgatgatcattttctgggtcagtccggtggataccaccttgacttccacttccagcagggaattgatgtcataggtgtaagtcacatccacggcttcactgcctctgggccccttgggaacatcaatgttcagttctcccagaaacagattatttctggcgaaacggctctctccctgcagtacccggacgcgcaccttgtcctgattgtctctgacagtgtacaactgctccgtatgactggcagggatcacggtgttgcgctcaatgatgggacagaaacggccgtcttcaaatttgccttcctcgtattccaccacgacttccgttcccaatgtaaaggagcatacatccgtcagaatgacttcctttacctccgcccggcgttccttcatggccgcctggatcgccgcgcccagtgccacggcttcgtccgggttcagtcttgtatccgggaatttgcggaacagcctgatcaggaaatccctgaccaccgacagtctggtggctccgccgatcagcaatacctcatcgatgtccgacagcttcagtcctgcatccgccagactcttcttcaccggttccctgatcttcattagcagttcttcgcactcttcctcatattcttttaaggcgatctctgccgttttgttctcttcacccagcataagttccatggtcaccgcagtctgatcactgattccccgcttggcttcttctgcctttttataaagacgcacctgttctttctccgacagatccttataatgcagtcctgtcttttgcagaaaaagtttcgacatcacttccgtgaaatcttcaccgccaagataattgtctccggctaccgcccgcacctccagaatattgtgatacagctccagaatggagacatcaaaagttccgccgcccaggtcaaataccagaaatctggtgtcttttcctttttcgtacaggccgtaggccaccgccgctgcggtaggctccgagatcatacgctccaccttcagccctgccagttctccggcccgcttggtggcttttcttctcttgtcgtcaaaataggccggtacactgatcacggcctctgtgacttcttcccccagataggcttccgcatcttctttcagataacgcaggatcatgctggacaattcttctggacggaactttttgccggacaggtcataagtgcgatccgttcccatgctgcgcttaaatgcctgcgccacactgtcgggatagagatttctgcgttcctgtgccgtctcccccacatagacattgccgttctcatccacgctgaccacagagggggtcagatgttttcccagacggttgggaatgatcacaggtccttcctccgtaaatactgccaccagactgttggtggttcccaaatcgattccgactatcatatgttttcttctctcttcattttaattttttacttcttcccgaacagcctctgccagaatccccgtttctccggctgtggcttttccttgtgaaaagcggctacggcaggatccgtatccttcgtcacctgttccgaatgataccggtgccagatggcctgcaatcccattccgggatgttcctgcatctgctctttcagccgctccagtgcttctttctcccggccctttttcagcatctgcagtatccgtaccatctccagttcctcgcagacgggatgtacacagccatggcagaaggaacagtctttgtccagttgcaggagcgtatcctgttcctcatcggtggccgtataatatcccgccagatattcgtgtacgatccgaagcttcggatatttcagatacacatccttgccgcttttatcttctctttccatacaggctttcagcgcctgtgcatagtcagcacctttcttcttatctccgtacaggatgcatgccaggatcaggtccgcaatgtcatcctttttgctgagatcctccttatggaagatcagtgccttatccatattctcgatggccacctttccggaaccacagatcagcccataccatcccagatggaaaaagtaatcttcgaaatactcctgggtattcccggtattttttccaagcagttcgatcttctccggccacgatgtcagaatatttccggcgatcgtcttttccccgcaccagacacacagatccagcttttctcctgccgcatccagtacattgacgaatgccttctccagaacttttaatccctccgtagtcttgtcattgcaggccagacatctggcgaaatccctcatacggttccggtcccggtctccggcacttcccgtcatctcacggtatctccggtaaaactgttccgccatttccgtattgcccagcaaaaaataaatttctgcctgttccgcaatcagttccggccaggcatgattctgtgttccgctcttttcatagaaaaatacacattttctcaggcagatcatggcttcatcgtatttgccgcggcatctgtggatccgtgccagtcctttccaggcaaaaggattggccgggttcgtggaaagcgccttttcataatccgcttttgccgcctccagacagcctgccgcattatgaaaatctccccgctccaccagtaaaaattcacaagggtaggcatacagatattccgtaatgatcggaagtcctctccggtaaaatatggtcttgcccgcttccagtttgctcagatattccttccggaatttatctatggcgtcgttcatctgttcctggggaagccccgtattggtcagctgccattcataggcatccaggatcacacttttgacattattatccttcgcctgttgtaacagttccttcagttcctccggatgtgtcagatccatgtacacctttgccatcatttcataggccttgacataggttggaaaataatttagacaggctctgccgttctggatcacccctgctgcattccactgcctcttcgccgcttccagttcgttggcatatgcagtgtaaacctgataatccccgatcagtttctgggatatctccgcacagcgttcatactcttccatctccacatagatctgtgccttttcgatcagcataccgatatccttcggtgttccggtctcggctttttccgcttccgcaatggcttcggcgaatttttccggctgtacatagccataagcccgatagcactgcatccggatcatatgtgactgtcggatccggtctctgtctttttcctcctcttcggcatccgtatcccggaggatctttttctccaggctttcttcccatttggctgccgtggaaattgccttctcatattctgccgcttctgccagcagttttgtcataagtcccagatattcctcacgcctgtccgcaggaacttttgcttccagctccctgaccgtgcggattcccagatcggtcctgccatcctgcagataacaccagcccagatccagtcccagaccgggatcatggttctgcgcatattcccgtttcatttcccgttccagttcggtgttgatcttctgcagtgtctccagaaatgtgttgtctccgcctacggaaagaatctcttccgcacatttttttgcctctttatagttcccctgctcataataccagtccgtcaggcgcaggttcgccatgtagtgtttcggcagcttctcccgaagactctcataaatagcagacgcttctacgcgcccttcatttctccacagtatttccgccgtattgtaagcgatcagatcatcctccggatatcttgcagacagtttctttaacaaagtaatggcttctgcggtctgtcccttttcttcatagagggacgcacggcagatctccataacagggtgggtaatccccagagcatccccacatccgatcatctgctccgcttcctgtaattttttctcctgcagcgcctgataagctctgtcataatattgcagaaactgatcgtaatccgcatcttccgcaccacggaactcggaaaaatccacttcttccccggattcgcacttatgtaccatatagcttacaaactgtgccggaaagcgctctctgaaggcccccgcattctgtacaatgtggattttctcatccagaagcttccagattgcggtcggcagcttataatgttccatcagaaaacgaagcagataagtggtgcagttttcctcttcctccagagaaagaaagtcatccgcctcaaaaagcgctttccatttttccacatcacaacggtccgtaatattctcatagaccttccgaacaccacgtacccactgtccagccggagtatcgtcctccagcgtcggttccgcctcctcgttctcttctgcatccggcgttccggcatagcggcaggcctcctcataagccgtccgcagtcgcttgaagccttccggatcatcctccggattcgttaccgtcagcttgtcacgataggcattcttcagtgccctttcgtcttttgtctgttcgattcccagaatctgaaacacttcaatcggttccacgctgtcccctccactgtaagtatcaaacttttcgtaccaatagaaaaagatatagaaaaggagcagaaaaatctttctgctcctgaatagtgatcttagaatgtaaacttatctgcaaagtaagcatccagatctgcgatcgctacacgctcctgctccatggaatcacggaaacgtacggtaacgcagccatctgtctcggaatcaaaatcgtaagttacgcagaaaggagttccgatctcgtcctgacgacgatatctcttaccgatatttcctctgtcgtcaaattcacagttatacttcttggaaagctctgcataaatcttctctgcaccttcgttcagcttcttggacagaggcagtacaccgatcttcacgggtgccagtgccggatggaaacgaagcacggtacgcatatctccgccctctaactcttcctcatcgtaagcagcgcacaggaaagccagaacaactctgtccgcacccagagaaggctcgataacgtaagggatatacttctccttcttctcatcatcgaagtaggtcatatcctcgccggaggtattggcatgctgggtcagatcgtaatcagttctgtccgcgataccccacagttcgccccagccgaaggggaacaggaactcgatatcagtagttcccttactgtagaaacacagctcctcgggagaatgatcacgaagtctcatttcatcctctttgatgcctaaggacagcagccagtcacggcagaagcctctccaatactggaaccactccatatcggtacccggctcacagaagaactccagctccatctgctcaaactctctggtacggaaagtgaagttaccgggtgtgatctcattacggaaggacttaccaatctgtccgataccgaaaggaatcttcttacgggaagttctctgtacatttttaaagttaacgaaaataccctgtgcagtctcgggtcttaagtaaacggtgttcttggcatcctcggtaacaccctggaaggtcttgaacatcaggttgaactgacggatatcggtaaagttatgcttgccgcaggtagggcagggaacattatgctcttcgatgaaattcttcatctcttcctggctccagccgtctacactgccttcgatggcaataccgttctcctcacagaaatcctcgatcagcttatccgcacggaaacgctcatgacattccttacaatccatcagagggtcggagaaaccgcccagatgtccgctggctacccatgtctgggggttcatcaggattgcacagtccacacctacattataggggctctcctgaataaacttctgccaccatgcctttttcacattgttcttcagctctacgccaaggttaccgtaatcccaggtatttgccaggcctccgtaaatttcggaaccgggatatacaaaacctcttgctttcgccagggctacgatcttctccattgtcttttccatgtcagtaccaaacctttcttactctatatttgtattgctgtataacttactttttcatcagtatcgtaacgacaccgtcggactgtgacgcatccacataaccgtcctctcccatgacaactccctcactgagatacagcaccgggtagggacaataaatatatgcgcttgcattcgtaatgatcatgtggttcttatccagagccttgttcagcttctgctcctccgccggcgtaccgtctgcggcacttaccagccccagatccacgctgatcccctcggccagtgcttccactctggttccatagaacagctcctgttcgttataatccgcataactctccgtatcggtgaattcctgcacaacctgaaccgtagcgccgtctcccagcatctgcactgtcttcacagccatagggggttctgctgcatccgcatgtgcggcgttaaattcctctgcttcttcctgtaccatctgtgtaaggccgtccagactgtagaaatccttgtcaaacatattcaccagataagatactacttttccatccttctccaccaccagagaagtattcaccaccgtctccggaagctttgctgccttgccgcaaccggccagggacagcatcagaacacctgacagcattgccgaaataaccttttttgtgatattgtgcctcataaatgagtctccttttttggcatcagccatatccgattttaacatagagttttgagtatttcaagacttttgaacgacctgtccatgaaacgtttccgatattccgaggcaattcccctcagttcgtcaagaactttgtccgataccgtaaatgtatataatttttctatgggactttgtgctatgtagcttaaggcatacagggtggattcctccagtctgcggcctgccggcggcccggggtactctccgttcactgcaattgctttcagttcaaagatactgcgtaccagttcgttgggcagtgccggagcacacaatgccctgagagactgatacactaacttcaacatctcccgttcatcgttattttctctgcaataaaagtccgccacttccgcaaagtacatgccatagcaggctccaatataatctgtcaaaagttccgggaaaaaattctggatatccgcttcggatatggtataagatgttctcccctcatagaggcgaaaggtaccaaaagcaaaagggttggtcgctgccgcaagtcggttgcccggctttctggcacctcttgcgaatacagtgatcttccctttttctctggtcaacaggcataccagcctgtcatattcaccaaacggcgactgttttaatacaattcccgttacatacagggattcctgcatgatccttcctcccgggcgttaaggtctgtacatccttccgccctgcagtccaccgacgtgttgctacagcacgcattgggaaaatctgtttcctccgtactccgcagataattcaggtaatcctccactctgccggtatgttcaaattgctgccagtaattcgtgaactgcatcctgcgcatccccctcttcttatcagtttatcagtgtgtcatcctctgtaaaaatagggtctgcaaattttacttttctattcgcccatctcaatgtctttcggattatatccgaagtttttgagcaggatatcgctgtctctccagtccttcttcaccttcacccaaagctgtaaattgactttcatttccagcatatcttcgatctccgggcgggcctgggaaccgatctttttcaacatctggccacctttaccgatgatgatccccttgtgggaatctctctcacagataatggtagcttcgatgtcgcagatgctgcctctctctttcatgctctccaccgtcacggcaatgccgtgagggatctcttcggataaaagacgcagtgccttttcccggatcagctccgcaacaatctgacgcatgggctgatcggtgatggtgtcttcatcataaaaggccggaccgtagggcagatatttcaaaatgcactggatcagtacatccgtgttgtcgccctttaaggcggacaccgggacgatctcgcagaaatccagttccttgcggtaggtgtcaatgaatgccaggatatcgtcctttttcacagtgtccgtcttgttgatcacaaggatcacgggagtcttggtcttttttagttgctcgatgatatgacgttctccggcaccgatgaaattcgtgggctccaccagccacaggatcacatccacatcattcaatgtatgttctgccacatttaccatgtaatcgcccagtttgtttttcgccttgtgaatgccgggggtatccaagaatacgatctgtccctcgtccagcgtcagtaccgtctggatacggttacgggtagtctgcggtttgttggatgtgatggcgatcttctgtccgatcagtcggttcatcagcgtggacttacctacgttgggacgtccgatcagggtggcaaagccggatttgtatgccggattttcgttcattttctatttctcctgttctttcttgttttctgttacctctgtactttgcagagttttctgcatttttgcttccgcttcggcgaattttttctgttcctccgtacggatccgtttggtgcgctttttaatcttctttaagatcagtacgatcactgcgatcacgatcgcccagatcaccagataaggaatatggatcacgaaccagattgctgcttccttcaaaccctcaccgatatttttcagactatccacaaatccggtggaaatacgctcccagacggtctcttcttccacaggggtatagacctctacttcatcaatataaaggtatacggtgctgtagtcaacccggttatcatagctgcgaagctgggattccatgctttctaactggtatctgacatcggacagacgctgttcgatggtaataatatcttccacactctctgcctgctccagaagctgtaataatctctcctgctcggtccgcagggcatctctgtggctttgcagatccacataggtcagcgtcacatcctgcacattctccgaacgactggtcacattgcccagctctgagaccgtattctggaactcctccagtctgtccttcgggatacggatggtcagattggcattccttgtagaacgataactataatatgtactgccgttataggcatccagactttcgatatagccgccgagctctgttactttattctctaccgcgcttaacagcttatcatactccctggtctcgacatccatattcacggtcttgatcagtttccggtctgctgtggctgcagtctcctcaggcactgtagtacttgtgtcctgagcattttctgcgggatcgtacccttctgtcatgccaaatccatcttcataagcggacgcctccggtgcagctgcctcattggaagcaacagcataatccgcatccatgagatcactgatgccgtaactgcccttcgatgagctgccgcaggcggtcagcgataaaatcatgccggcagtgagtaaccctgtaatgatctttgtttcaaaatttggttttttcataaccctctccgttctgcggacggcatcctgacagcctgtcggatccgcctgctgttgactttttattgttcacctctataaacgaaataatatcacaaaagttctttatttatttgatctttttacgattcagaaccacttttgcaaaatcgcagctttccttttgccgctttaaaacagattttccaccttcaggaatctctcctgttcttcctttaccttagaagccgtacctacgacacagagcagatcctcctgcatgaatgcccggatatgcgcggacagtgcccggatatcctcaacggtagcggacagcagctcgtcacgttctctctgtaatgctgcatcgtccagtcccgtcatataggcactcagagaatacagtcccttcgctgccggattcataggcacatccagatcactgacagcaccgatgatatactgggtcatggtacgctcatccgcggtaaattctgcgatggcatccgctgccttctcatatacatcaatcgtcttgccgaggttgggatctctgtatgagacaaaatagctgtcaccggatctgccgaagctgcacatacagccgtaggcgccgccctttacacggacattgacccacagatattcatagcccagcatgaccttcagcactcttagggctccggtatatttcagtccgctcttgcggaaattaccggcacgacatacataattgacctgaccggaggttaagaagccttcgttcttccgggagacctccggaatataatgtgctttttccacggatccggtatagagtgcagccttgaaggcttccaccggggcatccaaaagtcccactgccttctcttcaccgacgaaatccaccatgagattctccggacggaagatcatttttaataacatctgtaagatctccaccagttcttcttttttctcgtcaaaatgtgcttccagcccggtgatcaggcggtagaacggaatgccggagatctcctcactgacagctccgggaatactgccgtaggacatggctcttccggctgccacgctgtgtccgccggaggtcatctgtgcctgcatgcgggacttgccctccgccaggatctcatagagacgcttggtgtccgtgaaattactggtcatgacgatctcacgcatcagatcgatagcatccgcaatacggtcatagaacaccttcgtcttcagctccagagtcaacgtaaattcatccgtatcctgcaatctgccgtacacattgttcaccgcagccatgccgccggtgaccaggttcatctcattatagagatctccataagtatagttctctgtattgaggagtccaagacagccttttaagatgccaatatacgggaaatattttcctgggatctgatccagtctgaagatcagacgtaagtatccgatgccgttcgtaaacagatcatgatacaaaagtgtggtatccccaatactccgtacctcgttcaccgggagatttgcctcttttttcatatcctcccgcttcaatagaggaatcttctccagatcctccttcgcatcctcgctctcctggaacttgttcagtttacggaaggtctcttttacagcttccagttcttccggactcatggctgctttcacctgtgccattttctcacgctgtttctgttcctgttcctctaaaagtccaagcttcggctgcaggatcaccacgctgcggtgcgtattgtccagcaggtatttttgtaccaggccctcaaaatatccggccttaacctccttacgaagctcggcaaaggtatcgttcgcctcgatatgaatgaacggcagtctgtcgtcatacagccagctgtccagcacctgtaaaccatacatcagtcccttgggataagaaccgaaatctgcctctctgtatttgaattcgtagtaattgataccggcaagcaatgccttctcgtcgaagccttccgctgccagcttctcgagtatttcttccgttacctgtaaaaattcctgttctttttctacggaagtatccttcgccacgacactgaaatacggctgacggataccgttctcgtagatgctgtagacatccttgccaatgccacggtctaccagcgcctgctttaagggtgcacccggtgcggagcacagcgcatagtccaggatctgaaaagcaatgtagagcttcggatccaggctgtcaccgacacagaagttctgggacagataggtattctcttcttcgtcctctccctcgccgatgggacagtctctgacaatacggccgggcttgtcgaaagccggctcctcggtcacttcggagtccaccttaagagcatcgtaagcagacagataatgttcgtcgataaaggtcagcttctccgccatatccatgttaccatagagatagatatagctgttggagggatgatagaacttccggtgaaaatccagaaactcttcgtacgtcagctccgggatcacctccggatcacctccggactcacagccataggtggtgtgcggatacagagagttcatgatctccctctccagcacatcatccggagaagaaaatgctcccttcatctcgttgtagaccacaccgttgaccttcagctcttcctcgtcaccttccagctcataatgccagccttcctgccggaaaatggattcgtttttataaatattcgggtaaaatacggcatccagatagacatgcatcaggttctggaaatctttgtcattgcagcttgccacagggtatacggtcttgtccggataagtcatggcatttaagaacgtgtttaaagaaccttttaccagttccacaaaaggatccttcaccgggaattccttcgagccgcataatacggagtgctccaggatatgtgccacgccggtggagtccttcggggtggtacggaaaccgatgtaaaatactttgttctcatcgtcattggataccagtgccactcttgctccggtcttcttatgacggcacagataggtcacgctgttgatgtcggggatctcccgtttctctatgatctcgtatgtggataaatcttctactctcatttatttacgtctcctagttttagcttaatcgatttcttcgctcttcgagctcccgaaatcgtaacgcccattcgtaatccggactatcgtccttcttgctcatgttcgtttgctcccctcatagaaagccttcgctgcctgcaagcagtcgcgtatgctttctatgggtgagcttaatctatcaaaagcctgccagtgccagcttgctcatggagatttcctggatcacgacgccctttgcctctttttcttccggggtcatggcggtcagttcccggatgttcagctccttcgtcacataccgtttcttccctctgccgaagatcccttttttctcctcgatgatattgatcttcactcttgccttgatccggtcgtagattttgaccagaaagctgtccggcttcaaataatacagatgcgtctccagcgtatcttcgggatccacttccttttccgctaaaatatagcgttccacgatcaggcggaatttaaacgccacatcatcctgctccaaaagctctgcaaaagtatattttgcacctatgtaaacctttgccgtgtcctgcaggctgtatttatagttctcataaactgtcttttgcattgttgtcgatatcctcaatcttgaaaccgctcatccgcaccgcatcctcgatcattttgcgggacatgccggtctcctccatcagttcctctatggtcaccttgcgttgcaattcctccgccagttctctggctttgtccgccaccttgttgactttgtcttccacccgcttgtcgatcttggaattctccgcatgctcggcaatatattcttccatggcatccatgatcatcttacccagcattccttccacttcctgtggtttctccagactgcccagcatagtaacaccaaaagacagtgccagattgccttcgcctaccagatcctccaacagaacgccctgtccggcatacagcttcgcgatctccgccacatctgccagatgaatctcgatcagtcgctgctgtgcatccgcctcacctgccatggcagacatagcaaatgccagcttctccccatcagtgtaggtgggaagctctgccacctcgtccagatattcctgtaaataatccttttcctcatccgtcaggaattcgtcgggatccatgggctgtccgatacctattttatgtttcaacagatagtcaaataccatctgcaattgttcaccgcttaagtcaagttccgcgaaggcatcctttacctgttcttcgctgatgcagtttccctgctccttggcggtcttgcggacctgctctaaggtctgggcaaataatatttctttgttcatataaaaattctccttttaaataatacgtttctccgtgcttcgcactttgcctgcgagcagtcatgcatctgcctcttgcaataatacactttctccgtgcttcgcactctcgaaagtgtacatccattcggggtccggactatcgtccttcttgctcatgtctgttcgatttgctaatcgtctttgcgcattgcctgcaagcagtcatgcgttacagacgattgcaaatcttattatttcacgtgctcatgggtaaataaatgatactggcaatattcgtaattaccgttgcatttggagcaaaaacggaactccaggctcggatcgtcctcttccgtcctgccacagatcgcgcatttatgtctcgtaacttttgcccgtccggcatttgattttttctcgaactgcgccctgcggtgcatctgcttcggcgagatgcggcttctgtgcattctgtaaaagtataacacaaaattaagtaaagatgctatgatcgcaaatttggtgaacacaccacctttgatcacgtagtacagcattaagactgcatccaggattcccatccattttaccttcacagggatcacgaacatcaaaagcacctgcatatccggatacgttgccgcaaatgcaaggaagatcgacagattaatataatatgtgctgaaagcataagatcctttgtaaaaatatgcggatgcaatttccgtaggcagactgccatacatcagatacaccacccccatacacaaaaagcttccaattatggtgaacagcatgcccgagaaaatatacacattataacggtaggtcccccaggtgcgctccagcgtagtaccaagactgtaatagaaaaacaacataatgatcgtgaaaatgcccagactttccggaggtacaatgacccaggtcaccagtctccagatctgtccgtgcaggatccggtaaggatccagcgtcagaaatcccagcagataagtattgcttgcccttcccatcatttcgatcacatatcccgccacgtaacacatgatcagaatcagcgtcaggttcggaatggcatatttgccgaattttttttcaaatttactcataaagtcgattctccgtttctattcatttctattcgtttctatattgtaacgatatggaacgttttccaatagttacctattcgttttttctctatcgagattgtaacatccacaggacaataagtaaaccgcacgttcaaaagtttatagaattactatttatttcattttttctttacacaattttaacgacagcgttttgtctttgttcgttgcaatatcgttttttttgtcgtataatgaaaaaagttttgtaaaagaaaagtcgcatatattaagaagtaattctgtaactcatcattgaccttctgaatggttacagcattttatcaggaaggatgtatcacatgaattcacaggaaaaatacgcaacactcggcatagatatcggttctaccactgtcaagattgcgattttagatgagcaccacaatattttattttccgattatgagcgtcacttcgccaatatccgggagactctgtctgcccttcttaagaaggcttatgaccagctgggcgaattgcagctgcaccccatgatcaccggctccggcggactgacgctagccaatcatttaggcgttccttttacgcaggaggtggtagctgtggctacttccctgcaggagctggcacccaagaccgacgtagccattgagttaggcggtgaggatgcgaagatcatctatttcgaaggcggtaacgtggagcagcgtatgaacggcatctgcgccggcggtaccggttccttcatcgaccagatggcaagtctgatccagacggatgcttcgggcttaaacgaatatgcgaaaaattataaatccctctacaccatcgcggcccgctgcggcgtatttgccaagaccgatatccagccgctgatcaacgaaggcgctaccaaggaagacctgtctgcttctattttccaggctgtggtgaaccagactatttccggactggcatgtggtaagccgatccgcggtcatgtagcattcttaggcggaccgcttcatttcctgtctgagttaaaggctgctttcatccgtactttacatctggatgacgagcacatcatcgatgtggacaactcgcatctgttcgcagccatcggctccgcactgaatgccaaggaagatgtctgcatcagcctgtccgatatggtgaaaaagctgtcctccgatatcaagatggaatttgaagtggaacgcatggaacccctgtttgcagacaagtctgcatatcaggagttcgtagagcgtcacagtaagcatcatgtaaccaccggtgatctgcagtcctatcagggcaaagcattcctgggtatcgatgccggttccaccaccacgaagatcgcactggtgggcgaggacggatccctgttatattccttctactccggcaacgacggaagtccgttaaagaccgcgatccgttccctgaaggagatctactctctcctgcccgagggtgtggagatcgtgcgctcctgttccaccggttacggtgaagcgctgatgaaagctgctttcctgttagatgacggcgaagtagagaccgtggcacattactatgcggcagcatttttcgatcccagtgtcgactgtatcttagacatcggcggtcaggacatgaagtgcatcaagatcaagaatcagaccgtagacagcgtacagttaaacgaagcatgttcctccggctgcggctcctttattgagacctttgccaaatccctgaactacaccgtgcaggattttgctcaggctgccctgttcgcagagcatccgattgacctgggtacccgttgtaccgtattcatgaactccaaggtaaaacaggcgcagaaggaaggcgcttccgtagcggatatctccgcaggacttgcttactccgttatcaagaatgctttatttaaggtgatcaaagtatccgatgcatcagagctgggtaaaaatatcgtggtacagggcggtaccttctacaacgatgcggtgcttagaagctttgaaaaaattgcgaactgtcaggccatccgtcccgacatcgccggtatcatgggtgctttcggtgcagcgctgatcgccagagagcattacgaggacggttacgtgaccaccatgctggattatcagaagatctgcgacctgcagttcgagaccagtatggcaaaatgtaagggttgtaccaacaactgccgtctgaccatcaataagttctccggcggccgtcagttcatctccggcaatcgttgcgaacgcggtatcggtggtcagaagaatgcccataatgtaccgaacttatacgaatataaattacatagattattctcctatgcatccctggacgtcgacaaggctcccagaggtgtggtaggtatccccagagtactgaatatgtacgaggactatccgttctggttcacattcttcaccgaactgggctaccgcgtggtgctctctcccagctccaatcgtaagatctacgagctcggtattgagtctatccccagtgaatccgagtgttacccggcaaagctggcgcacggtcatgtgacctggttgatccgtcagggtattaagtttatcttctatcctgcgctgttctatgagcgcaatgaattcgaagatgcaaacaaccattacaactgccccatcgttacttcttattccgagaatatcaagaataacgtggaggaaattgccggcggtgagatcaccttccgcaatccgttcatgtccttcagagatttgggaacggtgacggatgcactgacgaaggaattcaccgagattcccgctggcgagatcgccgcagcctgcgaaaagggctggcaggagctggcgaatgcccgtcacgatatggagaaaaagggcgaagaaacgctggaatacttacgtcagaccggcaagcgcggtatcgtgctggctggccgtccttatcatgtggacccggagatcaatcacggtattcccgagctgatcacatcctacgatatggctgtgctgaccgaggattccatctcccatctggcaaaaccggagcgtcctttaatcgtatccgaccagtggatgtatcactcaagactttacgccgctgcaagctatgtgaagacggttgagaatctggatctgatccagttgaattccttcggttgcggtctggatgccgttaccaccgatcaggtgaacgatatcctctccggctccgacaaaatctacacctgtttaaagatcgatgaagtcaacaacctgggtgcggcacgtatccgtatccgttccctgttgtccgcgatccgtgtccgtgagaagctgggcaagcaccgcaccatccgttcttccgctattgagaaggtaccgtttaccgaagagatgcgcaaggactacaccatcatctgtccgcagatgtccccgatccactttgagatcctgcagcctgcgttcaatgcctgcggttacaatttcgtcgtattggacaatgacaacaagcactccgtggatgtaggtctgaaatatgttaacaacgatgcctgctatccctctctgctggtagtcggacagatcatggaagctctgctgtccggcaaatatgacctgaacaagaccgccattatcatgagccagaccggtggcggatgccgtgcgacgaactatatcggcttcatccgccgtgccctgaagaaggcagacatggagcagatccctgtcatctccctgaacctggcaggtatcgagagcaatcccggctttcatctgaatgcagatcttatgctacgtgctgcggtaggtgccgagttcggtgatatcttcatgcgttgtgtctaccggatgcgtccttatgaagcaactccggggtctgtggatgccttacatagagaatggctggccaaggtacagaagttcgtatccgcaaagcatatcagcataggcaagttccgcagaatgtgtaccgagatcatccgggatttcgatgcgataccggtacttgatatcaagaagccccgcgtcggcgtcgttggcgagatcctggtgaagttctctcctgccggcaacaatcatctggtggagctgttagagagtgaaggtgcggaagctgtggttcccgacctgatcgacttcatgctatactgcttctacaaccagatctacaaagcagagcacttaggcaccagcaaaaagaccgcgaagatctccgcgctgggcatctgggccatcgagcatatcctgcgcggctctgccgtgaaggcatttgaagaaagtaagcatttcgatgcacccaccagcatctacaagatcgtctcctatgcggaacccatcgtatccatcggcaaccagaccggtgaagggtggttcttaaccggtgagatggtggaactgatcaaggaaggtgtaccgaacatcgtatgtacccagcccttcggctgcctgccgaaccacgtcgtaggtaagggcgttatcaaggccctgcggaaggcatatccttcctccaacatcgtggccatcgactacgatcccggtgccagcgaagtcaaccagctcaaccgaatcaagctcatgctctccaccgcccagaagaatctgaaaaagggcgagggtgtggaataaagaaactatttttgagtagcctacccagtcgatagcactgtcataaggcaagctacacccgcggcaggggattcgcaggatccctgctgcgggtgtttttgacatcccaattatttttcaccaattattttttcttgacaaatctcttttcaagcttccgtatatcatgctataatgtgttttaatattaagcagccgccgtcctaattttctgcatggtttcatgccgcacgaatcataacactaatacccgtgcgcagcgcctgtgacatcgtgatctccgcctgtatgtagtgacatctacggcacaatacatatgtgcagtttcctgttggtcattttcgctataagctgttttggggctgttttagtacaaaatttcttatatttcttctttttttgtatcaaatttgccttttttattaaatctgatacaattcccccttttttcacttgaaaatccattgtttttgtatttttttccgctatttccccctatttacaccaaaacatttcgaaaggagtttgcatgatccaaaatttagacacccaccttaacaaattgcaggcacaatgtgactacctgcgtcacaagctttctacttttccggaaggagaattatctattcaaaaaaatggttcttaccaccgctgggttattaaaaataaggagcagtctgtatattgctcaaagtcaaatcgttctctcgcggaagttatggctttaaagaaatattactctcttctactgtttgaagccgaagaagaactctccctgctcaatttttatataaaatcccatgaaaaaaagaattcagcggtcaatcgttccaagcctctgacatcctctgacctgttggcagagtcttctccttattacccattactgcaaagctattttgcaaaggacaagcttcctgtgtctgcgcagaaatggtgcgcggagagctttgaaaccaattcttctcatccggaaaatctgatccataccacactggccgggcataaagtccgctcaaaatctgaagttatcatatcgaatctgctctataccaaccaaatcccttatcgctatgaagcggcgctgccgttaaaggagttcacggcttatccggattttacgattttacatccggttacgaataaaatcttctactgggagcatttcggtatgatggataatgcgccttattgtgatactgcctgcaacaagctgaaaacctactgctataacggaatcttcccatccatgcagctgatcaccacttatgagacaagcaaatgccccatttccacggatcaggtacagcagatcattacacaatatttcctctaaatccataattccctacatgaaaattctcctgacattgactaaaggtaatcaagaatattcaaaaagcctcacaagatgttgctccatagtgagatgggctccgcggtgtgatcaccccgcaacatgatcactcgcagcatgatcactcgcagcatgatcactcgcagcatgatcactcgcagcatgatcactcgcaacgtagtccatacgggacgtttttacgtatgggaacacattttctatacagcaaaaaggaccggttcgtccggtccttccgataaaacacaataatcgatcatgatgcatttgccctacggctctcaatatactgttgtaagacttccgtgacttcctccggtgccagaccggcatcttcgatgatgtcactcaccgcttccagttctttacgcttcttctgttcaaacaattcttctaactcacgttgttctgattccatgcggatatttaatgcattgatcaactcctgttttgcctggatcttttcctccagggattttctctgtcctcttggcatatactgtgtgctcctttcctgatggcaatcctatggatccgtggatcatgtttcctgccgcgtgatccgaaaaagcatggccattcatcagggatcacaggttccgtaggaactatcatgatctatcatgaatggcctgatatgttacagtatatggacaagaatgtaaaaatataccatatttccggcaatattatcctgttccggaacgatctcgcgaatctgtcagcagctatcattctaaattatctaccgctgcttttaacttattcaaggcaagctccagcgtagcttgggggcaggcgatgttcacgcgctgaaaagctgctccgtcgggtccgaacatggatccaccgtccaaccagagtcctgccttgtccacaatgaactgatccagctccttaccggtgattccaagttcactgcaatccaaccatacgagatacgtgccttccggctccaccagatgaatctgtggaatcttctcctgtaaaaaattccgtaagaaattcagattcttaagcaaataagctctcaactgatccagccagtcttctcctgcacgataggctgcttcacacgccaccacacctaaggcattgggctcatcataaccagttctgtcaatttctgttttgaatgctttacgcagattttcattcgggataaaaatattggagatctgtaagccagccaggttaaatgtcttgctgggtgccgtacaagtcaaggtaaactccgcaaaacggggatctacgttggcaaacactgtatgctcgtaaccgggatagacaaaatcgttgtgaatttcatcgctgaccacaatcacatgatggcgcaggcagatctctcccagcttctgcagttcctctaccgtccacactctgcctaccgggttgtgaggattgcacagaatgaagagttttacatgttcctgttctatcttgcgttcaaagtcctcgaaatcaatctgatatgccgggctgacagtaccaacattgtgaatctgctgttcggaagcatcatctgtcgttgctgacactaccgtccgctccgtaaccggatgatataccaacgtattatcaactactctccggtcattgtcacggataatattagtaaacggataatacaccggattctgaatcagtatagcatctcccggatcagtaaatgccttaaccgctgcaccgagagcaaataccacacccggagtcttcacgatccattccctctccgtcttccaattatgattcctctccatccagttcatcacagcattgtagtaagcatcctttggctgggtatagccgtagattccatgttctaccgcagcatgaagactcttcgtgatctcttcggataccgggaaatccatatccgccacccacaggggcagcacatctgccggctttcctctctccaccgcaaaatcatatttcagacaattcgttcccttccggttcgtaatcttatcaaaattgtatctagtcatacgaattcacttacctttcgtcaacctgcaaactttctgcctgtggctccaggctgcagattaaattttatcggtcgcatgcattcttccagaccttctgcacgccctgacacgccgcatcgttgctagccctctgtgaagctctacgcggagctggctgaactactatgtataccaggttacacccacactaagcaaatgcctgctctaaatctgccagcagatcatcaatgttctcaatacctacggacattctcagaagcttctcatccacgcccaatgcttcacgtacctcaatcggtacatctgcatgggtctgcttcatcggataagtcagaaggctttccacgccgcccagactctccgcaaaacggatcaatttaacgctctccaagattttaacagctttctccggggaattcaaccggaatgagatcattccgccgtatccgctgcactgtctgtcgatcagcgccttatccggtctcgaatccagaccgatataatataccttctccacttccggtctctgttccagccagtgcacgattgcaagagcatttttctggtgctgttccatacgtacagccagagtcttgattcctcgaagcaatagccaactatcaaacgcagacaaacaggctcctgtcgtcttataaatattgttcagctgctgatacaaggcatcatcccttactaccaggaatccggataatgtatcgttatgtccttccaggtatttcgtaccgctgtgcactacaatatccgcacctaacgtaagcggcttctgaaaatacggggataaaaaggtattatcaacgatcagaatacaaccatgcgcgtgtgccaattctgcgattgcctgaatatctgcgaccttcatcatagggttggacggagtctccagataaatcgctttcgtctccggacgtatcgccgccttcacagtctccacatttgaagtatccacacaatctaccgatattccattcttatggctgatcgtgttccaaagtcttaatgtaccgccatacagatcattcgtagcaatcagatgatccccaggagaaaaaatctccatcaatgcggtgatcgctgccataccggtagaaaatgccaaagcttccgttccctgctccaacagagcaaccgtcttctgcacttcatctctggtaggattaccgcaacgggaataatcatatcctgtgctctgccccagtcccggatgagcatacgccgcattctgatagatgggtatgctgatggctccaaacggatcccttctctcattacttccctggacacaaacggtctctgctgcaaatgccatctttttctcctcctatgcctatgtataatactatatttttatattcctactgttccactaggtatagtatatttttagcatagtaagaaataaaagtcaatatctttttaccaataaagcttcatctgttcttctgcttccttttccgaaatattgagtttattctttaatttctgcagcgtatcttcataggtggcattaaaatctttacacataataataatccccttggaaataccttgcgaaattccccgtctcgtatactggtcaaacaattcgcacatgctgatctcatcctcctctgtaatatttaatccttttaatatttcttcggtatcatccacgtttttatctccagacaatacccgtagcattttgatagtagcttctttatgaattatttttcggtctgagcgatatgcgttaccttctgcaagataatccaatacaatacacatatcgctatgaaaacgttcgcggatctccttcgggagatatcgcatttcccacacatgaagctgcatatcatctacatatttccatgtagtctctacaatcttgcctttgccaccgtctattaactgtcgcaaattgcaacaccctttccatcttgtcgtcccccaatatagcaccaactctatcaccggatataatacgtgattctgtttctcgtactgcctgcggtattctccgccaatatatcccgctttgcgcagtatcatgcctttatccactttcgtctgatttgcaaacagaaacaaggctcttggcattccgcctgtcacatggtattttgcgacatcttccagttgattgtgtaatgtattcgtgctgtctgcatatagactctccgttgcagctgtaagcatctcctcgccggtcaccaccacagttccctcatgcagtaatgcattcactatatccgctgctacatccgcataactttcaaaattcttcattacaatatcgttcagttccaataaatactcctctcctgctcattcctcttacattgtaaaaagtgaatttcacggcgatatgcctcgaactgcacataaggtgcgataaaatgatgcccatatatgatgctatcctaatatatggtatcttcgaaatcttatctatacagactttttgtagatgtgattactatatcacagaggtatccattctgcaagggaatccggcaaaacaagtgctgaaaaactatacaaaaacagagctgtggaaattggttatttctcacagctctgctttttgtgcaatattacttttttaaagtttaatccagttcaaacagttcctgggcgctgatggataactcagctattccgcaaggagttacttttgatccattatcatacacggtatagactcttgcgtagatagtagctgcctgcgctccttcgttcaaaatcgtcccggaagtatcggcacgaaacagtcccatctcatccgaagaatatttcaaggtataggtcgcgccgtttgtaatcgggtaacaattcttaactccattgcgttctgtcggtgaaattacctttccattgctatccgtgatcttgaggccatgctctccatccgtctttaagcgcaatacctttcctgtgattccgtccacactgatggctccggccgtatcgtctgcacaggatttgtaaaattcaacgcataactgctgtccacctgccagaatattgtagtcatctgcctggaagttgacactgatggttccgttattcttatcatccaatacaatatggttgaccggatcatacagcatatacacggattggatcttgctgccgcttttatccttaaagtttacggaaggtgccgtcacaccggcattatacgctgcaatcatcgtattaacaaacagtttgatctccgcgtccttactgggtctggaatgtcccgctccggaatatgtcacatttcccatggtatagatataataattatttaccacatcattgggtgtgatgttataaatattagtatctttatactgaccgtcagccacaccggaaatacagtaccacaccacaatgtcatttttaccgtctccgttgcggtccagctccatattcggctgtaaccactggtaatgcgtattactgatctccagctgttcatctgcagatatctgataaggatactgcgtaatctggccatcatttacctgtgttgcgatcagcgatttgcctgcgtaatcacccatcagcaaactactgggataattccaactaggatatccaccatcatatccagcctttttcagcaatgaattctcaaccggaaactttactgacgaactgccatttatccgcaaatcttccagatagcttctcaggaaacgaactaccgtatatttagtcacaccttccttttgccagagctcattatccgaattcggttccttgatctcgtcaaatgtataggactctaatgttttaagatattcctggtccctcttttgttcctctcccgtggagtttgcaactctctgcttataatactctttcaatgctccatagcgatccagacctacggatgcacgaatggtcttattaaattcatatccccaataccagtagtttgcatgataggtttccgcagttccattatcgttatacgggatcacactttgaatattattgacatatgaagtagtatcatgggtgaacaaaatgctcttgccggattctatgtagtctctgacagcccagccaacagccagattcctcttaacattcgccataatttctggaggaatttctttgctaggatcatatgcgccataggtatacccaaacttataggcgtcaccaaagccgagtatcaacatatcatattgctggaacagattgtaggattcctggtatatcttctgtatatcagtatccgaagtcccgccaattttcagcttatcatttataaggtaggttacagtcatactgtcaatgctcgtggacggaattaccgttccatcccagttgacttgatccaagcctactacattccagtcagttaatcctttaatgtacctggaaaaattagtatccccattctgttcgtcatgaagattccagttattatttttatcagacaacaactgcaatacacggattgtctttttaccactttgctgcggcacagatgtataccctgacttggcagttctcaccagtctgtccgcattatcgtaaaataccagcttccatggaataactcctacatattcctccggcagagcacggatcacacgataggtctccccggtacgcaattcatatctgtttccgtttgccgttgcaatcggatcaaccttattccactcatctccctttcttatatacacagtaagaccgctgacttcttccgatgacgtatatgtcttaccttctacataatcagagccggagaaacgaccatcagcatttttatctacgaacagtttacaatcataggtagtacctgtctgtgatattgcagcatcattctgcagattaaaaatatattgcagctgatattttccgtctatcttctccagagagccaccgttgctggcaccgttctgattagaattatatttcagttcctgcggatatgccgctccgtaagtagttacccagttaacggaaagctttgacagattcagataattacaaaatacagatctacgtgcagataatgtggttcctaatttagtatctgctgtattatctgtcagctgactctctgtaaaaatatttttctgccagtataagtactgaccattttcatctttcttcagagcgaactgaaccagcttgtaaaaataagaatttttgtccagcgtatctgttgatgccacaggtattttatcgtccccaaatttaataaacgtatccgcaatgaccaccggatatcccgcctcaatgaactgacagaattcctcatatcgggtagagttcatatcattgccgggaccacgatagacatctgcactcttattcgttggatcatcatcgttagtcttattgtgatccagcgaagaatcctgcagtctgtgccttgcattatacgtctccctagcctgcgtaacattctccgttttcgtttcggtggcatagtcatagtagtctcctacgtgagaataaatcaaccctttcatctgtggatcattatacacagtcacaccattttctgtgttcatcttgctgacccgggctccgagatagatcatgtcgtacttttcattcaagtcctcgatcttacctataaattccgcagatgacatttgtgtaatattgatcgcagatgcatcataaattccggtcatccccatcatattgaccacatcagtctgcaacttactttttaacgtatcgctaaaatcatagcagggttccagatccaatacacgaatagaagatttcaccgtgactctgtgcatgtaccagttcaatatatatctggtaatagaagccttactgatctcttcatccatctgagctgcattgctgttgtttttcttagccaggaaattctcgtactgaatctcttttaatactgctccgaaggttgctgctttcgccgcattccctttacaatcagtcaggaagtcagaggcaacatatggcgtcgcactgtcatcattcagataaacattgtcatataaagcctctttcacggaatcgcccaagctaagcgaagctgccgtcggaccgttccaataagcatctccctgtgaagcaacttctttggcaatattatcatcagaaaccttcaagatcgtcagtgccatctgtgtcagtatcttattattctgattattattcggttcctcagccagcgttttatttttgctgtaaaatccgtaatccatgaccaccggtactctgtctgcattattccgctcaccggtagtatccttaataccgaatatcatcttcgtcagagcggttgctacagaagtcatattcacagattccgctgcataacttcccctgccggagagatagatcagatcaacgttgtccagatccacgccataataagcctgttcctccggatttaccagttttgccagttcctccactgtcaacgttgtcacttcaatcttcagttgatcaatatctccgccagtaccggaagggctgccgctctcataccggctggtgccggacagattcaggacctgcttcttgaaccattctttattatagaaaccaccgtcatatgctacagtatccaacgcatccttcgcattatcaccgataaagtcatagctgtttgatgcttcgtagcctgattgtcctcggagataaacctgcatagtaccgctgctttccatcacatatttaccgatatcatttctcttataagtatcaatcagtttgtagtccccattaccgctggataatgtcaccttagacacataatactcaccggtggtgttttccatgaaatgcacaaaatagcactccgcaagagtagtcagtgtataacttcccgttgttccatccggattttctgtccaggttgcccatggaataggtgtggtgttggccatattcaaaatatagagattctcgttccgttcggatgaaggatcagaagctgtcattatcctttgttcggaagtctcaatatcatttccggatgtgctttgtacgctgaaggtctgcatctcattactggactccgctgccgcgtcattcccggacgcagatgctgctgttaccagtcccgaactctccgctgtcgtcacctcttccagattttctgacgcttcggaagaattttcggaagttatggcagtactctggatagtatatccctcaggcagcttgctgccatataccaccttaccaaggtaagtgtatacattatccgcagtcttggtatacacttccctaccgacataattagctgccacaaaaccaatgttattaatatcgtttatactgccgccattggaattcttatcgtacggagtcagtgcatatctcgcaggtgccagcgctgtcagtgcatccgccgcatcaccgatggtcatttccaggttctgtccgctaataccggacactttagaaaatacaggggacacgctttgtttattctcgttagaagtcccggaagcttcgattgcaccatatctgtcaaaacgcggtctggtatccccctccctatacagcgtatacaacgaatccgtctgcacataggtgtactgaccgttgtcatccgtatttttcacaaaagagccacggatctcctcagtgcggcttcctccctcgctataatcggaaaaacttaccgggccatcgcttcctgcgagattccccagactgctactggtaatgtgagccatggcagataatcgctccaatgctgccggaagctccgaaagcttacgtccttcagataccggttcctcgccaccgataagatatccgatggaagcgtcctttttagaaggtacgatttctaaaatgtgaaaggtgccgtccgaagatgctactgtatcctgtaccagcttctcaatgccgggcagtgtcatctcatgtgcacttacttccatagagccatagttttggcagactccggctgccaaaactatggtgaggattccggctatgtacttttttgtgttgtgcttcaagttcttcatgttatctccaaaagattgttaatgctctttccggtttctgatacgatacatgtccaccttcctcaccgctgtctcccttgacacgactatcgctgaaggtcacaaataaagtatcattcttttcatctctatcaatatagagatgaatcatataagtaaatactgtttcgtttttatcatttactctggtatcacagtgaatattcggatcaatatgtgttccggattttagagtatccgttcctccagctacaaggctgcctataaccttcattcctttatcaccagtcttaaatgctccctgacctgtttcaaatccatatagatcaacatacaccttcttatcgtatacaccattctgccatccatcgttcttataatcgttcttattcagattataataacgattaccttccgagaaataaaaagtacatctgggaatcaacagatatgtggatgcaatttcattatcattgtcgtcaaaagctacaagtgtgagaacatgttcctctttccagttaatataccactttgcatacactccgactgtttcacctgtagccgtgggaaatacgcttcgtgtagctgaataatctacttctgaatctgcgaatccggtcactgctttatcaatgactagattctgttcataatcgcccagtccatcacttgtaacgtttctactaaaccctactcttctactcagtccaacttcgccaccgaaattatccttcacaggattactctgcgccagaccttcctcaatatcattggtaatcttccaggtaactttgctcatatctccggaataatttttcaacgtacaagtcaccatactattacgtgacaggacaaactgatcaccgtctatatatggctcgtctgcactgtcaatggtcagcagatttggaatgtccactgttacttcaggatatactgtaatggcagctgataattttacggttgcacgtactgtgattgtcttattaatattgttgctacactttaacagctgtttatatctggaagccggagtcgtatcttcaaagctatagcccttcggatttgggactccatcctccaatacttcccagttcacaatctgaggatatacatcataatccgcccatgcagtcaggcactccagatctacactccatcccatttttttaattccgttctccgtgtaggaataaggcttcactacgtttcggatcagttccgcctggaattgtcctgataccgccgtcactgtaacatacgcagaatccgacttcgttgtgtccgcatttgccatacaggtaactttcaatacctttacaccgatgctttccgacttactgatattcaatgtattaatcagggcactaacatccggcatggtagaaaatgtagttgtgctgccatccgcataagttactttccattttaccccctgtgccacagcagaatctttaccggtcagagtacactcaaaagcctgtgacttgccgcggactacttccacatctttaggagttatagaaatggagtctatcaatctttcttccactgtcacatatgcatatgccaccatactcgtatctgcttttgcagtacattttaccaccagcacatccgtaccgatagtttcctcttcatctacttttaaaataccatcctgattgatcgtactcttacaattagccccggaagcataggacacgctccaggtaacgcccttggaaactgcctctgcgtcaccgctcagattataggtaaactgctgtatcttgccctgaggtaatgttgcactgggaggatcaatagtcagagcactgatccatgcgtacgcggttccggtcttctccaggtcatttctaagcttaattgtctctgcgatctcatagcttctgtcctggtaagtaaaggtcatattcagtataactttccgcttgtcctttacctggcttaagtctacgctgaagcttgtgacatgctctgccataagtgccggggttgcggtggtaggatctcccacgacgagattgccgtccgcatccgttgtatttttcacttcatagaggtatacctgattcgcagttgcatagtcccctgacgcggttccctgccagcggatcatataggtattctcgttattgaccaggcgcagttcgctgacatgggctgtggtgatctcattgccggctgcatccttggcggtgttgccgtccagatccactgctgtgtcggcatgatccggtgtgaaattaatatcctgctccacatcaatgatcaggtcaatcatctgattcgctgcaagctgtgcttcttcctgcagggtcagctccttattcccccgcaggtaggaattgttgcctgcgatgataaaggcacccacagatcctgccacaatggtcatgattgccagggacactatcacttctacaagagtgaatccttttttcccgatacgcatagtcaacctccttatttcttcaggattttgccggttctgccgactgttgtgattgttatcgttcttgttccattgctgatcacaattttcttacaatagtccttgtccgcatctgctgcagcgcaggtcttctcttcaaaagctcccgatgctctgttgaacaccagatgcagtccgtcggttgcggacgcataaggcaaggtaccttttaattgtgacagattatagggagtggaatcatcatcaaaatatacttgtattgtgataggatcctttccaacgattctgtctgataccttcgtacctccctgatagatctgcgcatgatactcaccactcacatctgtcagtacaaactccacctggttctgttcttttcccagggtcagcactctcgccctctcaagtgtcgaaacgatctcatccgcacattttgcaatttttcttccggtgagtgttcccacagacaatccaatgacgcccaccacgatcgccatgatggcgacgacgatgatgagctccaccagagagaagccaccgtttttattgtttctgccagttctcatatacgatcaggtctcctaaattaatgttgctgttcaggtaggtcttattgttattctgcaggtaaccatcaccgccgatcaggaaatccaccacatgatattccttctgaccgccgccggagcccgtaacctccttggaatatgtcagcgcgcgaagcactgcttccttgtccggtgtcactttcacattctgtcctaacaggatattaccgcctgccaggatcacaccgttgaattccttaccatcctgtatcttcacatttcccgtagcgataataatgccactcttaaattcatgtcccgcttcgggataggtataatcaccatatacgatgactgccttgcaatccggataagcagtactttcaaaatatttctctgtatcaacgaccagtcccgcaccacggaccacaccggtaaagcttgtgatctcgtctttattgaccagattactatatacattggcggcatccgctttttcggaaggggacagctgctcatagccatcgatcagcttcttgcagagtgccttgaatttggaatcatccgctgccagctgctgcttatagccgatgttgctctgatcactgcctaatgtggcattcagcagactgccgttgtagctgcctgtggtctgatccttgtcgaacatcaccacattacctgccaggtgcatgatgtaggcaccggcactctgattccggatcttgatgccatcggtgtagatgctggcataggcatccatggtactcttatttaccttataataatcctgaagataccggttggcagcttctctgcccgcctgggtggagttatcaaaggacacataataatacacaatggtaatcttgctgtttaatctcttataaaaagtacggacaccctgactatcgctgcttccgttcgtaataaacttcgtaataccataggaagcaaggctgttaccgcccagcatactgctggctgcattaaaatcaactgccgtattccccatagtatctgcctgctccctggtcacgggattggaaccctgttttatcagatctcccggtaccagatatgccagctggtcacttttgactgcaatagactgccccatcaggatatccttgcggtcggaggcgctgccattgggattcccgtccgccccggtgagattatccttagcagttttcgtggcaatataggtattccctgccagagtcagattgatcaggccgctcaaatcaatatccgttccggtaccgttgactacaatggcactgctgtcaccgttctccccggtgccgaagcctatatactgtccggagtaattctcacccaccagacttcctgcggtaaaattattatttgcgccgtctatgcgcagatctcccgctacatagacatcatttcctttgaaattcatattcgcgctgccggtagacgtcgctgctccgtgcatcgtaatcttgcctgcccacagttctccatagctgtcggattccagtgttgcgcccttgcccagatacagttccgtagccgctaccatacgcttatcatcattttccttgcctgtcggctcttccagggtcagtgtcacgttagcgctggtggtatcgtcctcattacccaccagtaccttgtccgcatagaagcttccggcgatcttcgcatcgctaaatttgccgctctccgctactacctgaatattcttctgcgccaccagtgacatgctggtcagtgaaggcaggcttacagcctgtgcaaagctcatatccggcattttcacgcggatatccgtctggatcacagagacataaccattagcatcggtataaatcacctttaatttttgaaaagacaatccgtccgtgaacagggtaagctgacccttcggcagatcactcaccgcatctccggagccgttagtgcccgtcgtctgcacgacaccgcccaccatcttgattgtataggaattgactccgtcactggtctgtaattctgtatatttctgtacctccggtgacagactgttgaacagtttctccagatcatagtaatttaagctggcggtatcgctgcacttatatgccttctgcatactgtttaagaacgcatagcggagcttactctccttctcggatatggaagtgtcatcatagttcaccaaaatctgcgtgtaggcatctcccagggatgtggacgcctgctcttccatatggacacggatctcatccagcactgtctctgccgaatagaagttgtccttcgcctgcaggttatttgccttcatctgatagttcaataaggacatatacatcaaaacactggctaaaatgccaataaaggccatagctatgatcacaacgaccattgccgagcccttatcgtctgtctgtttatgtaatttgaagtctctgccacgtatcttcatggttcttacgcttccttccggattctcctgttattccgttaccgttcctgtcatagtaatgatcgggctgccagctgcgatcttatcctgtgcataaaccttcacttccatgtcgtaaatacggtcctgtgctctggccggtgtcagattcgtcacggacatgatggtcttcgccagtgaataattagttcccgttccggctcctgcaccggtcatgctggaatttacaaatacatatgccgtaagtccgtcactcttatccaacagattcgtgcgaagtgttcccgcagacgtctgtgtcgtgccgggagccggcatccagccgggccatgcttcccgcagttccagcgatatcccatacttactgcgcatggtattataatctgttgctaaggtatccgtcaccatatctattttatcctgtgtcgcagtctgctccactaccagcagattcgtctccacattgtccggattgttgaacacaatactgtctatcatggcaggtcttccgaaggcatcgtaatgagcgctctccactctaggctgcaagcagacaatgatattcgccagctgattgccaagctcgctgacatcattcacctgtgctgcacggctgcgcacactgtcttcgttggaaaaaatcacataatccgctcccgtctgcggatagttcgcagatctgcccgttgccaggaccccgggatcacaatgatacgtcgtggatgccgttaccagatatacatctgtctccaccgtagctcccgttgccagcgttacgttgatcttactgctgtcaatattaatctctgtcttccgtgtagtattctgaatgatattagcgtcatagattcctccgccgaaataagaataagcttccttggcaccgtccgccgcttcgctgtagacagcattcagattacccgccaggttactgatatctacccgtgccacactgttcaccgcactgtaggctgtgggatccaccttcaccactacatcataagtaccggaagtggtggaatcgtcccggatcgtgtaggtccagatgccggtcgtgtcgtcttttactgcggtattggtaaatcccgcaggtgaagcgcccgtgtaaatatcggacatttcctccagagaatgtgcctcgaacatttccatgacgtcctcagcgatcgccgtggcatgcatcgtggtacgggactttgcattggtccttgccgatgtcgcaaagctgtgcagcagtggcactacaatgattgagaggatcacaatggcgatcaaaagctccaccagggaaaagccttcattattcagttgtcttttcttcctatgcttctgcattacgacaactcccgattagcaaatctattagttcacgtttccaaatattgtctgtacacccataggcatatcgggaatatagggttccccatataccttatccgtgcccagcagataatacgtattcaggttcatattgccggacaattttccgtcatcaccgttatagctgatgttcacgccctggatgctctgacgctcctgctgattgtaaatatatcgaaccagccccttgaaatcatcataggtacattcgatactgatgcccaaaggcacctcatacatatgagtctccgcataggtggttccctctgtggagacaggggatgtggtaaccgtggtcgtatctgtgcccgacactgcagcatctgcttccgctgctgcggtatccgccggtgcatccgcagttgcagccgccagggcagaattatctgcggaagcctgtgcatcatacgccacttctcctatggttccgaaagagatgtttgctacataggttctggtagcatcctccatgttcttcaccatcataatgctgtcttccggtaaaatatctgcaggaaaacgattctcaaacccggtaatatatgtcttcatcttctcggtagcagccagataatctgccttacgctgctccaacacctccagtgtagacacctgggatcttaatgacatattctgactttccatagcatccgacaactcattaaacttcgcatataccaggaaataagtcaccacgaccagaaggactcccagtaccgcgatcaaaagctgaatttcactcttttttactttcatctcttatccgcctcctactgtgctgtggtaccggctgcatctccggtgttttctgcctcttcgctatccgcgtggatatctgcatacgtacctgtaatagagaaagtaaccgctgattctcccagttcattctgcgcatctgtaatattgctgatctgcacatcctcgatgctctccatattgcggatattcagaatcgttctcgctgctgcagccttaccttccacagttacagacatactgattccttccatatccgaactgaagctattggtccagaagctactgggtaatatctgctccagctcattaatgaactctaccagattctcattggggttctccgtatattcatacaaatactgatatttatcatactgtgccgctgttgccaggtaatcgttgtacactgcctgcgcgggctgtaattcctcgactctcgcctgcaatgccacattctccgccacggtgccgaagtatctggtcagggaagtgactgccatggcgatggacaggatcacgcccaataccagtaccgccacactgacgaaggtgtagttcgtaccgctgactacggtcatgcccttggccttctgctggctcttatcgatcagtcctacgggggcgagtactgcgcccaggcaggaaatataggctgcgggtctggtggaacggatggccttgctcatgccgatcttgtcttccatatcggacaaggtatgtaccttacgctccaggcagttggtgaacagcttgctcatgccgctgaagctgccgccgagaccggtgacgaaggtcttctggatcggattgtcaccgttcctggaatcatagaaatcaatgacacggctgacgccgacgatcagggtctccagggaagaggtgatcttctgtctggctgctgtgacctccacattgccggcatcttcgtcttcccagcgtccggcattttcctcccagagtttatctccctgatggagtactctgttcaggcaggtcttcttctggaaacgttctaccgcgctcatgggatcgttcacggcataggcaccggaagcgatcatggtctcgatggcatcctgcacgccgtatgccacggttctctgtaacagcaccttacctgcggaaagcacggtcacgatggtgttgttctcatcgatcttgatcatcatggtaactttttcggacttctcatcacgaagaatctggtataagctgttgctgctgtaatcgaagcactcaacctcccagccgcacatctgcgccagctggtaatagctgtctaacagcgccttgggcactgccagtgccatgacacgcagcttcccttcctcggtcagtccgcctgccagataatgtccgatctcatactgggtcagatccacgggaaaataatcgttcgcattggtcttcaccagtgcctcgatcttgttcgccttcacgttcgggatctgtacctcacggctcgccactctggtagaagaaatggtgaagatcactctcttcgtgtggataccattcgtacccagtgcgttcaccaggtgatccgcatactcctgcgtcggctgcagcataccgtccaccacgacgccttccggggtctcgacggtcaataccttatagaccttcggtttcttcaccttatagtcgatctcgcagatcttcgtaaaggagttgctgatctcaatactcaatacgcgattgttcattgccatgcttctacccttcctcttatcggttctttatcgtatttgggacagaaaaagtatcccaagaactttctaatctcatatcagatgcaagtacccggtctcaatgatatagccccagataccactgcaagaattcattgccccacaggacagcgactgccacccctgcggagagatacggtcccatggcgaggacatgcccttcgccgcttactttcatacggatcagatggatcacggaaccaatgatacatcccagtaaaaatgcgaaaataatcaatttccagccgagcagcagtccgcagaccgccatcagcttcacatcaccgccgccaatggctctgccaccggtagcgtaatacagaataagcaaaaatacactgacacacaggaagccgatcaggaaatccagccactgtgtatagtggaagactccatggatcagccccagtgccagtataaataagttaaatcccacagggatctcatatgttctgaaatcaatcacacttaaagaaagaagtgcactaaacaacaagcagtagactagggaatccacgctcatcccatacttccagaatacgagcaggtacagcactccgttcagtgcctcgatgatggggtactgagcggagatatgtgccttgcatttccgacatctgcctcccagcgccaggtagctgaacagtggtacgaggtcgtaccaccgcagctgataaccgcagttcatgcagtgagacctggtcgttacaatattctcttttttcgggatacggtagattaacacattgaggaagctaccgatgacgattccgtagaggaaaatcactatgtagagaagaattgtggggagcatatcggttgcctttcaattttaattaaggagtgccaatgccaagttctgtagccaaatcagaattatctgtcgtaaatacaggaactcctgaattatccgtaatggtaattgtcgctgtaccatattttgagctcttcattttcacattggtaatagtaatagatgatgatgttaaagcagcctgtactcctgcacctgttgcagaagatgcagctcctttagtacatacaactgttccagatccaagaggagttgttgcctgcacatctgatgcatatacctgtaatgcagacataatttcctgatagtttgttagatcagaagactctcttgatctttcaacatacttcaaatactgaggagctaatacaccgatcagaactgccataatagcaataacgataatcagctcaaccagggagaaacctttgtttgttaaactcttctgtttcttgttcataataacattctcctttttatgtgttttttaatttcagggtagtaagttttccgccccatttattaattatcgttctgtccctacacagaacggataatccaaagcaaaaacgataattataaattatcaagtgctgcatacattgataccataggtgccatacatgctgcaatcaatccgccgactacgatagccagtacaataataatcataggctctaatgcagccatcagagactgaatttccatttccacttcttcatcgtaatagtcagcaattttgtcaagcatttcctccgtactaccagcttcctcaccgatacgaatcatctgatataccataggtgggaacagtccactctcctgcaaaggtctggataacggcataccaattgtaatttcttcccgagcatcttctaacgcttctttaaaatagatattactcattactcctgatacaatatctactgcttctatcaaaggaactccggcccccatcaaagtgctcaatgttcttgccatcatagatgatgcagatttcaccgtaagtttcttaaagaggggaagtttcaatgcaatttttccaaatacatgttttccggaatttgttcccgcaaaatacttaatccctattaccaatgcaatcactactggaataataataaaccaataattctgaataccgtgactcaagttcacatagagtttggtaatccaaggcagatccgttcccagctgactaaacatatcctcataagaaggtattacctttactaacattactatagttacaaccacagctacaatacacacaactacaggataaatcattgctttttttaacatcgcctgcgtcttactatttttttccaattgtactgctactcgatccagtgccgtctccagactaccggatgcctcaccggcagccaccatgttcaccatgatcgccgggaatactttcgggtgttctgccatggagtctgccagggtctcacccttttccacgctgatgcggacttccttcagtgcatcctgtaatctcttgttctctgtctgttcgcagagcattttcagggattcgaggatgctgacgcccgctttggtcatgctgacgaactggcggcacatgacgcttagatccctggccttgggccatcctccgatctggatgtcgatgtctttcgtcaggaagctctgttctcccagattgataacggtcagctcctgccttctcagttctgccattgccagatctttgttatccgcttccaaacttccctttacttcttttccagcctttgtgatggccatgtagccataggtcgccatgtgccttccctccaattacgtctctatctttaactgtctccccaactacgtaagacgagccccggtcctgaaaaggtccaggtttttgaaaaatttttataaattttgataaatttctataaaatattgcggtttttatagaattatacgtcaaatgatacctttaccatctcggagaaggaggtggtgccatccagtacgtagtccgtggcactcatacgcagggtatgcattccttcttttaatgcttcttcctttaagatatcggcaccctcccgcttgctgatgatcgtttttaacttcggagtgatctgcatgatctcgtagacaccgatacggcccttgaagccggtattgtcgcatttgctgcagccgcagggctcgtagatggttacgttttcctcttccttccgccccatgaattctttttcatccttggtggcctgcttcggcttcttacagaaggggcagagtctgcggaccagtcgctgtgcgataacgccgatgacggagtctgcgatcaggtagggttcgatccccatatcctccagtcgggtgatggtgctggcggaggagttggtatgcagggtacttaccaccaggtgtccggtgatggatgcctgtacggcgatgctggcggtctcctggtcacggatctcaccgatcatgatgatatccgggtcctgtcgcaggatggaacgcagtgccgtcgcgaaggttaagtctgccttggtgttgacctgtacctggttgataccgtcgatgttcgcctcgacaggatcttcgacggtgatgatgttcacgtcttctttgttcagctcgctcagtgcggtatacagggtggtggacttaccacttccggtcggtccggttaccaggatgataccgtgaggatttttcagaatatagtcaaactgttctaattcgtagggtttgaagcctaactggctcttgtcgcggttcagggcactcttcgcggcaagacgcattacgactttttccccatatacggtaggcaggacggatacacggatatcgtattccacacggtctacgatctgggtgatacgtccgtcctggggctttctcttctcggagatatccatgccgccgatgatcttgatacgggcgatgatggcggacagtacgttgacaccgtatctcgctctctcatagagggcaccgtcgatacggtaacggacacggatgatattttccataggttcgatatggatatcggatgcacgctggcggacggccttttcgatcatgtccttgaccagcattacgatgggggagctgttgatgttctcctccgtggcgatatcttccaccacatccagctttttctctttggcgtaggcagccagtgcctcggttacttcttcctgaccgaaatatttatcgattgccagcatgatgctgcgggtggtggctactacgggctctacctggaagttggtgatgatattgatgtcatcgatggcgttgtaatccaggggatccgccatggcgaccatgagaacgttgaagttattttctttgtaagcaaaggggaagatcttgttcttcttcagaacgttgaccggtaccagattcagcacttccttgtccacattgatgctctggagatcgatcatatccagatccagctgtttgctcagtgccttcgccaggtcatcctccgatacgatgccttcgtctacgaggaattctcccagcttcttaccctgacgggcgggattgtccaacgcctgctgcagctgttcattcgagagaacaccgctgtttaccagtaattcacctaaacggaccttttttctgcctaattccatgatcattcacctgttacttttacatatttgggatatctgtataattgtagcatttttcgttataacttacaatttttttggctcaacactaaaatattatagcatattttagatttatgtaaattgtttttagtacttttgttgcaatttttctaatttaaaaaaacgagaggctatcacgcctctcgcaaaatccttcatcactcggtcaatttttattttaccgtcctgtcagaaccgtcacaggactcatcgctcggtcaatttttattttaccgtcctgtcggaaccgtcacaggactcattagatagatgaagaagaacatctctgttctcattagttagtatatacattttctgaggaaaaaacaatctgtttttaaattatgaagcaatttcagtaaaataattttttctattgttttcttttatatttcatcgtacaataggtttgtcttatttatagttttttcacatgccgattctaaggcaaaattcccaccatttattgacattacgtactatacgtgttattttagaaaggagaagtaatctatgcgttttcgcgaattagagcgaatcgttcttgacgatggatggtttctgaatgatgtcagaggatctcatcaccagtataagcatcccacaaaatcaggaaaagtaacgattcccaatcacagaggtgatattcctctgcgagttgtgaattctattttaaagcaagcagggttaaaatagtaaaaggtaacccttgaaaggagaatgtttatgaattatgtatatcctgctatattttatccggaaaccgatggcaaatactccgttatttttccggatcttaatgatcttgctacttacggcaacaatcttgccgatgcatttgtcatggcgcaggaagcctgtggtcaatacttattcacctctctaaaagacggtgaatcacttcccaaccctacaacaattaatgcagtgaaatcggatgatcccactgcattcataaatcttatctgtgtaaatttagataattatgcccgcgcctatgatgatagggccgttaaaaagaccttaactattccggcgtggttaaatactgcctgtgaaaactacggcatcaattattctaaagttctcaaagacgccttaattgctaaattgcagcaagtacaaatgtaatcttacaacagtgtcaccgcgtattcactgtcgtacattttcttcagattttccacgctgttatatttttcaccaatgcagaattccttggaccaggtcatgtagtaggcccaggggattctgcttttttgtaggagatccacatcgggaaggtagcccacttctgccagggcagccactttgtcacgggaggtggctgccaccagtttctcatagacatctgcatagtctgtggactgatactccgggaggtagacatccatggatactacatccacgtattcgtctccaggataggcttcctctatatcgctgttccagacccagagcaggttatgcaggttcttttctccggtataataatcgaacatcaatcggtataagtctcttgcgactttcgcgccctttgctccccaccagaaccaggtgccgtaggattcgtggaaggggcgccagaggatggggatgttctcgtcctggaaacgtcgcaggatgtctgcgatcacatccatgtctgcgtagaacgctgcgcgctccggggtgccttcctgtaatactttcgtcgcatcgaaatcggtatgctcggtgtagaagcttttgtctctgccgcctaagggcgagaaccagtggaaactgaaggtgagaataccgccggtggtataatctgtgctgttctctgtacccgtgtcgttcactttatccgggcggttcgctctagcccactgcagggcggtctctaccgtgcctttattctcttccacttccttcaggcattctggggaagcgtctgcataattgatattcggagaatacgccagcagttcaaaaccgcgcagctttggctcttttccagtggtctgccggatataggcaatctcctcacaggggatggtctgggtgtgctgaccggtgatgatctgctgtcccgctgtatttttgaggtattccaataattcttttgcttcttgtgtagcttttgcatccgctgttgtcatatattatatttttcctttccatgggcacagattgagttcacggcagcgtctgtgcccttctcgctcttttttgtgggcccagcttaagcttacggcggtgtctgtgcccttctcgctctttttcgtgggcacagattgagcttacggcggtgtctgtgcccttctcttcaaaattgtgcaggagtaaagcatgctttcccgcaaagcataaaaactaagggtacagagactaaatttccgtctctataccctcagtttatgacaatatatcatttatgacaagcactattccgtatggcaagtactattccgaaccgcaagctctattccggctttatacttcctgataatcgttaccggtgtcgttcttctctacattctctacaggctttgtatcttctgccttttccttggcgaagccctttgccagcatctcgttgatatcgagtccggtggactctttgatgccgtcggtgacctgggtcacggtggtcatgatatcacctgccagcttgctggaatcgccgccgaacatcttgatggaatctacgttcatgtagcccttagccacagcctcggcgatcttgggcagctgctcgaagtataccttcagagtatccaactccatctgctgtcttgctgcgtcgccgtactgtttcatagcttctgcttttttcaggataccggctgcctctgcctctgccttcgcctggatggcttctgcttccgctttacctttggctgccacagcggctgcctctgccagtccggctgccttgactgcctctgccgcctgctccttggcgaatctctctgcctcggattttgctttctcagcttctgcctgtctctggatctcgaagagttctgcctccgctctcttctgtctctcgtactgctcggcatctgccttctgctgtgctgcgtatttattcgcttctgcggtcttcttgacctcagcttccagagctttctccttgatggatacttctctctcctttaattccagttccttctcctgacgggccaggttcgcgttcgctgtggtgatctccacggtcttacgctgttcctcttcctgaatcttatatgctgcgtcggcttctgccttcttgatatcggactctttcttcagttcagccttcttgatcgccagctcggtctgcttctgggcgatctcggtctctgcgatgacctgtgcatcattggcatccttctgtgcctgtgctctggcgatggccacatctctgtctgcctgtgcctttgctacggatgcgtccttctggatctgggacatgttatcctgtcctaaagcagtgatcaggttgttctcatcctcgatcttctggatgttgcaggactcgatccagatacccagggcattcatatccttctgtgctttcgcctgtacctcgtcaccgaaggtcttacggtcgttacacagttccttcaggcactgggtaccgatgatctcacgcatgttaccctgcaaggaatcggtcagtgcatcgcgaatctgatcttcgttcatgttcaggaagttcttcatggctgcgttagccatctcggtggtgatcctcttattagaatcggcacctgccactacttcccctttggcattcacggtgacatctctctgggtcaggactctgaccttagccacggcgtcaatatctacaccgatgaaatccttggtggggatatagccgttggtcttgatatcgatactgatctgcttcaggatcagttcatcctttttctccaggaaggggatcttgataccggcacgtccgatcaggaccttaggttctctcttaataccggagatgatgaaggctttgttcggtgatgccttcacataaccggatgccagaatggccagaatggcaatgaccaatacaacgattgcgataataccaatgttaatttccatatgtactccctcattctttctgcttttgtaatatatgaaaagctgcttgtatgatatgtattttaccatacaggcagcttgacgaacagtgatatctattattttttttcaatttattgtagcaaaatgcgcacgatattccacatgtgttaccggatctgagccaggtcgtacggtgttgcctgatatacatagtaattcagccagttgctgtaaaggttattgcaatgggatctccactgtaacagtggtctctgctccggatcatcatccggataataattatagggaacctggatcggcagtcccttgtccaggtctctgtgatactcattgttcaacgtataacggtcatattccgggtgtcccgccacgaagattttcttgccttcctctgcgatagccaggaatacaccggctttctcggattccgccagaatggtcagctccttacaggcatgaatcgcttccgccggagtctcggtatggcggctgtgcggtgccagaaaaatatcatcaaagccacgcaccaacggtattttccggttggatactttatgttcgtagacaccgaacagcttctgtgacaactgtctcttgttaataccataataatggtagaatccggcctgcgccgcccagcagatatgtagcgtggatgtcacatgggtctccgcccagtccaagatcttacaggtctcctcccagtaatccacctcttcaaaggtgatatcttccaccggtgctccggtgacgatcagtccatcgaaggtgcggtctctgatctcatcaaaggtggtgtagaatttattcagatggcttgcaggggtattcagtgacacatgggtcttggtgttcatgaaagtcacatccacctgcaaaggggtattggacaaggcgcgcaacagctgcagctccgtatcctgcttgaccggcatattgttaaggatcaatacctgcaggggacgcatgtcctgatgcagagcacggaattcgtccatgacgaatatattttcgttctccagtatctctttggcaggcagatcgttttgtgtcttaataggcatttcattttcctccaggtctacttattcctcgtaaggaatattataagtcttcaggaaatcctcctctgtcaggatcggaacctgaagctccttcgcttttttatttttggaagaagtcgaggtaatatcattattgatcaggcaggtggtcttccccgtcacactgccggtgactttaccgcctctctcctcgatgacttctttcagatcattacggctggcgtaatggttcaggcttccggttacgacgaagctcataccggataatgtctgtgcattttcatccacctgagggacctcaatggtcaggaactgtttcaggtgttcgatctgttttaggttctccgcatcggacatataatccgtaaatgccccagcaagcacctctcccacaccgggtactgcgcttaatgtctccgtatccgctttctgcattttctccagatcataatcaaaatatctgcagagcaccttggcattggcaacaccgatccccgcgattcccagtccgtagatcaggcggggcagcgttgtatggcgcgcagcttcaatgctgtctatcatattctgataagacttctctccgaagccctccatctgtgtgataacttccttataacgatccagccggaacaggtcagcatattcgtggatgaagccctgatcgatcattttctccaatgtagcttcggagagcccatcgatattcagggcatcacggctaacaaataaggtgtatgccttaatctccttcgccgggcatttctcattggtgcaatacaaggtctgtacttcattcatctgacggatctcggtaggttgtccgcagacagggcagaccttcgggatctccacgttgtcactgccggtcagattctctgcgatctgggggatgatcatattcgccttatagactgtaatgtgatctccgatccccagtcgaagggaacgtaatatgctgatattgtgcaccgaggcacggctgactgtggtaccctccagctctaccggctcgaagatggctaccggattgatcaggccggtgcggctggcactccattcgatctcttttaaagtagtctcgcgaagttcatccgcccatttaaaagcaatggaatctctggggaattttgcagttctgcccagggactgtccatagctgatgctttcataggtaagtaccagtccgtcggagggaatgtcataatgctcgatcttgtgttcaaagtcttcgatgactgacaggatattttcctcggtcaccgccacatgttctaccaccgcaaatccctgctcctgtaaaaaggcaaactgtgcttccttggaatcgtggaagtccacatcgtccgcttttacgagggtaaacgcataaaatctcacgttgcgttttgccgtgatctcattattcagctgtcgaacggatccactacacagatttctgggattcttatattttgcctctgcatctgcgatctcaccgttgatcttctcgaaatcactgtaagtgataaccgcctcgccccgcaggatcagttccccggtataagaaatatttaacggaagattcttaaaagtacgagcgttattcgtgataacttccccgatctcaccatttccgcgggtaaccgcttttgcaagttttccttcacgataggtcaacacaatggtcagtccgtccagtttccagcttaaaattgcagggttgccctgcagccagtcccgcagttcttcccggcttttggtcttacccagagacagcatcggactctcgtgacgttccttgggaagctcatccaccgcttcgtagcccacattcaccgtggggctgttcgccagggtaacacctgtctctttttccagttccaccagttcatcatagagcttatcatattcataattgctcatgatctcccggtctttggcataatagctctccgaagccgcattcagttgttctaccagatatttgatccggtctatcttggaagactgcatattgtgttcctgcctttaaaagattatttacgatttaacattccggtatctgtcagaagcgtttccagttctccccctgtgacctcacgccactctccgggcttcagatctcccaggcggatattcatgacgcggatcctttttaaggatctcactttcgctccgcaggcttcgcacatccggcggatctgtctgttgactccctgagtcagtataatctggaatgtatattttcctattttttctatcttacattctctggtagtgatatcaagatccttcagatagatgccttttctcattatctccaaaaaatcgggtgttatttcccggtcgatctttacaatgtactctttttcatggcggtttgctccccgcatcatggcattgatgaggtctccgtcgttggtcagaaggatcagtccctcggaatctttgtccaggcgtccggcataggtcaatctctccggacagtggatcatgtccatgatctttttctccgcatgtggatcccgctccgtgcagacgacgcccaccggcttgtagaaagccaggactttaccggtctgtttctcctgtaaaatcttttttcccacctgtacggtatccgtctctaacacctgctgtcccattcctgcgacctgaccgttgactaagacttttccctgttcgatgagtttgtccgcatctctcctggagcatacaccgcactgtgccagatatttattcaaccgcatcctgcatcctctctgcggcatccgccgcctcgaaatcgctaagactcttcaccttgggaattccgttaccgttcgccacgccgagttttgctgtctcgtccgcgagttcattgtattttaccttggaatgtgccggtactttcgtgaagcggatctgtatcttctgtccccagcctctcatggtctgtgcgtatttctgtgtcagttcatttttgctcttccacgcaccggtgacccatttttcgatcccctcgtaatcatacctgatctcaatggctcgaaatccactgtttaaggcaaaccgtaccgcatacatggctcccagcatctctccggatacatttcgctgtttcagggagtccgggttatcgccgttaccgtattctgtatagatccgtccgtcgggaaggatgaaaatacagccaaaaccgtattttttcagtgcatcctgatagcttccgtccacgtaagccaacagttctcccgctgcggggcagtcctttggatctgcattttccggatatcttcccaatccctgccactgtgccatagtttcgtctgtctccttttcctgtctggtctgtcgtatttatcggataaagttggtcttctgcgccggttctctctccgggaaactcacaccggcagctttgcctgcttctatacattttaacagccacgccatattattgcccaatgtgcgcatggtctgcataccttccagatcctgtttcacttcttccggtgtattgccgtggacctggttccagtactgactggataccaccggcatacagttaatggtaaaatatttgttcaactgatcgaaagccgcggaggctccgccacgtctgcagctgacaacgcaggcaccgggcttgccctggaaaagtgcactcttaccataaaaagcccgatctaagaaagaagtgatcataccggatgccgatgcataatgcacgggagatccgaacacgaatccatctgcggtcttcgctttttctacgaattcattgacgccgtcctcacggaagcattttccggtctttaaacaggcaccgcagccgatgcatccggcgatgggctctacgcctacctgaatgatctctgtctcgataccgttcttctccaatgcacccgctacctcttccagtgcagtataggtgcatcccttcgcatgtccgcttccgttcaccagtaatactttcatatgttatccctctttttcatcatttataatatgttctgttcttgcatgatctgttttcgcatgctactatatccgtaaattaagcagttttaagaaaggagtccttatgccgtctaaaatctctcactatttactgtccatactgtgtatcggatgccttatttttctgatcagtcattacggcgtgcagctttatcaggtctccgggagatccatggagcccacctgccattccggatcttttttactggtacaaaaatttggcattcccgaacagatttcccgttttgatattatcaccatccgctcagaagctcttgacaaccgaatgattctaaaacgtgtgatcggtcttcccggtgagactgttcagatcatggacggaactgtctatatcaacggttcacctctctacgagccctatttttcagatgctccggctctaaccgatccgggaaatgcctctgttcccataattttaggtagcgatgaatatttcgtattaggagacaatcgtccggaaagtatagacagtcgttccgataagataggactcattcttgcggattccattaccggaaaagtaattaatttaacttctttttaagagccgctaccagtttttcattgtccttttcatctctgatcgcgatccggatataatttctgccttcaaatccttttttggtggacaaatctttaatcaaaatattatcttcatccagaagatcttctgccagctttgttgcagattctccatttgttaattcacagagcagataattggcctgagaagggatcactcgcaatccccgcacttctgccaatgcatttacgaaagctcttctttcctgtcggaacttatccatagctgctttataatctttggcatatttttcgtagatctgaagatagaattctccaaaggaattaatattccatatagagacatcctttttcaattttgcaatcatttctttattatctcctgctaaaattcccaaacggatgccaggtactccatagctcttggagatactcttcattacgaacagatgaggatattgtgtcagaactgcctgttccagaagagaactgtcagcttcatccgcaaagtccacaaaagattcatccacaatgaggcagatttctctttcttctgcccacgctgccaacaacagcacatcttttttcggtatataattgccggaaggattatcgggattgatcaacagcaatgttttaatatctttatctgcatagtagttcatcagatcctctgctgaataagaatagtcttcattcgatggcagaaaagcaatgacatcctctgcatttttgcgattcggatattcttcaaatgtaggctttaccacacctattttccccggcagctgctccataagagacttgatcagttcgcttgccccgtttccgacaaccatctgatccttatgtaatccgaaatcctttgcagcgatcaggctgtttacactcattccggaaggatactccgtcaaaagtgtctcaaaattgctcttcatttcatcaacaagcttacggcaggggaagtacggattcacaagataacagaagtccaacaatttaggatatctccaatatccgccatagcggctctgcattctcttcagccgttcttccttcgtggcaaacaaggtctctgcgatgtccagatcctgcacatcatctatttcataccatttttctccattcagtttaacagccttgatctgaggatcatccaggaatgtaatgaccttcagcacctgttcgtaatattcatttgttccaagtgccttacaatatgcttccaaaaacggaacataatgcttctgggagaattctttactgaacttatataaatttaccgttttatagtattcatctgtcttgctaaaatcaaattctctcttactcaaaaaagctgtaatattgtcatcttcatccagcgtaacacaggttccgtccatccaactctcaaacttatccaccagtgtcagagacgaatacggatgatctaccagtttacggatcacggcttcttcatagacaagatcagattccagcaacagggtgtcatcctctaccagtttttccttggcaagatataaggaatagatattgttggtcttataatagacatcattgtcaataaactctaacggtgttttgatatttaagctttcgacataacttttcagtttctgcccttcatagccgatgacaaacacaatgcgcttaagcccaagcttttctaaatgttccagtgtcttttctatcatggtgacaccgtttacttcgaccatacatttggtggcattgcttgttaattcctttaacctttttcccattcccgctgctaaaataatagcctgcatactcattctttccttctttttccgcctgcttacttgtcctgcttatcctctgcctgatccatcataatgtcatcggactctacttctttgtttctgttctcatcaataccaaggctcttgtcgatcttcttttttgcctttctccagtaaataccggctgctgcacccactgcgatcactactccggctactgcctgaatcgcatagttcataaccgaaggatcgatataagcatcggctgttccggaaaacagtaccgcaaatgctgctgcaaaaaatgcaacctgtgcgatcttacttaatttcttcataattttacttacctctttcttttactttttatttatttgtaatttctgttttacagcttattgttcttttgcttttttgatctgttcctgcactgcctgtacgatgtatttcgcacctacctcggcactgttgcccaggttgtatacatactcttctacaattttttcaattttatcatgataagcatctttttgctccagcagatttctgaccttactttcggtctcctctgtcttcgcaggatccaggcggtctccgatgacatcacgcatccagatattgataggtacagtgtcgatcttctgatactccggattcatgactttcatgggagtatccacgaagagtaccggtttgttcgtggcaaacgcatattcataagcgataccggaccagtcggtcaccagcaggtctgcctcaaataccgtgctgttggatgaaaaatcggtctggatctcaatatccggattattcgcataacgctctttcaggcggtccatcttgtcctgctgtaagcgtacctgctggggatgaggacgcactaccacttcatagcccttacctgacagatcatccagcataccttcgagacagctgtccacaatgttgtccttctgccaggagggcgcgatgagaatatgctttttctcatgaggtgtcttgtctgccttcttgtaatcttcgatcatgcggtctaacagacaatatccccaatcaatcagcttcttgggaggaagaccgtaggcttcctctgtcttgcggatctcctcggtatgatgtttaccgacacaatatactgtatcgtaatgatccatggatccggtacgcatggtcatattcaggctgtccatgccatgtgggatgtagatatattcaatatcttttctcacatagctgcgcttgatatgaaaattttcaatatccggcatggtcatgaccaccacatccgcatccatcttcatcatcagggtgatcagcttcttctccccgatataataggcacggatcttgttctctttttctgccagtgcgaagatctgatcctcagggtcactggtaatataatgaattgtcagattcgtatgggctaacagccattcaatgattccctgataatatttatagaagccactgctctcggaataaaataccagatgcttattcaccaccgagaagaaacgcttgaagtccttcttctctctcttggcataaggatttctcgcaaaaggctttttcctgccaccgatagactgtaattcatccagttcctgtttgctggcctccagtgcttcgtaatccacatagtcttttggattaatggcccagtttaacagatactgctgtaagattgcaaacagattgctggcgatccagtataatgccacacctgcaggaacaaaccagcccagatatagggaaagtcctacggaaaatgccatcataccgtatttgttcagtttggactgttctgcctgaatgacattggccgcattctgcgccacacataacaaccatgcggatactcccgctgcgatgggcacaataatatcaatgccacccacttcggatggtacccagctcaagttaataccgcagaaatccaaagatatgctctctacctgctgtaatacagaagcgatatccacaccggcaagactgctctgtaatgctgcaaactgctctgcgtagttgccactcttgatcatttccactaccgtaagctgaacggaagagctctccggatgcacccctgccagactgatcgccagcccattaaatgcagtgatcacatcctgagacatatgcagcagataatccaggggatgatagataacctccaccagtcccatcaacagaatgatctgaaccgccaggggaattaaagatgccaaaggattgtacttctctctcttgaatatttgggactgttcgtctgcgatccggtccgcatcaccgaaatgttttgctttgatccggttgatttcgggctgcatttttaccattttaatggaattcttctgtacccatactgacaccggtaaaaggacgatcttactgatcagagtgaacagaataatagccaggccgtaattatgtagcagataatagcaaaagtacataacgtatcctaacgcatctgaaagtattcgcatgagatctttctccttttagtcaatagtactaattataaacataatcctgctttttttcaaccttatgttcaaaacaggcagaaaaaaacaggcagtatctgctgttcgtagaacagaaataaccgcctgtctgatattttattcctctgtgggtttctcataatatgcaaaatcgttcttgccgttctttttcaccttatacatggcatcatccgcgcatacgatcagctgttccagattatcggtgtccttgggatagcttgcaataccgatactgccgccgatccgccgtttcgttccgcagagtgtcacatctttggcaaatacctgacgacactggtacgccgtcttctccaccagcatgctctgactgctgtgaaggatcaggatgaattcatctccagcgaaccgataagaggtaagtatctgggactgcatgtccttcagccggttggctacctgctgcagtgcctcatctcccgctgtgtgtccgtaggtatcgttgatcttcttaaaattatcgatatccagcatcatgaccgtgcaggggatccgggctccgatcagctgctccagatccttcatgaacttgctgcggttcggaagtcccgtcaggaagtcatgctgggatgccgattccatgatcgcacgtgcccgctccagttcctgcagcagttttcgtctgcggtaattatcgaaacacacccagcagataatgacattgagcgcagcgataagtattagcgccgggatcaaagcctcacgattcctggtaaaaaagccctcccgatgatttacaaattcggtgtctttcggaaactgtgatgcctccagtccgaacttccgcatgacgtcttcatccacgcaataaatgttggggctgtcctttaccacattgatctctgcactgtcggtaccattcgcgatatccatggccatctgtgctgcgatctctccggacttatacatggataccacattaccacccagcaatccgtcaccgatcccggcctccaccatacggtacaccggcaccttggaataagtcacgagcatacggatcgcctgcgcattggtatactgcttgccactgccatcatttgacattacaatgtagatcaatatggtattctcatccaccttgctgactgcctgctgcagcttagcggttgtcagttcggaagaattgatctcagagaattccagttccggatattttgcttcggcactgtaaaaattcttacgctctgcctcaccggtcacagaatcatccaatatagccactactttgtccgctgacggatttacctttaatgccatatcgatatttttttccactgacagcttctccagtatcccggttaccaggggattcttcgctgcttccagggcatattcctcatcattgacaccttcaaaaacaatggggatgccatcaaacagttcctccctgaatgtcattgcataacggagtgcggcatcatctcccacgatcacgacatcatagggatctgaatgatccagatggtacttcagcatttcgtcaaacattgctactgactcttccgtccggaagcgcttcgtatccataaattcataatccacggtggtattctcgtccacccccgccttgattccttcgatctgtgtctggactgtgtcccatccataagaatacgagctgataaacagtacccgctttccctgattcagattctgtgcttctgccttcattgacaccgtcccaatagtcccaatgcctatgagaacagccaatgcaaacagccatgctttccactttctcatattctgtttccccctaattccaacattatgctaccgggatcaaaagtctgaactcaataccacgatataaggaattacatcactggtactattgtaccacattgcctgctgaaagcaaagagcttaatttaatcttacgataataccctcttcttttttctctttcatttttccgataacggtagggattgctccgagcgccacaaacagatactgtagaaccagattgcctatgtagcttcccatatcaataatttctgcggaaagtgccgcagggatcagtcgataacactcgaacagactataacctgcttccgcaccgccgccctgattgaacaaaataatcgcccagtccacacggtctgcaaaatacgtcataaggatcatgatcacagcgctgatgactactgcctttttggtcagttttccgcccagcatctcatatcccttcagaacgcacaccgccatgatcacaccggataatgctgctacatatcccaactggcttaagatcagaacactgagcattcccaacagggatcctaacagggcacctacaataccgcctacgatgttttctttcttctgcgccttctgctgtgccttcattgcgatgtcactgcgcatcttcatctcgcagtccggacataaatgatagtattcactgcccattctgaacgctccggtctctacattctgaccgcacagatcacagcatggactgtaactgtttgtacgcaggaatgtcgttgtagctgcaagtgcttcgttcaatgtatccttacatttttccgcattggactgtgccttcagtgatactctgatatccagattcttctgaccaaaactcgcgatcttcttgctgcttttctgaaaccctttcactgcctgcttgtcaaatgtcgacccgtcagcgctttttgccgctgtatgcagtaccatcatatacggatatcttgcatcgggtgcatagacgataaagtcaaacccatcccgttccccatgaaacaagtcattggtttcatcataacgcaatccggttcccatggcaatctgctgataattttcaatcttctttttctgattcatttttcttcccatcctttgtaatagaaaattagtaatcgctctgaaaagttacgaaaaccacacttttccattttacactttaccgtgtcaacatgcaaccctattagggggtttttagccgattaacctattttctatgaaaaaactgtaggcacatctgtgtaacctacagtttttgaacttccttataaatagaacaaggtaatcgaaatcacgcaaatacggatttgcattccatcagcatttgatctcaaggtaacctaacagcttgctcatatcatactcttccatcacgcccagattggaatcgtagaacttgccatcgtaatgtaccagatagtggcagaagcgtcccatcttctccatcatgatgcagcacttaggcagtacagcgggtctgccctcggtatatacgatgatatcggtatggtcaatgccgtaatagttcagtgcagagatcacgcggcccatggtagcctgccactctctgcagtccataacgctgataacttctgcaatggtaacaccggctaacattgcgacacaagcctggccgcacagaccatcctcgggctggatgatcacgttcatgctgtcgatcttgcggatcgggttctcgaagctataagggctgttctggtccatacggatcagggagccgttaatatgtaacaggatcttgtggggcacacccagctctacctttacagcagcttcatcggtgatcacgatctcgtaattgcccttctccttgggatgaagctcacactcgatgatattgttatccagaacgatatctcccttgatgccttctctctgatgacatacttcccatacattaaaaggaatctgaatggtatatccggcatcctttttttctactttagattcaaaaaaatatctcatgattcattcctccgttgcttttgctgttcccgaatattctcttaaagaaaaagatttacgaaagcggttacattttctaatttccttgattctagcaaaaatttccgcccttgcaaagagcttgtggaaaagtacttaaaaaaaaacatcctgtcaaaaaaatatcaaaaaagcgcccgttttaaaacagacgctttttataaatccagtgcatttaaagccctaaaattgcagatgcaacgcggaaatatactaacagtgacattgcatccacgatggtagtgataaacggacttgccattaccgccggatcaaagccgagacgctttgccaggatcggcaggaggcagccgatgatcattgcgatcactaccgctgctaccagagtcagacacacggatgctgccaccagcacccctactttatccaataacagtaattttacaaagttcgctgcggaaagtgtgataccgcagatcagtgccacgcggatctccttgaatacgaccttcggcacatcccggtattcgatctcattcagggacaatccacggatgactgtaacgctcgcctggcttccggcattaccgccggtatccatcagcatggggatatatgccaccagtaccgcacacacactcagagcatcttcaaaagaagaaatgatggctccggtaaaggtagctgacaccatcagaagaagcagccagggaatacgctttttgaaggtctcaaataccccggtcttcatataaggcttatcgctgggcacgatagccgccattttttccatatcctccgtggtctcttcttcgatgatatccacgatatcgtccacggtgataatacctaccagccggttctcattgtccactaccggcatggctgtaaagtcgtattttttgaactgtctggcaacttcctcctggtccatcagcgtattgatggagatgacattttcatgcatgatgtcaccgatgatctcgtcgccgtccatgagcagcagataccgcagagccaccgttcccaccagtctcctctgggcatctaagacataacagatattgatggtctcactgtcgagccccaccttacggatccgctcaatggcctgattcaccgtcagattctccttcaggtcaacatattcgaccgtcatgatacttccggcggaatcttccggatagcgcagcagatgattgatatctctgcgcacatcggggcttgcgttggtcagaagctttttgacaatgttggcaggcatctcctccagcagatcggccgcatcgtccgccatcaggttgttgatgatgttcgttgcttccttatccgacagggacgtgatgatcttctgctgattgtccatatctaaataggaaaaaacgtctgccgccaggtccttgggaaggatacggaagacctttaacatctcttcctcttccaattcttccaaaagtcccgcaatatcggcatcgttgagttcagccagatactggcgcagcttggtgtactgcttggtgttaagaagctctaatacctcttccagttctttgatctgttccatgatgatcctccttatgatgttttctatgggtgtaacttacatggcaacttcgccccggaagtgggttgtcagagctcttctgtgtacacttcataaaaaccaccacctttcctcatggaatccttaaaccgctatttttattttatttcattgactattctttgtcaacgaaataagtctctttcaatttctcaatttttacctttccacaggtggtttctgtcaggtttttcctgactttttcttcattttccatcgggataaataaaataaattttacgttttcggcatagatactgtccataggaacgatgccctgctgtccgaaatagtattgcagttttcctacatcattataatctgtcgtcacttccagttcacagccttttcgcaggatccccgtctcgcagtgggcaagaccttctttcaccgcctgggtgtatgcccgcaccagcccgccggtacccaatagggtgccgccgaagtacctcgtcaccaccaccgcgatgttgcggatcccggagcctgtcagcacctctaacatcggtctgcccgcagtgccggagggttctccgtcatcactgcacctggtcagttcgcctctgcttcctattataaatgcagaacagttatgtctggcatcccaatactttttcttcatttcttctataaaagctacggcctcttcctcggtttcacacttacggatcgttgcgatgaaacgggattttttctccacgatctctccttcgccgccggataataatactctgtaactgtctgttgctgccgtattgcccatgttaacctcacttatttttgttttccttcggattcttttccagtgtagcataacttttccaaaatgtgaaacaattctaaaaagcctttatttacatagcattatttggtataatattttcgtctgtatctcagacagaaaggacttgttttatgaattatggtaaaaaaggtgtccgagcgaagcagaaggcactcaactctaaatcacaaaaatggggaaggaagctcgcactgacctgtgtcaagatcatgctggccgctgtcgtaggcatcggcatctgcggtgtagctgccggtatcggtgtcttccgcggcatcctctcttccactcccacgatccggctgtccgatgtcgtggcagtaggcgaggctactatcgtatatgataaggaaggcaatgagatcgaccaatatgtcagcaccaactccaaccgtctctccgtaggcatggacgagattcccgactacatgggcaaagccttcgtggcgatcgaggacgagcgtttctatcaacacaacggtatcgacttcaagagcattctccgtgccggttaccagtttttaaagaccggcggtgaagaggcccagggtgcaagtaccatcacccagcagctattgaaaaataccgtctttaccgactggacttctgagggcaataataagatcaaaaagatcaagcgtaagatccaggagcagtatctggcactggaaatcaccaagtattattcaaaggatgagattctgctgcgttacatgaacgccatcaacttaggacaaaatactcttggtgtggaatccgcttccctgcgttacttcggtaagcactgcagtgacctgacgatttccgagtgtgctgtgatcgctagtattacgcagaacccttccaaatacaatccgatccggcatccggaagaaaatgcaaaacgtcgtgagacctgtctgaaaaaaatgctggagcttggctttatcagtcaggcacaatacgatgaagccgtggccgacaccgatgcggtatacgaacgtatcgggctgtatgatatcgactatcaggaagccaatgccactaccggctcttacttctccgatgccgtgtatgagcaggtaaaacaggatctgatcctgtccggttataacgaagccatggcagagacgctgcttacttccggcggattgcgtgtggaatccactctggatcccaagattcaggcaattctgaacgaagaatatgcagatccctccaattatccggagaacgtgaaatggtatctgaactatgcacttaccattatctctcctgatggcaccaaaaataacttcagtaaagaaaacatgatgacctggttcaaggaaaatcagaataaaaagttcaatctgatcttctcctcccaggatgatgcttatgcggctatagatacgtaccgttccgccatgttagcccagttgggtgtggaagacaatgcggataactacgaagagacgatcaccatgacacctcagccgcagtctgctatggtcatcgaagaacagagcaccggtcatattgtagccatgatcggtggccgcggctccaaggaaggccgtagaaccctgaaccgtgctaccagtgcaaagcgtctgccaggatctacttttaaagtagttgcttcttatgctcccgctctggacagtgccggcaagactctggcaactgtttataatgatgcaccgtttaactatgcagacggaactcccgtacgtaactggtacaaatccggttaccgcggcatccagaatatccgcagtgcgatccgtgactccctgaatatcattgccgtcaagaatatcactgtgatcacaccgagacttggttatgattatctgctgaacttcggctttaccacactgaccgatggtgttcaggtgggcaacgagatcaaatccgatgtgaaccagtctctggctctgggtggtctgacctacggtgttactccttatgagctgacagctgcttacgcagccattgcaaacggcggtacttatgtaacgccgaagctgtacaccagagtaactgattccgacggcaatgtaatcctggacaatacgaatcctcccaccagacaggtgatcaaggaaactactgctttcctgctgaccagtgccatgcaggatgttgttacttccggtaccggtggaaaggttaacttcggtggcatggccattgccggtaagacaggtaccacaacaggacctaccgacgcatggtttgcaggatataccccttattacactgctgctacctggaccggttacgataacaacgtagacctgaacaatgcggaagacggtgtctccaagactttatggcgcaaggtgatgaaacgggttcatgaggatctgcccaacacccagttcccggttccttccggaatcgtacaggttgcggtatgttctcagtccggaaagctgccgatccccggtctctgtgacggatgtgtttacacggaatactttgctgaaggtaccgaacctaccgagagctgtgatgtacattatcagggcgagatctgtgcttatgatgggcttcccgcaagtcctgactgcccgttcaaatacaccggtattgctacgatgcctctggtagaggatcctgcattacagcagggttctaccgtcatcatcaacaatccggacggtacacagacagtcagcacaccgaacaccagaactcagtgtcagcatgacgctaccttcttcgcaaacccggattacgaagcagtcatcaatcagcagcaggctgagatcaacgcacggaatgccgctgcacaggcgcagtcgcaagaatagtttttcaatagtataatatatttcaaagcaaaagaaagccctcagtaatcacatattcatgcgatgccgggggctttcctatctctcactttcacctatcgcaaacgacctccaaaaaacctttttctcctgatagcagaaatttcagataaataagaagtccccgaaagcatcatactttcgaggacccagtttttcttaattatatactatacaataccctgagcggtcatagcatctgcaaccttcaggaagcctgcgatgttagcgcctgctacgtagttgccttccatgccgtacttcttggctgcatcatccagattatggaagatgttcaccatgatgttcttcagcttggcatctacttcttcgaaggtccaggaaagtctctcactgttctggctcatctccagtgcggaggtagctacaccgccagcgttggaagctttgccggggcagaacagaacgccattcttctggaagtactcagtagcttccatggtggtaggcatgttagcgccctctgctacagcgaatacgccgttagctaccagctgctttgcatcctccagatccagttcgttctgggttgcgcagggaagtgctacatcacacttaacagtccatacaccatgctcaccgttcttcttctcatgatactgtgcactgggtcttgctgctgcatactcagtcagtcttgcacgcttaacttccttcacttcgcgtaacagagctacatcgattccttcgggatcatagatccagccggtagaatcggaacaggtaactacctttgcacctaactgctctgctttctggatagcgtagattgctacattaccggcaccggatacagcaacggtcttgcctgcgatatccttgccattgcactttaacatctcctctgtcagatacagcagaccgtaaccggttgcttcggttcttgccagggatccgccgtagcttaagcccttaccggtcagaacgccttcatacaggccggtcagtctcttgtactgtccgtataaataaccaatctctcttgcaccggtaccgatatcgcctgcgggaacatcggtgtcagctccgatatatttatgaagctctgtcatgaaactctggcagaaagccatgatctctctgtcggatttacccttgggatcgaaatcggaaccacctttaccgcctccgataggaagtccggtcagggagttcttgaagacctgctcgaaaccaaggaacttgatgatacctaagtttacagaaggatgtaaacgtaagcctcccttgtaaggtccgattgcggaattgaactgtacacggaagccgttatttacctgtacctgacccttgtcatccacccagggtacacggaacaggatctgtctctcgggagtaaccagtctctcaagaagagcgtccttacgatatttctcctcgtttgcttcaatcactacacgaagagattccagaacctctttgactgcctgatggaactcgggctgtgcgggatttttggccactaccatatcaaatacttcatcaacatatgacatctgaatgtcctccttcaattggtatacagattcatgacaacctagttgccatatgctttattataaaacgacttttttaattgcacaataaactttattccactaaatcgtaaaagtttttggcatttttctgtaaaaattgcacaaaaattatacaagtatacaatctgtgcgttatagcgcacagattgctaaaataacttactttgagattttataaatattcttttaatgttttgatattgctgttctccatggcaatcagctccttcgccagcgccctgctggcggtatccgccatctcttcgttatgtgccagcactttctccatctccagcactccgttgttgcttccctttatgatcatttccgctatatgtcccgtgccggtatttagaagtgtattgtatccgatgcccatcttaagcatcatattctctatagcattcgtgcgataaatctgtgttttaccttctaccagtttctgcactgctctgtcatgcagtctggaatattgcagctcctggtctgccactgtcgcagccagacggtcatcgtagattttatccgcaacagcatccagtgctttcatcgccatttccgtattacgctgtatttcccgatagatattaatttcctgtttgttcatcaaaaaagctccttaccgtttttggtaagaagctttccctgaaaatatttattttattcgtgcaatacgaattgttccgcagctacgctgcttccacaattctacctacattcggattccgctgatttgctgacgcaaatcgcttcttcctcatgtaggtgcgattttcttaagttcataagtcgccgtatgcaagcatccgcgagcttatgaacttagaaaatctattgcacatactcgctcttcacatatccgatctgtccgttgtatttgatcttgctccagtcgccttctgtgcctaccagctctgcggaatcaccgccggagagaactcccagtctgtctgctgtctcgctggccgatgcacgcacgttaatattggtggtggcagtaactgttccgatggtctcagttcccgctgcactctccgccggctgcaggaactctgtcttgatgtagccttccttgccttcgtaatccaccttggtccagccgttaggacgctgttccagaacctgcagtttcgtaccgccggataccttgcccagtttatctgcctgctcactgtcagagcttctgacattcacggttgtggtggtggttacatattgaggtccctgatcctctgcctcctgctgttcgccgttttccgtctgaatatcctgtccctccgtgctgccttcctctgttccggcttctgcgacctgcgtctctccggccacctgattggcaagcttctcgcctaccgcaatacttacctgagaatccagttcactgatatactgcagcacctccggatggtccaccataagttcattatattccacggtaatcttattattgaattccacaacatcatcctgcgtgctgacagtcttgatatattcatttacttcttcactgttctcaccacgcttaatatacagtccgccctgatcgttggtacatatatagagtgcctgatatccgggaacctcttcttcgtgacccacaaaagagatcttgtaatacacataggcgatcacagaaccttcctccggtcctgtcttggtatatatttccaaagtaggataatagtcaatgtactgagacagttctacataacgatacatatccttatccgagatttcatcgcatacggaacgaagtgtttcttcatcacctgtcgccatggcattataatacgttgcgatcagtgtataaatcgcaccttcttcgttggccaccaacggcacttcctccgtcgccgtctctgttgccgtctcactggctgcggatgcgatctctgcctcctgctgtgcctctttatgccggttactcaggctcaggcttacggatacggtaatagccaccgccactacaactactgccggaagcacgaccttattatgttttatgatataattgccgatggaatgtattttctctttccacatatatagtcctttccgaattctgaaatattccttgaattgcaaaaagccgcaagcggcttctctcatctctctccctataatcaaggtgatgtaaatgcatccgacaggaatcgaacctgcattaaaggcgtcggaggcctccgttctatccattagactacggatgcaaatattacaaatttgttacatcacctcgactataatatcataaaaccctacacatgtccagttaaaattaaagtatttttacacagcgctcctggctgctgtataaataaagctgatccgataaaatctcttccggagtcagctccgtactgtttacctcgacgatcatcttcttcagctcctccgcactccgtccctgatctaccggaagcagaataaattcatgaaccgaactgggaatcagataataatccccatccacccgtttagccagctgctccagcactttcgggtataaaatgcagcaggcaccgtatgttttcccggcatttgtcaggatcagcatgggaatctcccgtgccagatgttgtcttacatctgcctgaagctcctccagcagttcctccaatgcactttctatcggcataatgtcgcagggaaaaagtctgggagtatttttcacagcacaggcaaacaattctctgtccgtcacattccatgcagacatatggttgttgtaaatagggatcattccgttctgcactccattgccatcgtatgcatagtaaaaacaggcagccagatccagaacgggaatatacggcaccttttccaggaagcttcggtttttatcacgattgatcagccggaagcatatcctgtcttttactttttcaaaatccgtgaaaaatgagatatcgatctgttttcccacggcatcttctctgtacaccgtaacgatcttccggataatatccgcaaatgtcacaccttcctcataggcctttagaaaagaattcaggtatatggtgggcatcatgttttcctgcgccctgcgaatcataagtccctgcaggatcactccattattcttctgtacttctcttaattctacgctgtattcctctccaagcgcctcactgactgcacgctgtacttttgttctgaaaacggtcatttccatataaatacctccatgtatctccgaaagcgctgtctccccagaccggcttttacccatgtggtatttcaaattgcaacaaaaaaggcaacaagtacaccttcgaaaaaaggtcactcattgccttacaggtcttatgctcggatatcagtgattatgcacgagacagatactcaccggttctggtgtcgatcttgatcttgtcaccctggttaacgaacagaggtacagctacggtagctccggtctcaacggtagcaggcttgctggcaccggtagcggtatcgcccttgaatccgggctcagtctctgtgatctccagttctacgaacagaggaggctcaacggagaatacgctgccattgtgagagcagatcttgcacatctcgttctcttttacgaacttcagtgcatcgcctacggtctcagaattcagtgcaacctgatcgtaagtctcggtatccatgaagtagtacagatcaccatcttcatacagatactgcatatcctttctatcaatacgcgcctgagggcacttctcagtaggacggaaggtcttctcaactacaccgccactcttgatgttcttcagcttggttctaacgaatgctgcgccctttcccggcttaacatgctggaattcgataatctggtaaacattgttatcatactcaatggtaataccatttctgaaatcacctgcagaaatcataatgtattcctcctaatattttcacgtcataattctttaatattttaatataaaagcatacatatttcaactacttttgaatatttttttcaaatttctcttaagaaatcaattgcctgaagatatccgtccagtccctggccgtagatctgcttattacataccggtgccgtcacggaaatcttgcgaaattcttctctgcgtgtaatatcggaaatatggacttccactttcggaatatccacgcttgccagtgcgtcccggatagcataactgtaatgagtataagctcccggattaattacaataccggttgttccatcaaaataggcttcctggatcctgtcgataatggctccttcatgattgctctggaacgtctggatctcatccccggtctcctttgcctttttgtcgatcagatccaacagatactgataatcctgcgtgccatagatttttttctcccggattcccaggaaattcaggttagggccgttgatcactaaaattttcattttcttctcacgctcctttttcttcggtgcttctttcagcttacgaagctgcagctgcagttcctctgccagttcatcagagtatcccctatttgcatccaggatgatatctgcacattccgtatagattttatcccgtactgctaacagttcccggattcttccaagcggatcctcacattgcaacagcggtcttgtggtatcatttttgagtctctcatagactacttccggtgacactcttaagtataccaccgttccacattgatgcaacaggggacggttcaccggattgaccggggttcctccgcctacggacagaatgtactcgtattttctactgccgcatttgcgtaagacttccgtctccagttcccggaaataggcttccccatcatccgcaaaaatctccgaaatgctcctgccttcctgtctctcaatcattttatccgtatcttccaccggcatccgcagcagataggacagctttaatcccagtgtggttttccccgatcccataaaaccgatcaggacgatattcctgcgcttgtgcttcattttattttccgtcctctgtctttttcgcttcctgcatccgttcatagactttgtctgccagccacgattcgaccttgcagcctgtccacagttcaaacgcaataattccctggtacagcagcatcttcgctccgttgtaggccttaccgccctgtgcctccaccatctccataaaccgggtcttcggcggattgaagatcagatcgtaaccggtatgtactttttcataaaatgcaggatcctcgatcacggccgcatcacagtggggatacatgcccacactggtggcctgtattgcaagatattgttttcctgccggaagtgtgtcatacgcatccacagacattgctttcgcaaatttcctgccggcgatacgattgacttcgtccgccacctcctgtgctttctgcaccgtacggttgagaaggattgcttcccttgctcccttatccaacagcagcatggctacggctctcgccacaccgccggcacccaggatcaggactttttcgcccttcaccttcacaccatcttcacacatggcgcggtacaatccgggcatatcggtgttatatcccttatagcctgtctcggtccgtaccagagtattcaccgctccgatattctctgccagcggatcgatgtccgtcagatacgggatcacatcacttttataaggaaccgtcacatttaaacccagcagattcagcgcaaaggctccctttacagcatcctccagtcttccgttctccacatggaatgggacatatgccagattctctcccagcaccatggacagagtattatggatcaccggtgacagcgtgtgctccaccgggttgccgatcagtccacaggttctggtataaccattgatatcattcagcattttactttcctttccggcggcattctctatggtagaaaaacagcactattttttctaaatatctcttcagtacgatctggatctcttccttaggatggatggggcgcgtcagataggtcacgatgccacattttttggctccccacacatccgtgaacagctggtctcccacaaaaagtgtagtatctttcgtagtatgcatctgctccatggcgcgcagatagccgtctcttcccggcttgcctgccttataaatataagaagcccctaccgcgtccgcaaagcttttcacccggggttccttattgttcgataatagaagcgtctgaaatcccagctcccgcagtctgccgaaaaattcgatcgcctgcggtgtcgccggtgccccatggggtaccagggtattatcaatatcaaaaatgatcccgcgataacccttcttatataatgtcttgtaatctatgccataggcggaatccgcctcatgatccgggtaaaactgctgcagcatatgtcccgcctttcgtgtatttcctctataatataatgtaatctgctttttcccacacagagaatgcctgaaagtatgcctcttccagcggaatccacagctgtaaaaagtcctgtaatctgtcctcgccgttccgtttgcggatccgctcttcctgggtcttcccatcaatatccagaaatacccgacggtccatatagtcaccaaataccgggtggcagctgtaggctccctccacgaatacataaccgttattttctaccggaatctcttctcccagggtcatccgggagcaatcaaatctccgataggaaaaaggtcttccagatctcagattcgggagcacttccgttaaaaagcgttcatagtgcacatttcctccgggctcgcttctgcgttccggtgtccgaagtgcaggcggcaggaaaaaatcatccatatggatcacatccccacccagttcctttatcagtcttgcagccagtgtcgtcttcccggccgcgcatcttccgtcaatggcaatgatacgcacctctttagggagttcccgtaattcctctgccagatcattaaaaaatcttcgcgatctcatccacagcctccgcaatgtgttctcccagccgtctgctctctactcctacgatcgtcgcatggcatttgttcatggggatcaggaccagcttcgcatcaccagaagccactgccgccgccatcgtgggtgtgatctcccccaacatggcatccgccataacgattcccatgggtcccatgatcacgtccgctctcttactgttatataccacagcgttctctccggtggctccgcttgtcacgccgcttttcatcatattcgccgtagccgtggcgttggttcccacagcgatcagttccgcctcagggaaacgttcctttaatgcctccagcaggcttctgcctacgcctccgccctggccatccattaccataatacgcataaccttactcctgtaaaaataatacttgtttcatgatagcatggcagatgcttttttgcaatttatcttgacaaaaaaatgcttaccctttattataaattgtgcttcacgaaggagcctgacgccagaaggcatattaccccagaaggggggaactatgccgttctggcttttttattactgttcaggaggtttcattccatgaaaaaattaaccgttttaaacaagagcattatcaccgctctgtgtgttgccttatgtgtggtactgcctatggctctgcatgcgatccctaagggtggcgtcctgttctctcccatgcatctgcccgtactgctgtgcggtctggtctgcggagctccttccggtctcatctgtggtatcttagggacctttgtatccagtatgctcaccggcatgcccgcttttggctatatgcccatcatgatgatcgagctgggactctatggtctgatcagcggtctggtcatgcagtctctccgcagcggcaagctggtcattgatctgtatgcggctttgatcatcgccatgctgggcggtcgcgtgatcaccggaatcctgcgtgccctgatcttcgccggcggttcttacagctggtctgcctgggctaccggatatttcgtatcctgtctccccggcatcatccttcagctgatcttacttcctaccatttatgtggcattggaacgcgctcatctcctgccggttcgttacgctgctgtttctgctactgcagaggccgaagccgcataaatccatacaccatcgagccggccggctcatcgcactcacagcaaaaatggctcctctgtcttacgacaggagagccattttttgtctgtagatccgtatgaaatacaggatctccgccactgcggtaatactccaggaaaacatatacagcaggtacagggacggaatcgtatgaaaatacgcaaataccgtataaacccagatcacacggaatacgcaggagcccatgatgacaatgaacatcggtataatgcttttgcccaaagctctggctgccgcaatggtacagtccataaatgccgagatgcaataggaaaagcccataatcgtcagacgatacattccggcatccataactgccgcatctctggtaaacaaagacaaaaacggtcttccgaaaactaccagtgacactcccagaagcagaccgatgccgaaggaatacgttaggctgatgaggtaactgttccgcactcttttctttttgccggcaccgtaattctgccccataaagctgccacaggcggtatagaatgccgccatgacatcatacaccagtgcatcggcattgctagctgcagaattgcccgccaccatcgtggcatcaaaggagttcacgcccatctgcacgaagctgttggcgaactggaagatcacgttctgtaatccggaaggcattcccagcttcagaatatccctcgtaagctcccgatccatccgtagttttccgggatgcaacgcatagatgtctttgtttcgaagcagcgcctgtaagatcagcacagcggacacgtattgggaaatgatacttgctaatgccactcccgctacatccatccgacagacaatgacgaagaaaagatttaagatgatattcaacacgccggaaaatccgagataatacagcggctttttcgtattgcccaccgcactgtacaccgcattaccgaaattatagattgccagtgccggcattcccaggtaatagatccgcaggtacaataccgctttgtccaacagttcttccttcgtcttcaatgccgtcagcatccactcagacaagcctacccccagcactaataacaatacgcccatgatcaggctgaccagtgctgcggaatggatggtcttcgacaggctgtccttatcttttgctccgtaatataatgccgttaatacattgataccaccggacagaccaatgaggaatccggtaaacatggtgaccagtgtcgctgtggagcccactgcacccagagacagagatcccgcgaactgtccgatcactgcaatatccgccatattgaaaagcacctgtagcagattggatagcatcagcggcacactgaagatcagtattttcttccctaaggatccttccgtcagatcctgcatattctgtttcatcttgcttttatccttttccctgttacttacttgattcccattacaatcctccccgccagcttccactctgacgaaaagaacggtcaaaaagcttttttgctctctgaccgttccctattctagcatatcttttctttgtatgccatatttcttttctatatttttctgctatatttatctgctatttttctgctgtattacgctgcctctttttctgaatttttccctgcaccgaacagcttgcggatgcagctgtaagcaaccataacgcccagtaccataagcagcacggcaacgatcagctgtaaaccgtctaccaggaaggttgcctgtccggcagacacatttttcaccaacgcgatcgtcttctggatcaatgcggtgaaggttacgactaacatcattcccatggggacgtacagcgtccagccagtacgaccggtggtttttaagaatactgccagtgcgatcagtaccagtgcagccaacagctggtttgcagaaccgaacagcggccatacattgttgtatccgcccagagtcagcagatagccgaaaaacagggtgatcacggttgcaaaatatttattggtcagaaccttctgcatgggagtcatctttgcagtgtctgtggtatcccctaagaacagctcctggaaggacatgcgtccgattcttgctacggaatccagggaagtcagtgccagtgcggatacacacatggtcatgaatacggttgccacggttacgggaacacccatcttctccaggaatcctgcaacgccggaggagaaaatggagaaaggtgtgccatcgggtttcgtaccgttcacagctactgctccgactactaccagtgctaccacaccaagcaggctctctacgatcatggcaccgtagcctaccatgggcatatctttttcattgctgatggtcttggaggaagtaccggaggataccaggctgtggaatccggataccgcaccgcaggcgatcgtgacaaacagggtcgggaacaagctgctgttgcccacctgaaaaccgttaaatgcattcagctccatatcgggatgtgctacgaccacaccgagtacagcgccgatgatcatgcccagtaacataaaggtggtcatgtaatctctgggctgcatcagaagccacatgggcattacggatgccaggaacaggtatgccatgatgatgtagatccatgtggtcttggaagcatagatcggaagcttcatgcctaccgcaaacatcactaccagcagaccgatggctacgactgccttaatccactcgttcatttttccaacctttttctggatcagaccgaagatcacagcgaccagaatgaacaacatggaaatggatgctgcactgccgttagcatatgccacacctgcatcttccagtccggtacctacgaaagtacctgccaccatatcggtaaaggctgcgataactaacagagtgaacagccagcagaacagcatgaacaattttctgccggtcttaccgatgtatttttcaatgatcattcccatagattttccttcgttcttcacagaagcatacagagcaccgaagtcctgcaccgcaccgaagaacaatccgccgagcagaagccacagaagcacaggcacccatccgaataccgatgcgaggatgggtcccgtcacaggacctgccccggcgatagaggaaaactgatgagaaaatacggtgaatttggaggaaggcacaaagtcctctccgtcttcatgggtaaacgcaggcgtcttcaccttctcatcgattccccacttttttgcaagccatcttccgtagaagacatagcccgctgccagcactgccattgcgatcagaatgattaccaaactgttcatttttgtttccttctttcttatgtcttgttattttgtcgtgacagaaagaaaaattctgattgcccgtaaaacaaaaaagccttccgtctcaggcacccttaagcacccaaagacgaaaagctctaagctctccgcgttaccactttgcttgccatgttttatcacatgacctcttgttcccatctccatgaaatacaaatatcccatttccaacaggcttctaaataacggtagaataccggtgacacctacttaaaatcttcagtgcacttctcacagaggatactctgtcatactcacataccgtctcacaccagccgacggctctctgaaatgcttccgtatgcagatcttgttctgctcatcgaatttcactttctgtttgatagcaacaataccactctgcttttatattgtcaataactttcttttcacattttcttgatcttttttatcattttccctttttatcggcaatcaggggcttaatggatgaataaatttcactggtgcgcttgctgtccttgaactctttgttcagggcattgttaataccctgcttggtcttgtactggcggatgaattttaccacctgagggacgatggtctgatctgtaaggactttttctacggctaaagtcagttcatccggttcctccgcaggcttcttttctgcaggtttcttctctgcgggtttcttctcagtaggcttcttctctgcagctttcttttccgcggtcttatcatctgtctttgcaacactcttctttctcgtgttgctctttttccttgaaggcttcttcacgggttgtgcaggctcgtccaccgtctcaggctccggctgtacgggctcctcgggtacatccgccttctcaggctccggctgtacgggttcttgggtctcttccaccggctccggctgtgtgggctcttcgagtgcatctgccttctccggctccggctgtacggactctttggtctcttccaccggctctggctgtgtgggctgcggctgctctgccacatcctctgcagcggtaacgacagtttctgtctcattctcctcttctgtcagaagattctgctctgccacaggattcttcccccataagagattacggatgatccgcacgggaactccctgcgccttccagtacaccatgaggctggtgaagccattgtccttggtcacgataaaataatttgggtgtatcccctccctctgctgttcgcagatcagatatcccagataggttgccagctggaaatccagtgcattcttggtccccaccgctaccttgtggtaaatgatgtttgccttcgtctcatttaatttccgatgcaggtcaaaggtcatgctgtcagcattatcgctgtagaaaatacagacagtatcttcctccgtcaaaagctccacgccttccatgccacggctttttacattttcgaaatcaatcagataatatgccattacgcttcctccatgctcgttgtcccactgccttctgtatccacggactgctcggtctgttcctcttctgtcaccgtcatctccacagcatccgtctgttctgtctgttcagaagtctctgtatctcccatgggatctgccgctgttgatgtcttagtatcctcaagaatttccggcggctcctgctttttcttcggaagcttttcgcggatactctctttccagccggagaatacttcctttgtccgctttttccattctcttctcttcgctgcacgcttctgtctggcttcttcctttaattccagcttttcctgctttttcgcctgcttcgccagtgctttttcttccagttccacttccttgatggcagccttttcgatatcacggatgtaacgattggcctttttatgattcttacgatccaggcgatacgggtcatacaggaaataggacaccgctcccagcagcagaagcaccactccggctatcgtaagcgccggtacgataagagcatactctgtaaatcccagttcatagcacacaaacacgatcagcattgccgggaacaagagcagatacagaatcctcgtcaggacatccaatattgcatgctgtctcttcccattgttcagcagcgttccctcgatggctgtataaaaagccatgaaaatacataattccgagccgaaaccatggagatatccacagattccggtcaagatcagcgacagaaaaaacatgccgaacgctgttccccgatacagggcataacggtattccgtcattccctgcagcttgtcctcactgatgccgtgcatctggtagacatccttgcggatcaggcgttcaaactcttcgttataccgctgctcctctttggtattgcgcaggtggtcttccaccgccttgctcatctgctcaatatattcctgctccttacggatgcgcctggtccgaagctgctccaactcattctgacgttttacttcctcttccagcttacgtactttgccgattctgggatttttcaccgtgatctccgtaggctccgggagcactgtgctttctttttttccctgttcttcctgttcttccattttggggtcctctttctgtgtgtgatccgttagtcctattataatttttcccacgcagaaaaacaacctttagttccccttttcttcggttttctcccagcctgccatcaagtgcagttccaacggaacgttataatccggttctccgcctttttgtgcaaaaaagcgggatgcaggcagggtctccacccgtatgtctccctcatccgtcgtgagataccagcctgcgaaatgatacccttcccgttccggagtcggatatccacacaggtataccgttccaccggaatatttcggtgtcagtgcattgtacatctgcgatggttgtccttccatcgttcctccattggcatccaataccattatcatctgccaggcagcaggatcctgagagctccaaaccgcgtgaatatccacactgcggttgccttcctcatccggttggatcctaagcgcatcctctgcggtaaagctttccgtaagcagactccacttcggataggtatccttctcgcctgaaaaatgtgccgcccatcccaggaatgcaaagccttccggcgtctccggctgcggcagagcgatcacttctccggcaaggagctgttctatggtgatttctccttcttccaggattctctcccaggcgtcagcagtgggattggccaggtgcgtctcattatagatcttgtaatataagatgccgccttccagaggatactgtttttcgataggttctgacgtttctgctattgcgacatctgtttctggttctgttgtcgcggactgtacatggtcattttccctgccgtcccgattctctacgttttcatcaggtacctgcacctcctccgttgtctgtgccggtattttcgtctgatcttcctcagttccatacacgccgcaaccaagcagtacacaagctgccagcatacagagtatgcgcattgcttttcgcttccgactttcactgtgttccggtacccctttttccacaggttgtttactctgcagatattcgtccggcagcgacggatattctggggctatggaatccggcgggagtgtctggtattccggtagtatattgttttcctgtttctgcattttatttatcctatgatatttatgatcttctttgatcttcattttctcttttattaccggatccacccattatttattatgcacatccagctgcgggaaggggcactccacgcccaacttccgaaatcccagcagcagatcgtgattcagaatacgcatgccggaatagatatttttctccgagacttccactacgaaccggagcaatactccggaatcctgcaatgcctgcactcctacatacacaggaacttttttcatagtatcttcatgtgccttgtagattgactcaaggagtttcggcagttcactttccagcttttcaagatccgtttcataagggatgctgatatcgcagacagccttggaataattgtcggagcggttcaggatatttttcatttcggaattattgatgatcttcacattgtcaccggtatccgtgatacaggtggtgcggatgccgatgctcgtcacagttccacggaaaccgttcacctccacgatgtctcccacattatactgattctccagcagcataaaagttcctgtcaccacatccgcgatcagactctccgcgctgaagccgacgatcagagccaatactccgacactggcaatgatggtagtcatgttaactccgaggatcgtcagtcctgcgcacaggatcaccagaaacgcaatatattttgtcagactggataacagagagagcacagacctggctctgtgattcgccggtttgatcagccccaggatccatacgatcagactttttaagaacaataccccgaagatcaaaagcaataatttacagactgcaactgcattgaccgtaaatatcctccccaattcctctgtctgaatttgtccggttcccagcgcgattcccataataagtactaaaagcactgcatacacgattatttttttcacatttttcttcttatctttgtcttccattttcccttgttttcctccttggcaaactgctttttgatggttcattttatcatttttgcggagcaaaacacagttgacaaatgtctcattatggtaatatgtgactatttcacaaacatagtaatgattcctattattatatttgttactttattccattttcttttttcaggaaaagagatatactatatacagaaacaaggaaatgtttccattaaccacaacataaaagaaaggatgatagattatggcaaaattatataccattactttaaacggcgttacagaggatacttacaacaaggcaacagattatattcaggcaaatgcccttcgcctgaactatcgcccggctgcctccaccattgatgcggaattcccggatgacattgatcccgctaaagctccggagcttgctgatgctgtgatccgcgaggtgcatcagactctgtaattgtttgatttttactttggcaaaatagcaaagcaaaagtccgtcgatgctttaacgcaccggcggacttttttattttgactgctatgctgtcacgcgtcaaattatagttcccacctacggcagttttaccgcagattaaatgcggtatctccttcatatcatctatcctagccatgtatttgcatagctgtagagacacgggtgtatatataacattttactttctttttcaaccaagtcactcctatttgggtaatactaacggcggattctgcaataatgttgccataaccgacgcatatttttttgttccataatcctcaacaatacttgttattcttgcaccggcatctttggaagatgcaccgcataagaatactctttcatcagcagttccataatccaatactataaatcgatcatggaatatctcaccagttttctgcatggaaatttttacattgggatactctttgcagaaatcagtaaattctatattatgaagcttattatttccaacattgtcactaaaaagaataatagatactcctgactgagaattctttagatgaacc

SEQ ID NO: 11386 - DNA, 1600 bp, Unknown
  gut microbiota DNA sequence
ctttccattttctgccgtgcatctatggttttattttaccatatcccgcgggaaaacacgaccgaaaactagcaacactctgtgtaaaatgtagtcgaaaaaaccggacagtgatcgctcaccatccggtctcttattattgttctatttttcttctataatcgcatataccatacttccaagctttccggcttcataggattcactcaaaagcacgctgccctttcccaaatactcccgcagatcaatcgttgtactgccattattgagacagactgtaatcttgtgatctccccaggttctctgatagatatatcctccgtcatgatccatatatcgcagagtgtaatctccataggtcagctcctcatgttctttacgaatagcaatcagccgggaaaagaaatcatcctcttcatcctgcaccttttcccagggcatgggcccacgcagcgttccggtacgatatcgcagtagcatcttcacgatacgatcatgaaattcctctgcggaaattttccgaagggcaaagaaatcacgacagttcttccggaaatcataattcatagtggaatcaaacatgtctccgttcagccaggtctccgagctctcccatatctcccctatcataacactctccggattttcctcatgagcaactctacgaaaatctctcccaaatccccgatccacttcatttgccacatccagacgccagccatccaccttaaattcccgaatccaataacggcatacttccataaaataagctctttcctccggattagaagaattcatcatgtagttgtacatttaaggcaatgaatacacatcttaggtaatgtctatgaaccattttttcaacacctcaatatagaaaatataatttatttttgaaaggaacattttatggaaagcaaatcacagacattagtttggctgtagtgatttttatcaacatgtgttagactactgttatacaaaatcagaatttataggaggtgaatctgcatgaaatgtccatattgtggtgatgaaatgattagaggatacctaatgagttcacgagacattacttttgcagttgataatctgacaaaagtttttcgtattaaaaaatcggacgatctggaattgagtaaaggttcaggaggaatccctcattgtgaagcttatcgttgtagtagttgtaagaagattttgattgattatgcaaatagataaatcgatatatgctcaagggggtggattacatgaaaaaaattataccttggatgttagcgacagcagtaattatgttggtgtttccatggcttgcggttacattcataaaaggtgatggcggcatggcagtttgcttcattctgttttttgcagtgaatcctatttatgcaatttgttccggagcatacgtcggcaaggacataaaaatattttggtcactaccaattattacagcactattctttttgcttgggacatggctgttctttagtattggagaaaaagcatttattttatatgcgtttggatatttgctcctaggaattgtagcagagttaatttccatgtttgtaaagaaaaagattttaagaggtta

SEQ ID NO: 11387 - DNA, 7195 bp, Unknown
  gut microbiota DNA sequence
atttgtggaacatatattttacagcaattatatggtgccatgattggagctggcatttattacatgacatgggtactgaaaaataagaatttgtttggacaatttgcatgggcagtaaatattccactgattattgccctgatttttacaccgacattagttggtaagtggaaaggcatgtataaactgaacttaagaggttatgtcttagcagtcatcggtagagcacttgttgttgttgccggatatatgggtagtgttccgctgatgatggcgtttacagctcttgcagccttaggtcagggaccatggcagggagatatgaatgctgttattgcatcctgctctgaatacacttatcttacacagggaaagagaattgatggaacgatgtactcttgtacttctcttggtgtaaaaatcggtggaggtattggaaccgctgttgttgggtggatgcttgagctcagtggatatgtcggaacaaatgcaactcagccacagtctgcacttgatatgatgcagttcatgtatctttggcttccgttaatcttggatgtattgattatgtttgcactttcaagaatgaatgttgaagatgcaaataaaaaactgaaagcagaaaaaggaattgctgcagatgaagtaacagataaatcggacatgaattagatttgtaattcctcctttccttatttacaagttgattataagatgggtgtaaaagaattgcttgccaaatcgaaagaagatatagacaaatgttgcaaaggggagtatttcatgcaattaaaatatgttgacacaaaagaggagatcatagcaataaataggaagtcaaaacatattgaaccacatcttcataatgcactggagattgtttgtgtaacgagtgggacattagagcttggtgtcggacaggaactttaccatatggaaaaaggagatataggctttgtatttccaaatattattcatcactatcaggtactgacaccagggataaatacggtgacttatctgattgcatcgccatttacgattgccaaatttgcagatatcatgcaatccatggctcctgaatacccagtcatcacagcggaaaaggttgaatcagaggtatatagggttataaatgcaattttagagacagaacagtcggatattactgttgcacaggcatatcttcaaattgtgtttgcgcgctgcataggaaaactgaatctagtagagaagagtcatgtggggagcaaagaccttatttaccagacggtttcctatatatcagcaaatttcaagaaaaagttatcattggaagaaatggcaaaagacctgggtgtgagtaaatatgccttatccagactcttttccaaaatctttcatagaaatttcaatcagtatcttaatgatgcaaggttgaactatgcatgtcatcgcttggaaaatacgagcgattctattacaaatatttgcctggatagtggatttgaaagccagaggacatttaaccgggtattcaaggaaagatataaaatttcgccaagtgactatcgaagtacatgtgtgaaggatatgcagtcataaaatgttctgcagatagaaaaaattactttgattttatgcatggatgatacaatgttaaaatggtcgtagaaaacagatttttctgaagtgaaagaacaaggcatactctaaagagaaagaaaggcaggacatatatgaatatgggaaaatcagtaattgattttaatgagaaaaaaggctttatctgtgatatggatggtgtaatttatcatggcaatcagatattgccaggtgttccagaattcattcagtggctacatgatgaaaagaaagaatatttatttttgacaaataacagtggatatacaccacgagaattaaatcagaaactggctaggatgggacttgatgtgccagaagaacatttttataccagtgcattggcaacagccgcatttttaaaagaacaggcggcaggatgttcggcatttgtgataggagaagccggcctgttaaatgcactttatgatgtaggtatcacaatgaatgatgtaaatccggattatgttgttgtgggagagggacgttcctattcattggatacattaacaaaagcaacgaatttagttctgaaaggtgcaaagctgatcggagcaaactcagatgtttccggaccgattgagaacggcattgctcctgcttgtcgtgcattgattgcacctatagaaatggcaacaggaacacaggcatatttctgtggaaaaccgaatccactgatgatgagaactggattaaatatgcttggatgtcattcagcagaagcagtaatggttggggaccgtatggatacagatgtgatttcaggaatggaaagtggtatgtctactgtattggttctctctggatgttcaacgaaggacacactcaaaacttatgcttatcttccgacaatggtattgaatggagtgggagatatcgccagtatagcaaaagcaaaagagaaatagtgttcgataaatggaaaacgtcatgcatctccacatcttttccttatcatggaaatagaaaagggaattttactttcttcttatgaaattccaaaaggagaagataaaaatacattttcatatgattctatgaagaatgttgattactctaaactagaaaaatctgaaaaatttactccaacactttatcatgaaaaggacggaatctgggaaggtggcagcacaagccagttctctccggtaatgacattcaaacttggggagcggagtgtcattggctgacgttcgggttgatataaaaacaacgattgatgtataatatttatagattacaacaatgttaaggagggaacgaatgaatttagaaatatatcaacaattgtgtgctgaatcaaaaattctctggacacagcattgtttacagcgaatgcaggaaagagatatcagtcgtgccgacgtaaaaaatggaattgcaaccggcgaaatcatagaggattatccagatgattttcctaatccaagctgtctgatttttggatataatgtaaatggacggattttgcatattgttgcaggttgtgataatataaatatatatatcataacagcgtactatccagatacaaagaaatttgaagatgatttaaagacacgaagaaagaggtgatggatatgtgtatgtattgcaaaaatagtacaaccataaatagtacaacaacacacgtcgtaaattataaaaattgcattattgtaattaagaatgttccatgccttgaatgtgagcagtgtggagaaaaatattatacggacgaagttgctgagcgacttgaaacgattgtaaatatggcaaagaaattgatgcaggaaattgcagttattgactatccacaggtagcataatcttctatatcgggagagggtgccgaggcccctctctttttctcttttctttttatcttttctctgcactattcaatccatccacccaattacacaaaatcacataggagcaccgtctatgcgttcctgctcggcttgtaagacatttgcatgtagctgcagtgtctgttcccttttttcaaaggcatcaatactcatcaaaacaagatttccttctcccatctttgacactttatagagccaaagatgggattgtagcatagtaaagtgacagtgaagatcgcaaagccgtgccatgcgaggacagtttagtgctaatgttgtgccacaaaagactattgatttttcggagtacttttgtaacaatacataggaaatattacgttacgttttatgaaaagggaaaatatatgattttcatcatatggaacactaacagttaaagggatagttagtaatgcttatggaaaatagtaatatcgagattataggtggaggattgttttttacagaaatagaggtaaaaaatgacaatgagaagtttgtgccttctgaatctgataaagaggcaattagaaagaatattgaagagatagaatgcttgaaaatacaatcgccgtaggtataggaggtaaaggttttgtattggaataaaaataagaaaaaatatatagtaattattttcggaggaatcctcatacttgtgatattatgcctgggagattatgggatacgatattacaatgcaccaatagaaaaagattataaatatatcggtacgggaatgctggtgcatttgagcgattttacgaatggcgaattagtatcggtagagatgcggagaaagacagcgtattatatctggggaaatcaagaagattatattcaggggaacgtgtggctaaatggagaaaaaattttcggaaaagatgatatggaaattgtgggtctatttataaatgcagaaccatactattaaacagccgaaaaacagtcccaggcattttctcaatggttatcgaatgcacgtagaggaataacggattgattttatttggtagactatccaaagtgctgaaggacctcagaaatgtaatatttctgaggccttttcgattgtgtcagggaaaaagatacgcgtatttacgcatttgggcagataaaatcttttccacccggctgcggatctcttccgggtaggatgttgcatttgcaagtaattcagtcacgtcttttttggtgattctatcatgtatctacctttctatacgaatccagaaatcatcttctgccattcgaccttctgttttctcaatgatcatcatcggatcataaaatggcaagtcaagatctttcagtatcagtttcattttatccctgctggacgggaaacatcttgactcaagaaactccaggtattgatcataatccggagtttcaaccacaccgaaagcgcggaacataattttatctgtataatttttcacttttacttttcgttccggctcattcacatcgatcagggtacatatatcctgagtaaaggaacaatcggtccacggatcacctcttcacttcgctcccaacgctctacggtgggtttggaacagttgatcagttcggcaaagtctttctatgtcagatgtaaatccttccgaagctttttgatttgcaaattagaaaccattaaaatgattgtttatattgcctaaaaaaccatcattttaattatattctacgaaaaataatggtgaaaatacagagaaatttcattgcactggtatttttagcatgataagataaagtcaggaagatagtttataatggcagaaaagccatggcacaaggtccgttcaagctggttggagggattgcaaaggggcatccaaatgatcaagatctggaagatgcggtagagttttataagggaatcattcggaggtttgacaccgttattggatagagaagggaagcctgttatttcgccaattatgaacagttaatttagtttgcaaaagccatgcctatgaaaatgaaaactgaggaaaccataaaacttatcaaatatgttaccggctccgtagcggccgtattgcttgcagcagccctgcagcttcagtttgcgtatgccgcaggaattatcactctcctgacgatccaggatacgaagaaggaaactgtgcggataacagcgaagcgcatgatcatatttgtgatcatgacgatcttgtcagcagtgatctttccgcttgccggatatcacgtatgggcattcggtattgtactgatcccatatctgtttagctgcatggcattagacatgaaggaagcgattgctcctattgcagtgctttgtacgcattatgtttcagcaaagagctgcagtccgtccatgattctgaacgaatttctgattcttatgatcggagcggggataggcacactgtggaatctctatatgccggatggcagaagacaactgttagagtatcagaaaaccgtggatgacaaaatcgtatacatcttacacagaatggcgatctacatagaactggaggataagacggattataccggaagctgctttgatgaactggatgcaatgcttgtgaatctgaaaaaagaggcattgcgatatatgaataatcatctgatcacagaggatgattactattatgaatatatgcagatgagagcgagacagtgcgtgatactgaaaagaatatatgcggacatcatccgcctgaccactacgccggagcagggaaaagcactggcagattttatacggcagactgccgatgagtttgcagaacaaaataatgtggaaaccctgctgtcggagttagagagactgcaccaccattatgaacagcagcagctcccggtcacacgacaggaatttgaaaaccggtccatgttgtatcatatcctggaagacatgaaagcgtttcttgacatcaaaaaagactttatcacagcaaggtgatgtattataatgtaaaaaccaaattagataagaaagtggaggaaaacatatatgttagaagcaggaaaaaaagcacccgattttgaattgccggatcaggacggtgtaatgcataaattaagtgattatgcaggcaaaaaagtgattttatatttttatccaaaggataacacaccaggatgtacgaaacaggcatgcggtttttcagagagatatccgcagtttgcggaaaagggtgcggtcattcttggagtcagtaaagattccgtggcttctcataagagatttgaagaaaaatatggtctggcatttacacttttagctgatccggaacgtaaagttattgaagcctatgatgtctggaaagaaaagaaaaactatggaaaaatatctatgggcgttgttaggaccacatatcttatcgatgaacagggagtcatcatcaaggctaatgataaagtcaaagcaacagatgaccctgaaaatatgcttaaggaattagaaggatgaaaatcatactgtctccagcaaaaaagatggtaagcgatacggacagccttgcaccggttaacgtgccaaaacatatggatcagacagcagagatattgagttttatgaagagtcagtccgaagaggagctgaaagcagtctggaaatgtaacgataaaattgccgaacagaactttcacagactggaaactatggatctgtaccgtggacttactccggcagtattatcctatgaaggaatcgcatttcagtatatggcaccagc

SEQ ID NO: 11388 - DNA, 4783 bp, Unknown
  gut microbiota DNA sequence
tgttttggaaccaatggatggggtgacaccgtaccggttagaaatgcaggcaaaggtcgggataggagattcaaaaaatctgtatgattactggggggagagattatatcgttcagtgattgatgacagcagggttatcattaatctggcatcaaaagaatactcaaaatgcatagaaaagtatctgacacctaaggatacctatattacggtctccttttgtgagttatcgggaaataaactggtaacgaaagggacatatgccaaaatggcccgaggggagatggtccggttcatggcagaaagagaaattgagaatcctgaagagatacgaaaatttgacagacttggatatactttcagaagagatttgtcatctgaatcggaatatgtatttgaacgaaaatgattaatgtgaattgctgatatgagtatggatatggctgcctgctacaatctacgcaattcactttgaatagaaggaggtaaagatagatgatgaaacgtaaattgatcttaaccggcgcagcactgtccctggcagtggctatgaccggatgtggcggtaaaccagtgataaatcagcagccaagcagccaggagaagaatgcggtagatacccaggcacagacggagacgacagcccccgctgccgattctgccacaacgcagagttctgccgcagctactgcgcagacggtaaccggcacagtggatgaggaaatggcacagaagatagctcttgagcatgccggagtgaaggcaacggatgcaacgatcaccaagtcaaagctggactatgaaggcagacgccaggtatatgaaattgaatggtacgcaggcggtaagaagtacgactatgaaatagccgtggataccggtgagattttaagttccggatacgatgaaaaaacatccggatggagtggcagcaatagcagtaatgttactgtcagtgaggcagatgcgaagcagacagcacttggcagtgtaagcggtgcaacggaaaaggacatctacgaatgggaattcgattatgacgatggacgtccggaatacgaaggcaagatcatctatggcggaacggaatatgactttacgatcgatgcatccagtggagctgtagtggagtgggaggctgagagcgtccgttagttatactcatcaaaaaagtaaggggttgtatccccggtaacaatcatgtatagaaatgtatagaaaaaggatagcgtagccgcaaggcgggaagcgctatcctttttcctttcatatcaattcttcgatataattatacatatattattccatgcagtaaagaataaatacaataatgatagtgaaaagttaaatgatagatattccaagaaatgaggtatttatgcatgggagaaaagtactcaaaagaagatcatgacaaatgtaaaaaagttgcagaagtgttccaggaattgtatgatgtgttaggtgatacctgtgtcctggatgcaggtgaatttggatttgtatatttaacatattatagggagcagaaatcctgcttcgatagaaataaggtatatcgtaatgcagaagaactgtttgaagcattgtgggatgagtggctttacagtgaagtgatgcagcctgtatatgggacagaggatgcggaagcaggctttgaagagatctatcgaaagcttccggatgaaagaaagcaggaatatgctgtaaggaagcagcaatttatggatcaggcagaattaaaacaggaatgagatcgcaaagctgatatactatatgtcacaggttgtatagctgccgtactgcttgcagtagccagcaaggtgatgtatattaaacaattgaagatgcgcgaccttgatcagcgaatatagcaataggaaaattggaatcaggaggctatcagaaatgacggaaagagaaaaaatgttaagcggagagttgtatgattcatcggataacgaattggaacaattacgtttgcatgcacgtaaattagcaagaagatataatttaacagatgaagatcagcaagaagtgcaggcacagatattgcgggaattattgccggcaacagaggagcttccgtatttgcaggcaccggtctattttgattatggatgtcatacttacttcggaaaatatagctctgctaattttaatttcacatgcttagacgtaggtgaaatacatataggggataatgtgatgatcggtcctaatgttacattggcaactcctatgcatccattattgcctgaggagcgtaatgtcaggaaaagagaagatggcagcctttatactcttgagtatgcgaagccgatcactataaaagataattgctggctggcatccaatgtggttgtttgtggtggtgttaccataggggagggatgcgtaataggagcaggaagtgttgtgacgagagatattcctccctatagtctggcggccggaaacccatgccgtgttattcgtaaaataaccgaaaaagatcatatgtaagatagaattgatcaattttcaccagtttattgcaatagaatcactaatatttggtaaaaaaaattatattttttaatagatttttccaatcaactgtgctataatacggacgtttaagcacatagaagttgaattgaaaatttacaaaggaaaggaaaactatcatggaaaagatcaaaaagcgtatagctaacttaaaggttgcaggaaaattaaaagtatatcgaatgacagtgcttgttatgacattatttttagtgttagtggcactgatctcgacattagtgatccgttcaaatatagagaagatcacggaggtctggtctccggcattggaagatctgcaggagttggaaacaatgactgcgaaatatagaatcaaacagtatcaacatctggtagaatcagatgatgctgttatgacctcctgcgaagaagaaattcagaagctggagagtcagatccaggagactgatgcgaatctggaggcaatcatgtctgcagacagcgatgctcaaaaaggacgggatgattatgacgtagcaaacactgcatgggaagaatacagagctgcttcggatgaaattctgaaattaagccgtgagggcaaacagcaggaagcagcgaaactgatgaccggagaggtgtatgaagagtatacgtcatttgctgagaaattaactacattgcgtaatgagttccaggtagaattagaccgggcaaagaccatggccaatgtatgcaccatcatcatatttgttgtgatcgtggcatcgggtcttgcgattgctgtagtgacaacactgatcggaaggatcattaccaattccattacagagccggtagaacagatagaggcagcagttgccagcctgcgcaagggcgaactgtccaacgtagaaatgcttacctatgagtctgaggatgagctgggtggtaccatcaggaatctgaaagaagccatgggtattctggcagattatgtcagcgagatctctgtggaggtaaaggcaatcgcacagggtgacttgaccagaaatggtgatgacattacggatttcctgggcgatttctcagaattgaagacatcactgctgtatattctgaagcgctttaacagtaccctgaccgagatcagcaatctggcagaacaggtatcatcaaatgcatcagaggtggaaaatgcatcaaaatccctggcggatggtgcaacagagcaggcaggagtcatcgaggaattgaatgccaccattgacactgtcgtggatctggctgcagatacagcgaaggaaacgcagagcgcatctgcacgtgtaaaagcctctgcaaataaggcaaacgaagaaaaagaaaaaatgaatgagctgctcacggaaatggagcacattacagaaatctccaaggagatcggtaatattatcacagatatcgaggatattgcatcccagaccaacctgttatccctaaatgcttccattgaagctgccagagcaggagaagcaggaagaggctttgcggtggttgcagatcagatcggcaagctggcagcggatagtgcaaagtccgctgtaaatacgagagatctgatcgataagaccttagtggaaatcgataagggcaataacattacaagaacaacagcagacgcattcaatcagatcattgcagatatggagtcctttgcagagattgcacagaacaccatggagaaagccaactcccaggcagagtccttggagcagatcggtcagggaattgaacagctgtccggcgtggtacaaggcaatgcagcatcctcagaagagaataccgcgatcagtgttaatctggcagagggagcagccaagatgcaagaccgtgtgaagatctttaagttattctagaaaatgaagttattctagaaaaatggcaggaatagagtgaagctgtcggaaggaaggttcttgttgtgattaatgatatatttaaagtgtttggagagcagacagcagaaatcttatttcagatcattacagaatgtatggatgattacctgtatatatttgatctgcagaataatatctttgagatttcacagtcagctgtggaacggtttaatatgtcgaaaaatgttctgacagatgctgcaaatgaagttatgaaggtagtgtatgaggaagaccgtgagatgcttacaaagcatctcgcggatatatgcgaaggaagagaaaaggtacataatcttcattacaggtggctcgataaagaaggtaggtcggtctggatcaactgccgtggt

SEQ ID NO: 11389 - DNA, 621 bp, Unknown
  gut microbiota DNA sequence
cggatcagtatgtgatcgtggatctggaagcttcctccgcagaagacgctgtggcactgaaagaaaagattacagataaacttcgtaatttcatagtagccgaaaattatgaagctatattttctatttctattggtgttatagatgcagcaacattttgtgagggaaccgaagaatgccgcaaaaagtttgaatttgccttgaaacaggcaaaaagcatgggtaaaaatggattctatatttttgaccaggatgactatgaggtctttttacgaaaaggaagaatcatagcaacacttcgtaatgctattgtaaaccattatgatggctttgaagtatactaccagccgatcgtggactgtcagtccaaacagatcattggagcagaggcactgatgcgtttttccatgataacggaagaagggcgggagtttgtttcaccgatggagtttatcccattattggaagagaccggattgatcattcccgctggaagatatattttgaacgaagctgcagcaatgtgctgtgaaatgcagaaatatattcctgacttccggatgaatgtaaatgtatcctatgttcagatcctgcaaggcaatgtggagcgggatattctgg

SEQ ID NO: 11390 - DNA, 754 bp, Unknown
  gut microbiota DNA sequence
tctttctttttggaatgatttcattttaacatttgtgttttttttgaaaatatgagaattttagtgattgctatggttttttttagaatttgacacaaaaaaacctcagcagatttctctactgaggtttgcattagcaggtcaacccctgcttcgcagggctacaaggattcgaaccttgaaatgacggagtcagagtccgttgccttaccgtttggcgatagccctatgtcgtttacttgatgaagtatacactatctgttttcattttgcaatacctaatttgaaaaaattttaaaaaagtatacaaaatttatacaattcctgtattatcacctggtaaacaccgtaatatagggatagtctacacggttcaccggctgaaaatcattctgcagccaattccagataaagctgttttcaccttctgcagcaatatcgccatagcagctttcaaatactactacatccggatatctgtcgggattgatctcccagtaatccaataacctttcatcatacaccatggaacagatcgtatccggagatgcctgcgtatgttctcctagcatacaatagaactgtgatgcacccacatacagcacggtacttcctgaaggcaccgctttgttccagatttccatattgttgttataccggaaagcagacatataatctgtcaggattccggcacgcagaccctctctgttaatgccgcggatgttggatagtgcgtaggggcgacaaacaaata

SEQ ID NO: 11391 - DNA, 245 bp, Unknown
  gut microbiota DNA sequence
aaacataaaagatgtggatatttttcataaaaacaacatttataacagtttttatgaaaatgcagaacttgttattaacttctgcgcatgtattctaaaatgctctgcctaaataattgggatgcttttcataacccagcagaaaaggactgctcccccggacatagatgcggcggagactgtgagattttcttggaaagtggttgagccgcaggggcaacgcgaacacgatgttcgcgttagcc

SEQ ID NO: 11392 - DNA, 211 bp, Unknown
  gut microbiota DNA sequence
tgaaagttagtgaaatagttgttctaaaatccacgcagaaagggctgcccgccccggactcggatgctagctacaactgtggattttctaaaggaaagtggccaagtgcttctcaccatgacggggccgcctttacgttgccatccatgtgcaccaaaagccatgcaagcatggcttggctaacgcgaacatcgtgttcgcgttgcccctg

SEQ ID NO: 11393 - DNA, 861 bp, Unknown
  gut microbiota DNA sequence
aacagtttctttgaatattttcttggtgtttttggatttggaatcgttgtatctggctgttttctgaaagataaatacaaataacttccgatttggagaattgagaaaattggatttgtcgaactgataaaaacactttaggaactaaagggcgcacttctatactctcctatcgggagtatgtgcgtcctgcggagcttcattcccggtcggcagagaaaaaactgcccgaccgagaatgtttcgtcacttcgttccgtcaagggagctacactcccttgcgccgctaaagcagctatcccctgtggactttccgtcctcaaacggttttgacaaaccgttcgccgccagcaagtttgacaagaaaaatcggaaattgaaacagttagataacttgaatttaacaaaggagtgtgaatgtatgaaaaaattgatagcattagttctaacattggcttgtgttcttgctttgacaggatgtggtaagaatgatacctacaaaatcaaaattgttgtccctgcaggaagtaccgaagaaattgtttatcaagaggattttgtctattccgatgaggaaatctccccgataggcaacaagattacaatttattctggcgatggattaggcgatacagaggtggtgttaaaaccaattagtgtcaaggaagaaaatgcatacgagccaacatatcttaccccaggaatgccagttgaaatggatgtagaaaaaggcgcttggtttaaggtaggtataaatatgcaaaacaacactgataccgacaaaatcgtttatgttgagattgaaggtgtcgaagtaagaattgagtaaattcaagtttgtcgaggagttgccaggtcagg

SEQ ID NO: 11394 - DNA, 8035 bp, Unknown
  gut microbiota DNA sequence
ctatgcgcaaaagacaagtttaacgaatagttctatgaaaagatgactctgtaacgcttcttaaagcttgttttggctgctttagcagatttccgcggaatcaagcaatatggtgaatgggccgtcatttagcagggatactttcatatcagcaccaaagattcctttttctaccttgggaatactttcgcggcacctgctgatgatatattcatacagctcattcgccatatccggtttaccggcgttgatgaaagaaggacgatttccttttttgcaatctgcgtacagtgtaaattgtgataccagcaacaattcaccgcccacagcatgcagatccagattggtcttgccctgggcatcttcaaagatccgcagaccaagaagctttttaatcattttatcggcaatttccctggtgtctgtctcagccacaccgatcagcaccagaaatcctttgtcgatgctgccagttacctcaccatctacctttacctctgcatgctgtacccgctgtattacaaatcgcatctgtctacttctctcctacgtttttctcttcttgatcttttttatcctgtccaaaatcaacttgatctttgatctcatgatccctttgcagcctggaatccagctgatggaatccttcctcatcaatattcttcagataagagtactttacagtctctaccggcagatccttttttcgaaggaaggtattgactactgccttaatcgccgcataaattaccgcaaaaatgggcacaccgacgatcataccaaggattccaaataatcctccgaataccgtgatcgcaaaaataacccaaaatcccgtaagtcctgtggaatcaccaagaatcttggggcctaagaaattcccgtcaaactgctgtaataccagaataaacagtacaaaataaacacagtttagcggatgcatcgggtcgaccaccaggatcagaatagcactgggaatcgctccaagataaggaccgaagaaaggaataatattcgttacacctacgattacactgaccagagctgcataaggagtctgaagtaaggtggttccgataaagcatagacatccgataataatggaatctacgattttaccgccaatgaatccgataaaggtattgtgagtaaaacgaaaacttttgatcagtcggttggcggacttctgttcaaagaaagcatatgccattttctttgcctgtccggcaaacttttccttgcttgccagaacataaatagaaataataaatcctataatgaaatcccacagacctttcagaatatttatcacacttaaggatactgtcatgatcacctgactggtcttggtcagtactgtgtcatttaaccaattctccagctctacggaatatttatcgatcagtaaagtaatctgacggcccaagtccggattatcatccatgatcttactgatccattttgtaaagttgctgatataggtatcaaaattagatgcaatgtttacaatactgggaacgatctgagaaagcatcatggcaaccagactgtagatcagggcaataaacaaaaatgctgtgatcagaatgccgattccacggacaatggaattgcgcttcttattttccttcacctccagcttccggcacaaagggaataacagctttgtctctatataattcaataccggagtcaacagatatgctgtcaccagaccatataacacgggcataagaattcctgtgatcgtatggaatcctgttttgatacttgtcccatggaataacagataatagaaacagatactggctgcaatggtcagaaatgcggtcagaccccaacgaaaatacttattgtttttaaagtcgtatttcatttaactacacctttcttcataaaatcttatctcttttaatatactatggttttgcactcaccacaagaagaaatctgtcgtttttgttgaaaaagaattcccggcagtataaaatagataccagtaaaagaatggagataacaatgacattacaaaaagtattgagccgtgtcagacaggctgtggatgattatcatatgatcgaagaaggtgaccggatcgcagtggggatctccggcggtaaggacagccttactctcctgctggctttatatgaactcagcaagttttatccgaagcattttacgcttattgcagtaacagtcgatcttggatttctcaatctgaatctggatgaaatccgtactctttgtgctgacagaaacatcccatataccatagtggatacttctattgcccaaatcgtatttgaagatcgtaaggaagacaatccctgttccctatgtgccaaaatgcgaaaaggtgctctgaacgatgccatcaaggcggctggatgtaacaagattgcatacgcacaccatgaagatgacgtggtggagactatgatgctgtccctcttctatgagggtcgtctgcatacattctctccggtaactcatctggataaaacagacttgaccgtgataagacctctgatctacatgagggaatcggaagtcatcggctttgtgcacaaatatcagattcctgtcgtaaaaagtccctgtcccgccgacggacataccaggcgagaatatgtcaaagaactacttgggaagcttaacagagagaatccaggtgtcaaggatcgtatatttacggcaattcaaaaaggaaatatggaaggatggaccggttactttggcagtcattaaagaagaaaattaccacgatgaacaaaataagaacaatattctgaagcttcgtaaggtactggatacgcttccaccgttctgcagggatttctttcgtgggattgaaccctatacatccaccagaaccaggcttgcctacgcttatgacattcgtctcttttttgaatttcttcatgagacgaacagcttttgtaaaaaaagagagattaccgagctgcctttgtccgttctggatatggtacaacggacggatatcgaagaatatctggactatatgagcctgtatcagaaggacggaaaagatatcaccaacgaggaacgcggcaaggcaagaaaacttgccgctcttcggagtttctataattactattttcagagtgaacgcattgaaaaaaataccgcggcactggttcctctgccgaaacgccacgaaaaagaaatcatccggttagaacccaacgaagtggcgattctgctggaccaggtggaggacggcaccaaactgaccaaaaaagaactggaatatcataagaaaacaaagcttcgcgatgtagcgcttctgacccttttattgggaaccggtattcgtgtatcagaatgtgtgggactggatattaacgatgtggatttcgataacggtggcatcaagatccggagaaaaggtgggtatgaggcaatcgtctacttcggagatgaagtagaaaccgctctgctcgactatctggaacagcgggaacatatcatccccgccaagggacatgaaaatgcattgtttttgtccttacagaatcgtcgtatggcagtccgttccgtagagaatctggtaaaaaaatacgcttcccgcgttaccaccctgaagaaaatcacgccccataaactacgcagtacatacggtaccgaactatataaagagaccggcgatatctatctggtagcggatgttctgggacataaggatgtcaataccacaagaaaacactacgcagcgttggaagaacaacgccgtaagcaggcagctaatgcctttcatctgcgggaacactctgacagacattcggagcatccggacaactaatagccgtgtgaaaaataagctatcatgcttatttttcacgctaattacttcacaaaatcataggaataataaggtacgatcagagtctgtccggctctgatcgagtcttcttccgccagatgattaatactctgtacttctgcaatatattctttcttattcttatattcatcataatcgatgtaatcatcggacagatcccacaaggtctctccgtaggcaacggttacctgtgtataatatttgaacttcagctgatcttctccggagcttgccagggaacggattccgtgataggacactgcacagaatgcaatcacacagatggtagcaagcatggtaactattctgcgctgcagctgacgtctccgtctcagctgtctcttatatattcttaactctctgtctgtcatatagtatacactcttctgtactctcataacgcatttcacctcatataagaaaacatgttcgggaacatttgttctttatgtttgtattatatcgaacatgtattctgatgtcaagtcaaaaatcgaacatatttttggaatatatgtttgctttttaatttttgctatgctataatcattatataaattaacaacaagaaccagcatttatcggaggtcatttatgggttatggaaagatcactgccaagcagcaggaaatattagattatatcaaggatgaaattttgaagagaggttatccccctaccgtccgtgagatctgtgagacggtgaatctaaagtctacttcttccgtgcattctcatttagagactctggagaagaacggctacatccgcagagacccgaccaagccccgtgccattgagatctgtgatgacagtttccagatggtacgtaccgagatggtaagcctccctgtcatcggcaatgttgctgccggacagccgatcctcgctgaggagaatattcaggactacttccccgttcccgccgatgtagttcccaagggagattccttcattctgaatgttcgtggagaatccatgatcaatgctggtatttttaacggcgaccgtgtcttcgtacatgctcagaacacagcacataacggcgagattgtcgtagctttgattgatgattccgctacggtcaagacattctacaaggagaagggacatatccgtctccagccggagaacgacaccatggatcccatcatcgtcgatgactgccagatccttggcactgtgttcggtgtattccgcttttacagatagcaaaacagcctgcagcgtgatttgctgcaggctgtttttaactatattttacatttagttctctgggaatcttaccttcatataagaaataatctcatctacgcatctctcatatcccagcttagagctgtccagacagagatcgtaatttcttgcatctgtccattcacgtccggtatgatacttatagtactccgcacggtgcttatccgtcttgttgataaagcgctccaattccttcgggctcatgctatgcttcttcgctgcgccttccagacaatattccttcggggcatgaataaatacgctgaggacatttgggtaatccttcaacacataatccgcacaacgaccgataatgacgcaggattcctcctttgccaggtcacggatgatcttcgcctgatagttaaacaggttatctgtagatgtgaaatcatcactttccggagggatcagttctccgtgatattcttttctggcaatatggaacagactggtgtttttcactttttcgtccgcattcacgaacagagcctcattgattccgctgtcatcgctggcaagcttcatcagctctttgtcataataatggacattcagcttctttgccagcatctcgccgatggttcttcctccgcttccatactgtcttgcaatggtaataactacattattcattccaatcaccatacctttctgtctctgctgcttccacccgcagcgacttacatcaagggttattcacccagatatgctttcttaatggaatcattattcagaaggtcacttgctttgccttccagaacgatcttaccggtctctaatacatacgctctgtctgcgatggacaatgccttcttcgcattctgctctactaacagaaccgtagtaccgctcttgcttacctcctggataatatcaaagatctcatttacgaagatcggagacaatcccatggacggttcatccattaaaatgatcttaggatgagacatcaaggctctgcccattgccagcatctgctgttcgccaccgcttaaggttcctgccatctggttctgacgttcttttaaacggggaaaacgatcaaatactgtctctaaggtctgagcgatctcttctttatcttttctagtgtaagcacccatcatcagattctgtaatacggaaagctgtgcaaatactcgtcttccctccggtacatgcgccatacccatggatacgatcttgtgtccggggatcttaaccagatcctgaccttcaaaagtaatggaaccttccttcggcgtcagcagtccggatacggtatgcaggattgtcgtcttaccggcaccgttggcgccgatcagtgcaatgacctcaccctcatctacatggaaggacacaccctttatggcctgtatcatgccgtaatatactttgatatcatttacctctaacattgccatagccatctatcctcctattcgcccagataagccttgatgacttccggattgttcagcacatcactggtcttaccctgacacagcacacgaccgaaattcaacaccgtaagttcctcacagattccgcttaccagtttcatgtcatgctcgatcagaaggatcgtcatatcaaaatgctctctgacaaaacgaatggtatccatcagttcctgcgtctcgttgggattcatacctgcagcaggctcatctaacagaagaagcttcggtttggtagccagtgctctggtaatctctaactttctctgtttaccgtagggaagattatccgccagtgtatctgcttccgcttccagtccgaataccttcagaagctccatggcttcctccgtcatctgcttttctactttataatattggggcagacgtaaaattcccgtaatggtactgtaacccatatggttgtgcagtcctacttttacgttatcgattacagacagattcttgaacagtcggatattctggaaagttcttgcaatacccgcctggttgatgtcgatagtctttttgccggtgatatccttgccatccagagtaataattccctctgtgggtttatatacgccagtcagcagattaaatacggtggtttttccggcaccattgggaccgatcagtccatacagtgcacctttttcaatactgatattaaaatcatctaccgcacgaagtccgccaaaagaaatgcctaatttttttgcctctaataatgccatgattattcagcctcctttttcacagacttcttactcttaaatccggctgctactttctctctccattcaatacatttcggagcccagttaaacagcatcataacgatcagtacgatggaatagatcaacatacgataatcgttcagtccacgtaaaagttccggcaataacgtcagaattacagaagcaataatggaaccgcggatgttaccgataccgcccagtacaacgaacaccaaaatcataatagacatattgtatccaaagttcttaggcagtgctgtgagggtagacagattgtgtgcatacaatactcctgccacgcctgcgagagctgcggagattgagaaagccatcagcttatatttggtaatatgaattcccacggattccgctgcaatggtattatcacgaatagccatgatcgcacgaccgtctctggaatggatcaggttcaatacaatgaacagtgtaaccagtaataacacaataccaatggtaaaattggagtcatgaggagttccggtgataccctgcgcacctttaataatgacctgcccgtcctctgccatattcagatccatagtgttggtaaaggaaatgtggaaaccattctcatccagtcccacaaacagaatattgaccagattcttaatgatctcgccaaatgccagcgttacgatggcaagatagtcacccttcaggcgaagtacgggaatgccgatcagcag

SEQ ID NO: 11395 - DNA, 8257 bp, Unknown
  gut microbiota DNA sequence
cccgcaaatgctgcgccgatcaataacgcgacgaaaaagcgaagcccggaaggcattgcggtattttccatgactttggagaaaaaggcactggtaaaggcaccgatacacataaatccggcatgaccgaggctcaactctcccagaatgcctaccgtaaggttcagagataccgccagaatcgcataagtacacagaggaaccaataagccctgaagcagactgcttaccactccggcagatacaaggatctgcatgatcacataggctgcgatcaccattccgtaagtaataaggttatcacggaaggttttattcattttcttatttgataatttcttcatattatacacctgcctcttcccttatactttttcctgaatatttttgccaaacagtccggcaggtcttaccaaaagtacaacaatcaatactgcaaatacaatagcgtctgccatctgggaagatatgtaggctttgccgaagatttcaataattccgagcaggataccgccgaccaaggcaccggggatggagccgataccaccgaatacagcagctacgaaagctttgatacccggcatggaaccggtataaggtgtcagggaaggatatgcggaacataacagcacacctgccactgcagccagaccggatccgattgcaaaggtaagtgcaatggttccgtccacattaattcccatcagctgtgctgctcccttatcctcggatactgccagcatagcctgacctgcctttgtcttattaataaatagcatcagaccggccattatgatcagacaggaaacaatcgttacgatcgtctcaccagtaatattgatctgtccgtctgccagcttcagcgccggaacagatactacagaggtaaatgccttcgcattggcaccaaagatcaaaagtgccacattctgcagcagatagctgacaccaatggcagtgatcagtaccgccaaaggggaggttgcctttctcaaaggcttgtaggctaccttttcaatagccattccaagcagagtacaagcaacaacagctgccagaacaccaatcacaggagaaagccccatggtactgcacattgtataagtaataaatgcaccgaccataataacatcaccatgtgcgaaattcagcattttagcaataccatataccatggtataacccaatgcgatcagcgcatagacacttccaaggctgataccgttgatcagataactgataaaactcatgtgaactacctccattcatgcgaatgcacaaattatcatctaaaataaagtataactaaaataaagtataacagaacataccgggaaaaacaactattcccctattattgcaaagtatttgacattaagtaaagagggctaccctgcggtaaccctctttggaaactttgtcagcaaaattacatagccttgtaagcaccattctcgatcacaacagccttaggagccttgttagcctcaccgtctgcggtccaggtcatgccgctaccggtcagaccatctacagtgatctctgtcatggcagccttcataccatcacaaatatcagaaacactcatatcaggagtaacaccgctcttctcgatagcagccttgatcacatagatagcatcatagctgtctgctgcgaactgattgggagtctcgccgtatttttccttatacttagttacgaaagactgggtcagatcatcggttgcatcagctgcgaaaggagttaacagcataacgccttcggtcagagatacatcaaagttatctacaccaccgagaataccatccatgccatcacatgagaaccacttgggagcataacccatagcagctgcctgtgtcaggataagtgcggattcctgataataaataggaaggaataccatgtctgctccggcatcctttgccttctgtaactgtacggagaaatccgtcttgttatcagcggtaaaagcttctgctgctacgatttcaaacggctgattctcagcttcttttgcaaacttctcgtaaataccggaagaatatacatcggagctgtcataaataacggcaatcttctcagccagaccattctcaccaacatactgtgcggatgcaagaccctggttaggatcggagaagcatacgcggaagttgttatcatactgaacacattctactgctgaaccggaaggagtgatctggaacatattgtcctctttggtcttgtcggtaactgcaatacatgcaccactggtggtagaaccatcaatgatctgagcgccccagtcctttaatgcattataagcatttacggatttctcagcatctgcctcatcatcctggaacttgaattctacctgataaccgttaataccgcctgctgcattgatctcttctactgcaatctctgcaccgtgctgtacagccagtccataaactgctgcgccaccggtagtaggtccgataccaccgatcttaaatacgctgccggatgctgcactgtcggaagctgctgcattctccgttgctgcgtttgtaccggttgctgcagagccattgtctgtattaccacagccagccatagccattaccatagcagatgctacggcaacacttaaaaacttgttaaatttcttcataatatcttcctcctttttaacaatgtatacaaatatacaatgtataattgttatttttgtatattactcgcttctatttcctttgtcaatggattttcttttctaatttgatgctttttgacattaaaatagatcaatcaaatcatatttaaatataaatatagtatattttttattccgggggaaagactatttacgaaacaatcatttaatagaaatttcaaaaaaatgtctgtatggaacttacagcagtaaagtccatacagacaggataaggagattttatgggtaataaatatttggatggaaccgctctcaccatagccataatcggtgccgtgaactgggggctgatcggacttttccgctttgatcttgtagccttcctgttcggtgacatgtcctggttttccagaattgtatatgtgttggtgggaatcagcggactctatctcatcagcttctttctccatctgggagacagcgaagcttaaagttcctctacgggaatctgtacgccatctctccagatacgttccagatcatagagcagacggttttccttgtcaaagacatgtacgatcacgtcgccaaagtctaacagtacccagttggctgtctcatagccttcggtctgtctggcagggaaaccggctcttcccagtttttcttccacattatcacataatgcctgaatctgactggaattattaccaccggcaataataaaataatctgcgatcacagatactttactgatgtctattactttaatatcttctgcttttttatcatccaatgcttctacggcaagctttgccatttttctggattcttcgctcatgctgactcctcacactttctattttattgattcatttttcttataatagttataggtttcttctgtcatgggatccatctcaccatcacccgatttcagatattccaaagtatcctctaaaatcttcgtcacggcagcatccagatccgtaaatgccaggtgccggatctgggtaaggttcggtgcctgctttcgacccggttcaatataatctgcagtaaaaatgatcttctccagaagagtcatacccggacgtcctgtagtatgatacaaaattgcacttaagatctcaggatcttcgattttatattcctttttcgccagatagcttcccactctggcatgtaaaagatagggattgcgcttttccacatccgtcgcgggaagatgatacttttcgcaggcagacaaaagtttatcattttccatgcatttggcacaatcatgaagcagacctgcgatctgtgcgcgctccacatcttcaccgtatcgcatggcaagggccgctgccgtgtattccacacctaatgtatgggtaaaacgcttgggatcctgtactttttgcatctctttggtcagtttttttaagatatcactcatccaggtaaagccccttttcttccatatattccctcactgcttccggcacaagatagcgcacggaaagaccttcggatcttcttgcacggatttccgaagaagatatctcaattcttcgaaaagagagcaactgtatcttcgcagaaaaatgttcctccaactgactgatcttctcctgcattcccttcatatccgcatctccccgtaccgcagctataatctcacaggcagcaaacaggcggtctgcgcatttccagtgttccatcgtaaatagacagtcagctccgcagatgaaataaaaaagatgttccggatattctctgtgcagctgctccatggtctcatagctgtaagagtctccgggacgttttatctcgatgtccaggcagcggaatctgtcgttatctgcgatagcacgctgtaccatgtcataacgttctgtcccgggcagaaccgtaatgccctcttttgtcttcagataagaacaacccgtcggtatcatccagatctggtctaagtgtgccgactccaatgcctgttctgccagcatcagatgtcctatgtggattgggttaaaggtaccacccataatgcctattctgctcatacttcatccctctgtacggattccgattgcaatataacgattaacggggcagttcgatcttcggcttgtccttgtccggcttatacaatacgatttttttgccaatgacctgtaccacctgggagtgggtacgttctgccaccatctctgcgatcgctctggggtcatcgaaacaattcttcagcacgccgatcttgatcagttcgttattgttgaaagactcaccgatggctgcggtaagttccggagtcagactggattttcccacctggaaaatcggattcagattgcttgccagactcatcaaataggctctctgtttgctcgtcataatttattcctttctcaaacgtttccgtgttttacttatagtaatcaaaggacagaccatacatacggaccgtatcaccctcctggatacctaagctttccagttcttccaggattccggcatccttcaggaaattctggaagaaggtaaatcccttctcgctgtccagattcgtataacctaacatcttctcgatcttaggtccttctactacatactcgtcctcttcctcatcataggttactgtataggcatcgtccacagatcctgtcatgctatccgggaagtactcctgtgcgaagaccgtagtctcttctccaattccctgaagcatttcatttacttcatataaaagctcctttacaccctgaccggttactgcagacatagggaatacctttatccccttcggttcaaactctgcacggatcgcctccacggggtcggagccgtcctcggtgtaaatagcatcgatcttattcgctgcaatgacctgggggcgtgcagcaatctccggattataggcttccagttccttattgatggcataaatatcctgaatgggatctctgccttccgtacctgccgcatccacgatatggatgatcaccttggtacgctcaatatggcgcaggaactcatgtcccagtcccacgccttcggaagcgccttcgatcagtccggggatatccgcaataacgaaaccaccggttccttccagatccaccacacccaaatttggattcagagtagtgaaatgatagttagcaatcttgggtctggcattggttactctggacagaaaagtggacttacccacattggggaatcccaccagtcctacatcggcaatgaccttcagttccaacaaaagctccagttcctgtgctgcctgtcccggctgtgcatacttcggagcctgcatggtgctggtggcataatgctggttaccgttgccgcctttaccgccttttaagagaacaacccgtttgttgtctcccgacatatccgtaattacctgcccgctctgtgcttctttgattacagttcccgcagggactttgataataatatcttctccgtccttaccacggcaattctttttgccgccttcttccccgtctccggccttgtacttacggatgtgccggaaatcgatcagggtattcagtccctcatccacaacaaagatcacgtctccgccgtgaccaccgtctccaccgtcagggccgccactgggaacatatttttcacggcgaaaggacacatgaccatctccgcctttaccgcttcttacgtaaattttagctctgtcagcaaacattttgttctcctttccgacaaaatcctttacggactaaaagggcttcaaacaatcagtatgtttgaagccctggttaaatcaacttatttctctacaggatatacagaagcctgcttcttgtctctgccctttctctcgaaacggagaacgccatcaactaaagcaaacagagtatcatctccaccgataccaacattgacaccgggatggatctttgtaccgcgctgtctgtaaagaatatttccagcttttacaaactggccatcagctctcttcgcacctaatctcttggattcggagtctctaccgttcttggtagaaccaactccctttttatgtgcaaaaaattgaaggttaaagttaaacatggtctacacctcctcgatttttacttgcaaatactgttccccgtactgtctgctgagattctgtagtgagaacaccatggaatccatcagaaatacggatttgtcctgcagaacattctgaaaatcacatttgataaagcccgtctcctcattctgggtcagctgaagttcttcacctgccagttgtgaaagcgatccgatggtactttgcaccagtacagaaatcgctgcacagaggatatccggttccgtaccaaataatcttttcttggcatatcctgcatgtcccatgcagtagaatccacgatagattccctcatggtccttacgaatgataatagttgtcataacgattacgcgttaatcttttcgatcttaacctgagtgtatgcttgtctatgaccattcttcttatggtaaccggtttttctcttgtacttgtatacaataaccttcttacctctaccctgctccataacagttgcggtaacagttgcattagcaacgtcagcaccaaccttgagggtattgtcacttactgcgatcacctggtcaaaagtaacagtattaccagcttctgcatcgatcttctcaactttgatcacatcaccctcagaaactttgtactgctttccacctgttgcaataattgcgtacataataaggcacctcctattatttactcgctaactttggtggtgtaagactttaaaatccaacacacttatacctagttatgcggcataccgtagtataatagcatgaggtgccttgattcgtcaagatataattgtaatatttttttaaaaaatttcaaatacttacttttccataatgtcggcgttgtttttcttctcgaaatcttccacatactgaatgatcagttttacggttccttcgattcccaggatgctactgttgatacacagatcgtagctgtcagctctgccccatttcttggaagaataataattgtaataactctgacgctgcttatccttcttcgtgatcatttcctttgccttggcctctgtcagatcatatctagccatgatgcgcttggtcttcacatcatcatcaccgaagataaacaggttaatgcagttcttgtaatctgccagtgcatagtctgcgcaacggccaacgataacgcagggaccttcatcagcgatcttcttgatcgtgtcgaactgtgccaggaacaccttgtggctgataggcatatctacaaaagaggatgcattgtagccgaaagaataagtatccataaccagattatacaggaaggaattggtaggtctctcatcatgattctgaatcatttcctcacaaaaaccactttcctgtgctgctctggtaaggagttccttatcgtagcatttgattccgaaatactctgcaaccttttccccgatctcacggcctgcagaaccaaactgacgtccaatggtaataatcgtattcatacacacacccgctttctgctgtatttaataactagcttttctgtacctttattatacgtgatatttaaca

SEQ ID NO: 11396 - DNA, 835 bp, Unknown
  gut microbiota DNA sequence
gatgttgtacattatggagtcatgcagtccagaacaattgcgttattttattgtctgctggcgttttctcattgcatcgcagcagtacttcgtggatcaggtaatgcatccattccgatgatcgttatgctctgtgactggtgtttgtttcgcgtaagctacattactgtggcagttcgtattctcccggatatacgagtgattttctgggcatacccattgacttggggtatcagctccgcgatttttctgtatctgttcttacgtggaaaatgggtttacggattcgagaaatcctaatcgctataccgaactttttggtgtgaatttgatactgcgattactctacacataagcttttcctcatataacttacaatcaatactttttcttacagcaggcgtataccgctcttaacaagcctgaatcccataaaatggagctacacaaaattactatgcagctccatttttggtagtataacaacactctgaaacaacagtctcaatatatgcatgaacttaaacactgtaatcaatagattttctgacaaactgattgccactttgtactagattgctctccaccaattcccttttgacgctatctaatatgctagaaccaaacggctgtcccggttgccagttaggattcgctgcctttactgccgcatacatagcagaacgatatttgccctcatactttttactgtttacgttgatgctactatatccctggtgtccgtaactactgcctgatatactgattgacatactattacacctccttccaactcaatttattaaatctatcccacattgcatttaatatgagt

SEQ ID NO: 11397 - DNA, 835 bp, Unknown
  gut microbiota DNA sequence
attctttctataatttctatgtacattgacttaaagtttatatccaaataatgtacaaaactcattatcttcaatggctctccttagccatatctctgccagacggtcactctttttccagcataaaccatccttcttcaatgcgcataatcatctgattctcgttcaccggcacacagataatgtcctctccattctgacattttatattgcataccaaaatctcgtcatcatatatgctcaagccgtcgtggatattcatttcctgttcaaaatcttcccgccgtatctttccggattccacccctgccgtctggtaaccggtctcagatattctgacttcattttctgaaacagtcacactttttcccagccagtcttctacgttaaaatctgtgccctttaatgaacttcttggtgcctccttttctatttcttcatagcttccttcgtaggagttctcatagctgtccagatatgcaattttccatgttccattcaaatctttttcacttaccgttggatcacaatattgaaacggctccagcaaataataacctccaatatatctaaatgctaaatgtgtttcatccaaaataacgaagtaatctatgcagtaatagcttccatcatacattttatcccaatatctgaggtatctcacctgttccatgtcagcaaacttatcaatgctccaaaaggtccaatctgtaaaccattcatcctcagcagaataaggaaccacttcagaataatcaaattgactttttgaccattctaagagatcaggccattcaagaacacttttttctattgagttttcactaataataat

SEQ ID NO: 11398 - DNA, 5958 bp, Unknown
  gut microbiota DNA sequence
accggaatgaagatcacacccacactggaagaatgtaaaaacattgcagcagagggggactatggcgtgatccccataagcacagagctgtatgcggatatgaccacacccatcgaagtgctgcgcatcttaaaaaaggtcagcggtcatgtctacctgctggaaagcgcggaggcggataagcgatggggcaggtattcctttttaggatatgatcctttgcttgagatcacctgctataacggtatgaccacaataaaatcggaactgaccagccgaacggattccggagatgtcagaggaatcatccgcagcgtcatggaagagaataaaagtcccaagcttccggggctgccttcctttaccggaggtcttgtaggatatttttcctatgactatatcaaatacagcgaaccgaccctgcgactggatgcgaaggacgaggaaggtttccaggatgtgaacctgatgctgttccacaaggtcatcgcttttgacaactacagacagaagctgatcctgatcctgaatatcaagaccgatgatctggagatcaattatcatagagcagagcgtgaactgaacaacatgaaggagcttttgctgaatggggaaaaggcagagcatattccctgtaagctccggacagactttcaaccactgttcaatgaagcagcctattgcaacatggtcgagaaagcaaagcattacatcagagagggagatatcttccaggtggtattatccaatcgtctggaggcggagatggaaggaagcctcttagatgcttatcgggtactgcgcacgacaaatccttccccatacatgttctatttctccggaagtgatggtgagatcgtgggagccagcccggagacattagtaaagttagaggacgacgtgttacataccttccctttagccggaacgagaccaagaggtgccaccgaggaagcggacgaggcgctggaggcagagcttttagcagatgagaaggaacgctccgaacacaatatgttagtggatctgggacggaatgatatcggcaagatcagccggatcggcactgtggaagtggaaaagtatatgtccattgagagatattctcatgtcatgcacatcggatccacggtaagaggagtgatcagagaggatgcggatgctctggatgcggtggatgccatcctccccgcaggaactctgtcgggagccccgaagctgcgggcatgcgagatcatcaatgaactggaagacaataagaggggtatctacggcggagccataggctacatttcctttaccggaaatctggatacctgcattgccatcagacttgctttttccaagaatggaaaagtattcgtaagatccggcgccggtatcgtggcggacagcgtaccggagaaggaatacagagaatgtatccagaaagcggcagcagtccggcaggcacttcagaaagcacaggagggaatggaagtatgatattactgatcgataattacgacagcttttcctacaacgtataccagctggtgggaagtgtgaacccggatatccgggtgatccgcaatgatgaatgcagcgtggatgagatccgcgccatgaatccctcccacatcatattatcgccgggaccaggcagaccggacaaagcgggtgtctgtgaaaatgtgatccgcaagcttgggggcaggatacctattttgggaatctgtctcgggcatcaggcaatctgtgaggtggcaggtgctaccgttacctacgcatcccacctgatgcatgggaaacagtccctggcaaccttggatacagacagcgtattgttccgtggtatgaaaaaggttatcactgtggcaagatatcattccctggtagcggatccgcagacgattcccgcagaattgaaagttaccgcagttaccgaagatggcgaagtcatggcggtagaacagacggaaaaacagatctacggagtacaattccatccggaatctgtactgacaccggatggacgacagatcatcgttaattttttacagacacagaagggagaaggcagaaatatgattaaagaagcagtagctaaactggtaaaaaatgagaacatcggatacgatatggcaaaaactgttatggatgagatcatgagcggggaagccagcgatattttaaaaaccgcttacttaacagcgttaagccagaagggtgagaccatcgaagagatcaccggctccgcagaagagatgcggaaatttggcagaaagctgggcgcagaggtagaagcactggagatcgtgggaaccggcggtgacggctccaattccttcaatatctccaccacggcatccatcgtgatctcagcagcgggtgtaccggtagccaagcacggcaaccgtgcagccagctccaaatccggtgcggcagactgtctagaagcgctgggggtgaatatcaccatagagccggagcagagcaggaagctgttagaagagatcggcatctgcttcctctttgcacagaaatatcacactgccatgaaatatgtgggccccatccgcaaggaactgggcatccgtacaattttcaatatcttaggaccgttagcgaaccctgcaggaccggtatatcagatcatgggtgtgtacgatgaaagcctgctgccgtctatggcaaaggtattgtccaatctgggagtcaagagaggcatggtagtctacgggcaggacagactggatgagatctccgccagcgcgcctaccgcagtctgcgagatcgacaacggcacctttaaaaattatgtgatcacaccggaagatttcggcatggtaagatgcacgaaggaagatctggtgggcggaacaccgcaggagaacgcagagatcaccagagctatcttaaacggcgaaaagggtcccaaacgcaacgcagtactgctaaatgcggcagcagccctgtatgtggcaggcaaggcagacagcatggctgacggtgtaaaactggcagagaaggttatcgataccggtcttgcaaaggcacagttggagcgttttatcaagctgagcaatgcatgataaagtgttacgagttattttgacctgcagtgcaaggatattagtttttgattatgaaacggaaaggcaggatgaatggatgatactggatacgatagcggccactgcaaaggagcgggtggcagcagccaaagaagcattgtcccttacagaacagattgccagagcaagagagttagatagcaatacgggatttccctttgaacgggcactggcaaagccgggaatgagctttatctgcgaagcgaagaaagcatcgccctccaagggaatgatcgctgcggaattcccctatgtgcagatcgcaaaggaatacgaagcggcaggagcggatgctatttcggtgctgacggaaccggcgtattttcaggggaagaatgaatatctgacgaagatccgtcaggcggtgaagatcccgttactccggaaagatttcacagtggacgaatacatgatctacgaggcaaaaaatatcggagcggatgcagtgcttttaatctgtgccatcctgtcaccgatgcagttgtcagagtatgcgggaatcgcaggagaacttggactgtcggcactggtggaagcccatgatgagaaggaagtagagatggcattgaaagccggtgccagcatcatcggtgtcaataaccggaatctgaaagattttacggtggatatccataattccgtgcgactgcgggaactggtgccggagaacatcctcttcgtatctgagagcggtatgaagaccagacaggatatcgcgagactcgagcagaatggtaccaatgctgttctcatcggagagacgctgatgcgaagcgcggataagaaagcggtattgcaggagcttcgcggatagtgtgaaaaataaatttttcacacgcaaatttgtgcctacggcaaggtactaaagtacctgaaagtttgcaggttatagaaaggttgtaaatggtatgaaagtaaaaatgtgtgggctctatcgtccggaggatattgcttatgccaatgaggtgcagccggattatgtgggatttgtattttatgaaaagagccatcgtgcggttacgaaggagcaggcagccgaatatcgcaaaaagcttctgccgggaatccgaacggtgggggtgtttgtgaatgaggatccgaagaacatcatagaactgctggaggaaggtattttggatgtggcacagcttcacggggatgagacggaagaggatatccagtatctgcaggcggtgtgtcacaagccggtgatcaaggcggtcaaagtaagagaccggtatgatgtggaagcctggctggacagcagtgcggactatctgttattcgacaacggaatgggagcgggtcaggcttttgattggagtgtccttggcgggatcgacagggaatttttcctggcaggaggattgcaggcggagaatctcaccgaagccatggaagcggtaagaccttacgcggtagatttaagctccggcattgagagtgaccggaagaaagatccggagaagatgcaccggatcatggaactggtagagcgttatcggaacaatccgcaggcatcaaagtcgggggcttttgagcccgacatcaatagatagaagaattacaaatcagaaatcaaaatgaaaatcaggaataaaaatcaggatgaaagaaaagaggaggaacacatgagcaaaggacgttacggaatccacggaggacaatatatctccgagacattgatgaatgaactgatccatctggaggagtgctatgagcattataaaaaggatccggaattcaatgcggaactaaataagctgttgaatgaatatgccggtcgcccctctctgctgtactatgcggagaagatgaccaaggatctgggtggtgcgaagatctatttaaagagagaggacttaaaccacaccggttcccacaagatcaacaatgccctgggacaggcactgctggcaaagaagatgggtaagacccgtctgatcgcagagaccggtgcaggacagcatggtgtggctaccgcaacggcagcagcctttttagggatggaatgtgaaatttttatgggaaaagaagataccgacaggcaggcactgaatgtctatcgtatggaactcctcggagccagggtacatcccgtaacttccggtaccatgaccttaaaggatgccgtcaatgagaccatgagagaatggtccaaccgcgtagcggacacccattatgtactgggatccgttatgggaccgcatcctttccccatgatcgtaagagattttcagagtgtcatcagtcaggaagcaaaagagcagatcctaaaggcagaaggaaagcttccggcagccgtggtagcctgtgtgggcggcggcagcaatgccatgggtgcgttttacaactttattgaggataagaacgtagaactcatcggctgtgaggcggcaggcaaaggcgtggatacggcactgaccgcagctacgattgcgacgggatccttaggaatcttccatggaatgaaatcttatttctgccaggatgaatacggacagatcgctcccgtatattccatttccgcaggcctggattatcccggtatcggaccggagcatgcttatctgcatgacatcggcagagcgcagtatgtccccattacggatgatgaagcggtagatgcttttgaatatctggcaagaaccgagggaattatctgcgccattgagagtgcccatgcggtagcacaggtgcgtaagatcgcaaagaattacagcccggatcagagcattatcgtatgtctgtccggaagaggtgacaaggatgtggcagccatcgcgagataccgtggtgtggatattcatgactgatgaaattaacatatgaaatatagata

SEQ ID NO: 11399 - DNA, 1104 bp, Unknown
  gut microbiota DNA sequence
taaaaaagcattcatagctttccttaccgcaggagacccggatgcggacagcactgtaaagtttattctggagatggagaaggcaggggcggatctcatagagattggtattcccttttctgatcccacggcggaaggtgtggtgatccaggaggcaaatatccgttctcttagcaacggtatgaccacggacggtgtgtttgagatcgtgaagagagtgcgggagcagtcggagatccccctggcgtttatgacttatgtaaatcccgtattccattatgggtatgagaaattttttacaaagtgtgaggaactgggcatcagcgctatcattattcccgatgtaccgtatgaagagaaggcagaggtggaggctcccgctaaagcccatggtgtgaaggtgatctccatgatcgcacccacttccgagagccgtatccgtcagattgcatcggaggcggaaggattcatctatgtggtaagctccatgggtgtcaccggtgtgcgcagcgagatcaagaccaatctgcctgctatcgtggaaagcatccgcactgtgactgacgttccctgtgctatcggtttcggtatcagtactcccgagcaggccaaagccatggcatccatctccgatggagccattgttggaagcgcaatcgtgaaaattattgcaaagtatggtaaggacgcagctccttacatcggagaatatgtgaagagcatgaaagaggctgtggcggaagcgtaaataagattacgaagaataaggaaataagaaagtgataggaaagccggagtggtcgcaaagactgctccggtttttgcatctgaaaataaaaagagagggaaatgatgcaagtatgatgcaatggtgtgttattatctgttataatttgataaaacaaccatcgtagactgtgggagggaacggaacatgaagatgtgtaaaaaatgctggcgaaggaaaggtttgaccggggtaattctggcatgtttatttcttacggcctgcggcggagaaacgcaggaagctgagagtaaaaatgtcgtgcaggaaagtgaaacggtaagtacctccaacaccgtcgaacagacagacgaaca

SEQ ID NO: 11400 - DNA, 4535 bp, Unknown
  gut microbiota DNA sequence
tgatcaattcgaagagcgcagcggggcagaactgctgacggaattctatgagcagtccacacaggggaacccggcgcaattattgatggcaaatgaactctttaatgaaaaatggagcctttcttatgttgaattcgacggaagtacatattatatgcttaggggtgatgtggatgccgggactgtagaggaagactataaggaaatgtattttcattccctgaatattattgaaaagaaagatatagaaccggacatggcactcatcatgatcgtatttaccaatcaggaagatgtttccgatgaacaggcggagcaatatgtgaaatggtcggaggagggaaaaagacctgatgacatagaaatatattatttcttaaatctgagatacggtcttatgagtggcgacgatgacttgaaaatactggaagaagtggagagaacagcggatagaatgaccgtgtaccggatagcaaaggacttcacaaatacatattttcaagaggaatacacaggcaaagctgagatcatgggaatcaagggactttccggggtggatacggacagcaagggtgactgcacggtggaagtagagttccggccggtacaggaggattctctatcgtatctgtttatgacgtttggatatgatgagatgggatggacaatccgcagttacggactggaaaagtaggcggacataggatacaaaaattgtatgaaaatcctacaaaattttgttgacaaaagagtattgcctatgtataataagtcagtgtgtgaatcaacacatcgtaggagacttgtgttttctacgcaacatattgcataggagtcgctatgttagtaagtttatctgatgtattaacatccgaaggcaaggtagagactgttgccattccgcttgagatgacaagctttaagagccgccagggagatttctctattatggagaagacacccattcatcttacttttaccaacatcggtgtgaacaaggcaaaagtaaccggcactgcagagcttacctttgatacgaaatgtgacagatgccttactgaagtacctacagcaatgaagcttaagtttgacagaatcgtttattctccggaagcggaagtaagtgaggaagaagataccgagcagagctttatggatggatggcagctggatgtagaggcttttgtgtacgatgaaattctggtgaattggccggcaaagatcctgtgtaaggaagactgcaagggtatctgccctgtatgtggtcagaacaggaatctgaaggaatgtggttgcgatactttcgtaccggatcctcgtatggcagcaatccaagatatcttcaacgcgaataaggaggtgtaacgatgtctatttgtcctaagaataaatcttccaaaggtagaagagataagagaagagcaaactggaaaatgagcgctcctacattggtaaagtgcagcaaatgtggtgcactgatgatgcctcacagagtttgcaaggcttgcggttcttacaataagaagcaggtcgtaagcgttgattaattgataaatcaatgaagcgaaattaagtgaaaagagaagaggagattccatccggaatctccttttgctttcacaaaaaaatcacttgctttttatatacgcctttagtatagtaagaatgaatctgccatcatcaaactgtttggtgcgatccacggagcggtttgatgatgagcggataaacataaacaggtaaaggaacgacgaaatggcagaatatgtaaatgttgctgtagacgcaatgggtggcgataatgctccggcagagatcgtaaaaggtgctgtggaagctgtcaacgcagataagcgcgtcaaagtattcctggtaggcaaggagcctgtgatccgtgaggaattaaaggcgtacagctatgatgcagagcagctggaagtcgtacatgctgaagaagtcattgagacggcagaacctccggtcatggcaatccgtcggaagaaggattcctccattgtcaaagccatgtatatggtgaagaacggcgaatgcgatgcatttgtatctgcgggaagtaccggtgcggtactggtaggtggacaggtgatcgtaggtcgtatccgcggtgtggagagacctcctttagcgcctctgatccctacggagaagggcgtaagccttctgttagactgtggagccaacgtagatgcgagaccttccatgttagtccagtttgccaagatgggcagtgtctatatggaaagcgttatgggagtaaagaatccgagagtcggtattgtgaatatcggcgccgaggaggagaagggtaacgcgctggtaaaagaaaccttcccgcttcttaagaattgcccggagatcaatttcatcggcagtgtggaagcaagagatattccggcaggtgcggcagatgtcattgtctgtgaagcgtttgtgggcaatgtgatattgaagatgtatgagggcgtaagctccgcgcttctgcatcaggtgaagcaggggatgatgtccacgcttcgcagtaaaatgggtgcactgcttgtgaagccggcactcaagactacattaaagagttttgatacttcccagtacggtggcgctccgctactcggactgaacggtctggtagtgaagactcacggaagcagcaaggcagtggaagtgaagaattctattctgcagtgtattgcttttaaggaagagaagatcaacgagaagatcaaagaacagatcagcccggaagataaggctgcagagaataattaatcaagagaaatattttgagaaagaaggaactgttatggaatttgaaaagttgaagaaaatcattgctgaggtattaaacgtagatcccgatgagatcaccatggagaccacattccaggatgacctgggcgctgattccctcgatgtataccagatcatcatgggcatcgaggaagagttcgatatcgagatccctgctgagaccgcagagcaggttactacagtagaagacgctgtagagatgatcaagaacgcagtgaactagtaaagctacgagccatgcaaagacaaaacaggaactgtgaccgagagcttgctcacaaggcactgttcctgtttttcagtttatatgatgatgtcgaacttccgtagccccaatcaaggtaagaaacgcgacacgctctcgctctgtcgcagagcgtagcggtacataagcgaggataataccctcgctaagtaccgacgtctgcttacggtctgcttattcttatcttgattgtgactactgggtttgaactattagcatttgtgaggacaagaaaatgttggatggttatacaatggacgtgctggagcagcgcatcggctattgctttcacaacaaagcattgctgaagcaggctctaacccacagctcctataccaatgaacaaaagatcaacaaaacagagaactacgaacgtatcgaattcttaggagatgccgtactggaactggtatccagtgacttcctgtttcgggaacacccggatgttccggagggtgaactgaccaagatgcgcgcctccatggtgtgcgagccttccctggcattctgtgccagagacctggagctgggacagtttatgcttttgggaaagggcgaagagaataccggcggcagacgcagagacagcatcacctctgacggtatggaagctatgatcggtgccatttatctggatggtggcatgctgcctgccaaggcttttattgaccgcttcattctgtcggatttagaggacaagcgtcttttctatgacagtaagagcaatctccaggaattgatccaaggaaaactcaaaaaagagtttgagtaccggctgttagaggagagcggaccggaacacgacaagaccttcgtggtagagatcgacatggagggagaatgccttggccgtgggcagggaagaacaaaaaaagcggcagaacagcaggcggcttacgaggcgcttctgctattgagggatagaggatatgtatttaaaaagtattgagatacacgggttcaaatcatttgccaataagatcgtatttcagttccacaacggaatcaccggtatcgtaggacctaacggcagcggtaagagtaacgttgcggacgcggtaagatgggtgctgggagaacaacgcatcaaacagctgcgtggtgccagcatgcaggatgttattttctcgggaacagagaccagaaaaccgttgagctacgcctatgttgccattactctggacaacagcgatcaccagctggcgatcgactatgacgaagttacagtggcgagacggatctaccgttccggagaaagtgaatatctgatcaatggtactccctgcagattaaaggatgtcaatgagctgttctatgataccggtatcggtaaggagggctattccattatcggacagggccagatcgacaagatcttaagcggtaagcccgaggaacgtcgtgaactgttcgatgaggctgctggaatcgtgaaatttaaacg

SEQ ID NO: 11401 - DNA, 27454 bp, Unknown
  gut microbiota DNA sequence
taaacgcaggaaagcagcggcccagacgaagcttgaaaacgagaaacagaatctggtgcgtgtgaatgatattttatcggagctggaaaaacaggtaggacctctggagaagcagtccgaggtggcaaaggtctatctgaggaaaaaggaagagttgaaatccttagatatcaatgtgttcttattggaaaataagagactgagagaacagcttgcttccgcagaagaaaaatacaatctggcaagcacggaacttggtgagaccggtgaaaaatatgagggtatcaaggaagaatacgaacggatccagcaggagattgaaagtctggatgtcgctatcgaagctgccagggaacagctgacggataccggtctgatgcgcggtaagttagaaggcgagatcaatgtcttaaaggagcagatcaattccgcccacggcagtgagacccatctgaacaaccgtaaagcagccctggaagaggagattgccggcaaagaacaggaaaagcaggatatcttaaccgataaaaaggataccgatacccaggtgcaggagattgcagaagctgcggcaaaagcgaaggctgatctggaagccatccagaataagatcaccgagctcaacaataatatcgaagccgggaaaaataccattattggagaactgaaccagagagctaccattaaatccaagatgggtcgcttcgataccatgatggagcagatcaatatccgcaaggcagagttaaattccagactgttacgtgccaaatccgatgaggcagccagagaagaaacggtgaagaagctggaagagacttttgagaccgtgactgaggaactgcgtcagatgacggaacaggaagcggcatccgaactggagcttggcaatatccgtgaaaatctcaccggactggatgcgaagctgcgggagacacagaaccgtttccatcaggagcagtccaagctagaggccctgaccaatattactgaacgctatgacggttacggcggcagcgtcaaaaaagtcatggagcagaaggaaaaagaaaagggcatcatcggtgtcgtagcggacatcattcaggtggaggcaaaatatgagaccgccatcgagactgcgctgggcggcaatatccagaatatcgtaacggataacgaagagactgctaagcatatgatcggcttcttaaagcagaaccgtctcggaagagccacattcctgcctctgaccagtattaccaagccccaggaattcaagaatccggaggcgcttaaggaaaaaggtgtcatcggtatggcagacgaactggtaggcacagaagaagaataccgcaatgtggcgaaggctatgctgggacgtatcgttgtggtagacaatgtggacaatgctttgaagatcgctagaaaattcgattacggcatccgcatggtcaccctggaaggcgaacttttagttcccggtggtgccatcagcggcggcgcttttaaaaacaacagcaatctcctgggaagacgtcgtgagatggacgaactggagaaaaaggtgaaaaagctctctgaggatatcaagacctacaatcagaagatcgaagacaccaagagtaagagaaataaacttcgtatggatctggaagcactgaagaccgagatgcagcgcaagtccattgagcagaataccgcaagattgaacatctcccaggcaagagagcgtatggaagaagaggcagagagtgcacagtctctgaagctggaggagcaggagattgagaccaggatcttcgagatccgttccggcaaggaatccattacgcaggaactggctgccagcgaagaactggagaagacgacgcaggaacagatcctgggcttccagaaagaattggagagctgcagactggaagagagcgaagcttccgcccacgcaggagaatgggaagtaaaagtcgagaagatgcgtcaggcgctggattacaagcaggcaaatgtggatcgtataggcggcgagctggaacgtgcacaggcagagcttaatgagatattagaggctctgatggaaaatgcgcaggaagtggaacgcaagaagaacaacatcctggagattgagaagaccattgctgcttctcatgagaatcaggatgcttccaggaagaagctggacgaagaccttgcgaaaaaggaagaactgtctgcaaaacagaaagatttcttccgcagcagagaagaaatgtcagaacgcatgaatgctctggataaggaagtctatcgtctgggcgaacagaagaaaaagttggaggacggcatcgaaggtcagatcaattacatgtgggatgagtatgagatcaccttaagcgatgcggcaggactccgcaacgaagagatgaatgatctgccagctatgaaacgcgagatcagcggtctgaaagacgagatccgcaagcttggcaatgtcaatgtcaacgccattgaggattacaagaacctgatggagcgctatactttcatgaagacccagcatgacgatctggtggaagcggagaagacactggaaggcatcatcgaagaactggataccgccatgcgtaaacagttcacggagaaattcgcagagatcagcagagagttcgataaggtattcaaggaactcttcggtggtggtaagggaacactggaactgatggaggatgaggatattctggaggcaggcatccgcatcatcgcacagccccccggaaaaaagctgcagaacatgatgcagctctccggtggagagaaggcattatccgccatttccctactgttcgcaattcagaacctgaagccgtctccgttctgtctgttagacgagatcgaggccgcactggatgattccaacgtaggacgttttgctaaatatttacataagctgaccaagaacacccagttcattgtcattacccacagacgaggcactatggaacaggtggacagactgtatggtatcaccatgcaggagaagggcgtatctaccttagtcagcgtcaacctcattgacaaggacctggacgattagtatgaaaatcgtgaagaagttctaagtttcatacaagaaaaacgcaagcgtttttctggatagaatgctgattggaggaaatgggatgagtgaggaaaagaaaggcttttttgcgaggctgaaagaaggactgaccaagacccgtgataacattgtccggggaatcgattcggtcttcagcggtttttccgccattgatgatgatttctacgaagaactggaagaaatcctcattatgggagatatcggtgtcaatgccaccactgccattgtggagagattaaaacagcaggtaaaagaaaagcatatcaaggagccttccgaatgcaaacagcttctgatcgaaagtattaaggagcagatgcaggtggatgagaccgcctatgatttcgagaaggaacagtccgtgatcatggtcattggtgtcaacggtgtgggtaagaccacttccgtgggtaaactggcaggtaaattaaaggatgagggcagaaaagtccttatcgccgcagcggatacatttcgtgccgcagcgggagatcagctggcagaatgggcatccagagcggatgtgcccatgatcggcggaaaagagggcgcggatcccgccagtgtggtgtttgatgccgtgaatgcagcgaaagcaagaggcgtggatgtgcttctcattgataccgccggcagactgcataataaaaagaacctgatggaagaacttcgcaagatgaaccgcatcattgacaaggagttcccgaatgcccacagagagaacctgatcgtattggatggtaccaccggacagaatgcgctggtacaggcgagagaattcggtgaggtggcagatctcacaggcatcattctgacgaagatggacggaacggcgaagggcggtattgcggtggcaatccagtctgaactgaaggttccggtaaaatacatcggtgtgggggagaccattgaggatctccaaaaattcaattctgaggaatttgtaaacgcattgtttgatgtgaatatggaggatatcggagaactgcatctgcccgagaacgagcaacagacggatacgcaggaggaataaccgacagaccaaggaaagtgtgacagaaaggcatgggaagaaaaatgcaggaagaaatgttgactctagagaaatttgaagaagcaagtgaaattgtaaaaaaggtaacgttagagaccaagctggtatacagtgattatttcagcgcccagaccggcaaccgtgtatacttaaagcccgagaacttacagtttaccggagcctacaagttaagaggcgcttattacaaaatgagcacactgaccgatgaagagcgtgccaagggactgattaccgcctcagcgggcaaccatgcccagggcgttgcttatgcagcaaaatgctacggcagcaaggccactatcgtaatgcccaccaccacacctctgatcaaggtaaaccgtaccagaggctacggtgcagaggtagtactgcacggtgatgtctatgatgaggcatgtgcaaaagcatatgaactggcagaagagcacggatataccttcattcatccgtttgatgatctgactgtggcgaccggtcagggtaccattgccatggagatctttaaagagcttcccctggtagactacattttagttcctattggtggcggcggactggcaaccggtgtctccacactggcaaaactgctgaacccgaagatcaaggtcatcggtgtggaacctgcgggagctaactgcatgcaggtatccttaaagaacggcaaggtaaccaccctgccaaaggtcaacaccattgcagacggtactgcggttaagactcccggaagtaagattttcccgtacttacagaagaatctggacgacgtgatcactgtggaggacgaggatctggtagtagccttcctggatatggtggagaaccacaagatgatcgtggagaattccggactgctgaccgtggcagccttaaagcagttaaatgtgaaggataagcgtattgtatctatcttgagcggcggtaatatggatgtcatcaccatgtcctccgtagtacagcagggtctgatcttaagagaccgtatcttcaccgtatccgtattgcttcccgacaagcccggtgagctgtgcagagtatccggtatcattgccggcgttaacggtaatgtcatcaagctggagcacaaccagtttgtatccatcaaccgtagcgctgccgtggaactgcgtatcacactggaagcattcggtaccgagcataagaatgagatcattgccgctctggaaaaagaaggctatcagcccaaggtggtcagagcaaatatataattgtgcagagtcatgcagatgtcgctgcatagtttcttagaaaagaagtgaatgcatcactgataaaagccgcatattataggtatgcggcttttatgtgtggaaatggagagaaatatggcgaaaaagactgaaaaagaactggaaatacagagactggataaaaagacaccactgcagatgtttcgggattatgtaatgatcacggtggcttcttttgtctatgcggtatccgtcagcatgtttttggatccgaactctctggcacccgggggtatcaccggtattgccattattttaaaccgtttgttcggaattgagacaggtacctggatgttactcatcaacataccgatcctactgatcggtatctggaaattcggattgcggtttattttgtctacgatctattgtacagcaatgacatcactgtttacaaacctgctgacaccggtaggagcagtgaccacagatccattgcttgcctctctgaccggaagtgcactgatggcagtatctatgggctgggtgttcaaggccggatccactacgggaggaacagatattattatcaaattactgcggttgaagttcccgtacctcaagacgggagcattgtttttcctgacagatgtggttatcgtcatagcatcggcatttgtattccggaacattgacaaggcactgtatgccggtatcgtggtcattatcacatcagtagtgctggatgtggtattgtacggtcgtgatgaggcgaagctgatctatattatcagcgaccatgcagagaagattgcagggagacttttggaggagctggatattggtgtgacttatgtacagggcagtggtgcttacagcggcaaggagaagagcgtcattatgtgcgccatgaagaaaaacatttctcccaaggcggaagaaatcgtaaaggaagaggatcccctggcatttatgatcgtcaccagtgccacggagatcttcggggagggctataagagctatttcagtgagaaactgtgatgctgaacatataattttagttaaaaagcagctgaaagggcttacattttcaaagagaatcatctataatagcgtcgtgccggtagggcagacgctattttggcgatacgatgaatgggtacggattatgatttcaaaccgggcagaagcagcctgcggattactgtggcatagaatagtgtaaaaccatagagagaaccgaatggaaactgtggtaatgatataggagctatgtgatatgagtgatacaacattgtcaaaagaggagaaacaatataaacggctcaccgaggaaccggtagcacggttggtcctggaactgggactgccgactaccatcagtatgctgatcacgaatctgtataatatggtggatacctggttcgtaagccagttaggcaccagtgctaccggagcggtaggcgtggtgtttggcttgatggcaattattcaggcgttcggattcatgttcggtcatggcgccggaagtaatatcagtcggttgttaggagctcatgaaaaggagcgagcgaaagctttttccgcaacgggattttatttggctatgggagccggagtgttgatcgcggtgatcggtattgtggatctgaacggattgtgcagattgcttggaagtacggagaccatccttccctatgcgagaatctatgctttctatattctggtgtcggcaccggcaatggcatccagctgtgtgatgaacaatgtgctccggtatgaaggctatgccaatctggcgatggtaggactggtcttaggcggtatcttaaatatggcgggagatgccattcttatgtgggggttaaatcttggtatccggggagcggcactttccactatgatctcccagtacgtatcctttggaatcctgttattctttttcctacgtggaaagacccagagcagcctggcaccgaaatattttacatgggaatttgccgtacataagaacattcttacagcaggcttccccagtatgatgcgacagggactggccagcgtgtccaccatggtgctgaatgcacaggcggcagtctacggggatattgccattgcagctatgagcgtggtatcccgtattttcaatttcgtattcagtgtggcactgggtatcggtcagggcttccagccggtatcctccttcaattatggggcaaagaagtattcccgtgtaaggaaagcgttctggttcacattgtgtgccagcctggtaaccatggcagtgttcgcaggtgtggtgtatgtgttccgcagagagctgttgctgcaattccttacggatatggatgcctatgagattgctttttatgcgttgcagatccagtgcctgacgcttccgtttattccggtatgcatctgcggcaacatgctgtttcagtccattggaaagggcggcagggcgacgatcttagcctccttccgaagtggcaccatctacattccggcactgctgatcctgacggcgttctggggaattcggggcatccagtggtcacagccggtgtccgatattttatctgcggttttgtcattgccggtggctgtggcgttcttaaagggactgccggaagacagtacggaagtatagagaagaatgagatcccttcgtcataagacggagggatttttatgtacagatgtatccatacgcaggaatgagtatctgccttgatctgcgaagctgttgacattaaataatccacatgatacaatacatttaacaattaggttaaatgttaaacgcttggatgaaaggatgtgattcatttttgggaatacaggatacattgaaagcgttggcagatcctataaggcgtgaaatactaaatcttctgaaaaacggtcgattgtcggcaggagagatctgcgaacactttccggtgacgggggcttccatatcaaggcatctgtcggtgttaaaggaggcagatctgattcgggacaaacgggaaggaaagtttatttattatgaactgaatgcttccgtgctggaagaaatcatgttatggatcacagatttgaaaggagcatcggataatgaaggaaatgatacagaaaaataaaggcaggctgatctgctcggcatttgttatgtgcataggaatgatattgggatatacctgtgagaacagtctgtgggtaaacggcacttttgcagtgacttatgtggtagcaatggcagtaactttttacgacaacagaaacaggcagcagagtgacaaggtcataagaatggttacgtggatcgtgccgggaatgacattgctctataacggcatcgccagatggatcgatatgggtgtaacgaaagagaatctgctcatggcaattttgtatgtcggaatgggattgctatttgttattgtgggcaattatctgcccaaggtgaaaccaaaccgcaccatcggcatccgcgtcgtatggacattgcaggatgaggagaactggaatgccacgcaccgcttcagtggaaaaatatgggtggcagcaggactgttgagtatgagctgtggactgttcagtgacagcatggctgcattatttttgtttattgtcgctatcacggcagcagcttttggcagcatcctgtattcttatctctattatagaaagaagttgcgcaccggaaaagggctggcagtacactacaaccataaagtggttgcggtctatgtctttataatgctcgcgtgtgtgctatttacggtatggacgttatatacgggaaaaatcgagatctgttacggagaaaatgaatttactgttcaggcggagggctggcaggattacacagtgaaatatgacgctatcgaaagcattgcttacgaagagaatatgttccgggatacgaatacaatccggacgaacggttttggcaacctgaaatattccatgggacattttcgcgatgaaatccacgcagattacatccgctatactcataacgactgtgatacttatgtagtcatggaagtagaggggagcaccgttattctaaacggtgcagatgatgcgcagacccgggaaatctacaataatatcagagaacggatggaaaaataatatctgtaaataaatttcccaattgcttttatatttttcaaaaatggtatacactagacttatgtaagttttgtataatgaggatttctggaaagggtggttacagtatgctgaaacagtggatcccggcggcaaagccggacaaagaggaactggacaaacgactggatgcagcgcaggaggagcttttaagactccagatgcagatcaaggagcataagctcccggtgctggtgctgatcgaaggctggggtgccgccggcaagggcagtaccatcggcggaattattaaaaatatcgatcccagattcttcaaggtggcttccatgtccgcaccgacggaggaagagaagcggaagcctttcctgtatcggtattttgtaaaaattccggaagccggcaagttcgaattcctggattccggctggatggatgaggtgacgaagggaagacttcggggcgaactgtcggataagcagtatgcggagcgcattgagagcatcaagcgttttgaacgacagctgacggacaacggttatctggtgctgaagctctttttccagatcgggaaaaaggaacagaaaaagcgcctggaggagctggaaggcaacaaggacaccgcatggcgtgtgggcgagaacgactggtggcagaacaagcattatgacaaatgtgaggaagtctacgacaaatacctcacagatacgaacgcttccgtagctccctggtacatcatagattccggggacaaaaagtgggcggaattgcaagtgctggagacattatgcagtggtatccatgtggccatgcagaatgagagccttgctgtacccattttgcagaatgtattcccgctggtgaagatgccgaagctgtccgaggtggaactggacaaggaaatctccgaggaagaatacaagaaagaactgcgtcatctgcagaagaagctgaatgccctgcattaccgcctgtatcggaaaaagatcccggtagtcatcgcctacgaaggctgggatgccgcaggcaagggcggcaatatcaagcggatcgcgggagcactggatcccagaggctacgaggtacaccccatcgccagcccggaaccccacgagaaagcgagacattatctctggcgattctggacgagacttcctaagaccggacatatcgccatttttgatcgtacctggtacggacgcgtcatggtagaacggctggaaggcttctgtagtaccaacgactggcagcgggcttataacgagatcaacgagttcgagaaggaattgtcccagtggggcgcggtgatcatcaagttctgggtgcagatcgacaaggatacccagctggaacgcttcacagagcggcagaataccccggagaagcagtggaagatcacggatgaagactggcgtaaccgcgacaaatgggaccagtacgaagacgctgtgaacgaaatgctccagaagaccagcacggaatatgctccctggcacattctggaatccgtagataaaaaatatgccagaatcaaagcattgaagatcgtgatagaggaattggagaaggcactggggtaagcgcactggaataagaatagctgtttcgatataaaaaattgacaaaaccgtctgataaggacggtttttgttgcgttataaatgttttttgttataatgagacatagttatttttggaaattgcaaagatacagaaagatatttggaaacagaagaaatcgtcaggtgttacggcataatgagaggagaaatcatgggcgagaaccgtaagatatatgcagcattattgggagcaggaactgtgggaagcggtgtgtacaagctggcagggatgcaggaagaggatatctgcctgaagacaggagcacatctggagattaaaaagattctggtgcgcaatcccggaaaggtaagagaaggaatcccacaggagttgttcacagatagctggcaggaaattctggaagacccccagattcagatcgtcattgaagtcatgggtggtatagaaccggccagaacttatgtggaagaagccatgaaggctggaaaacaggtggtcaccgccaacaaggatctgctggcggagtacggggatccgttattcgagatcgctacagagaataaatgcgacttacagttcgaggcggcagtggcaggcgccattcccattatccgccctttgcggcagagtctggcgggaagtcaattgacggagatcatgggaatcgtcaacggtacgacaaactatattttgaccaaaatgtccgaggaaggtatgggctatcaggaagctctggatatggctacgagactgggctatgcggaagcagatcccacagcggacgtggaaggctatgatgcgggacgcaagatcgccattatggcatccatcgctttcagctcccgcgtgacgttccctcaggtttatacggaaggcatcacgaagattacagcagaggatatccggtatgcaaaagaattcggctatgtgatcaaactgcttggtattacaaagcttacaggtaaaggaattgaagtaaaagtacatcccacactgattccggacagccatcctcttgccacggtcagagattccttcaatgctgtatttgttcatggtcaggcttgtgatgatgccatgttcatgggacggggcgccggacagatgcctaccgccagtgcggtactgggagatgtcattgatgtgatgcgtaatattatccatggaagctgcggcaagattggcagcgacagccataagaaacttcctgtactggatgtagaggatacgaagagccgattcttcctacgcttacaggtggagaatcgtgccggagccctggcaaatatcgcaggagtccttggcaacaacgatgtcagcatcgcccagatggtacagaagcgcagccacgacggcattgccgagatcgtggtcatcaccgatctcgtaaaagagagacattttaatgatgccatccgtatcatggagggaatgtccgtcgtgagggaaatctccggcattatccgtgtgtactaaaagtatggtaaattgaaagttacgcaaaacagccccgtagccctctttctattgctttggtgaaaattgcatcaaaatagcaaaatccgtacaaaaaaacttctaaatcaggaatttttgtacggattttcttcattttgcacgttcagcgaaaataacagctttttacttggcgaaatctcctgtttttgtatttttttagccgaaaatggtgtttttaatacaaacagatctacccgggtggcagatggcatccgcaatgagccacgctattcataagattgtcagcaaaaagcgctgccaatcttatttcatatcgcggcgttcgccgcatcacgccaaaagtaaaaaccgtgatttgtgagcaagctcccaatcacggttcttattttgcctatgcgcggctcattgctcgcgtaaactctcaatttatatggcaaaggtgtaaagaaaaaatacttgacacctatgactttctatagtatgatagccaaggtgcatatcgcatgacctatagaaaggcactggataagatggacaggattttggaacagaatctgttgtatgatttctacggtgagcttctcaccgagcatcagcagcgagtgtatgaggatgcagtatataatgatatgtctctcagtgagatcgctggagaacagggcatcagcaggcagggcgtccatgatctgatcaagcgttgcgataagatcctgcaggattatgaaagcaagcttcatctggtggaacgcttcatggcagccaaggagaagatcggtgagattgaacagttgacagcggaggataccacggatcccgaagaacggatgagacgcatccgagaattgtccagatcccttttaaaggaatggtaaggagcagcaaatggcatttgaaagtttaacagacaaactccaaaatgtttttaaaaacttaagaagcaaaggtcgtctgacggaagaggatgtcaagtccgcactgaaggaagtcaagatggcgctcctggaggcagatgttaacttcaaggtagtcaagcagttcgtgaaggcagtggaagaacgtgccattggccaggatgtcatgaacggtctgaatccaggacaaatggtgatcaagatcgtaaatgaagagatgatcaacctcatgggcagtgagaccacagagatcgccatgcagccgggtaaggctattaccgtcatcatgatggcaggtcttcagggtgcaggtaagaccacagcaactgcgaaaattgccggtaagctgaagctcaagggcaaaaagccgttattggtagcctgcgatatttaccgtcccgcagccattgaacagttacagatcaacggtaagaagcaggaagtcgatgtgttctccatgggaacggatcacaagcctgcagagattgcacagaatgcgatcgcatatgcggagaagaacggtcataatgtagtaatcctcgatactgccggacgacttcatgtggatgaagacatgatggcagaacttcaggagatcaaagaaaccgtgacagtgcatcagacactgttggtagtcgatgcaatgaccggtcaggatgctgtaaatgtggcaaaggaattcgatgaaaaggtgggcgtcgacggtgtgatcctgtccaaaatggacggcgataccagaggcggtgcggcactttccatcaaagcagtcacaggtaagccgattctttttgtaagtatgggagagaagctgtctgacttagagcagttctaccccgaccgtatggcaagccggatcttaggcatgggcgacgtattatccctcattgataaggcgcaggcaagcattgacatcgatgaggagaagagccgtgatatggccggccgcatgaagaaaggtaagttcgattttgaagattacctggagagcatgaagcagatgcgcaacatgggcggtctgtccagtatcttagggatgcttcccggaatgggtatcaagacctcggatttagagggtgccattgatgagacccagatgaagcgcacggaagccatcgtattatccatgacgaaggaagagcgcaggaatcccaagatcctgacccctcagagaaaacaccgcattgcaaaaggtgccggcgtggatatcgcaacggtgaaccggtttatcaaacagtttgagcagacccagaagatgatgaagcagtttggcggcggcaaaaagggccgcggcggcatgggcggtatgttcggcggcggaaaatttcccggcatgggcggtagatttttctaagcacttttacttatttaacttaagtccgatatgaacaatcagttcttatcatataaatttatttttttattaatggaggaaaaagaaatggcagtaaagatcagattaagaagaatgggacagaagaaggctcctttttacagaatcattgtagcagattctcgttctcccagagacggtagattcatcgaggagatcggtacttacgatccttccaccgatccttccactttcaagatcaacgaagacctggctaaaaagtggttacagaacggtgctcagcctaccgagcaggttgctaagcttttcaaggttgcaggaatcgagaaataagttctaaatatctattcatcggaggtggattatgaaggaactagtagaagtagttgcaaaggcactcgttgataatccggatgaagtagttgtaactgagaagacagaaggaaaaaatatcgtccttgaacttcatgtagctgcgtccgatatgggtaaggtgatcggtaagcagggacgtattgcaaaagcaatccgctccgttgtgaaggcagcatcatccaaagacaacacaagagtggacgttgagatcgtttaattcaagttagaagatcacagacgttgagcggagaaacatacagtcgtgtgtttctccgttttttggctatcagccggaatggagtaagactatatggaagatctgttacaggtcggcattatcacttccacccatggggtaagaggagaagtgaaggtatatcctaccacggatgatcccagaagattccgcagattaaaggaagtcgttctggataccggcagggaaaaattaaatctggaaatcgaaggcgtcaagttctttaaacagtttgtgatcctgaaattcaaaggactggacaacattaacgatatagaaaaataccgtcagaaaagcctgtatgtgacccgtaaaaatgcggtgcgtctgcaaagagacgagtatttcattgcagacctgatcggacttaaggtgcaggatgaggatggcacagaattaggtacggtaaaggatgtcatcgagaccggtgccaatgatgtttacgaagtggagatggcggacggcagaagtctgcttttgcccgctatcaaacagtgtatactgaacgtggacgtggagaacggcatgatgcaggtacatgtattggaaggattgcttgacttatgatgaagtttcacattttgaccctgtttcctgagatggtgcaacagggactggcgaccagtattttaggaagagcggcggagaagaacctgatctccatcgatgcggtgaatattcgggattacacacaggacaagcatggaaaagtagatgattatacttatggcggcggcgccggaatgctgatgcaggcacagccggtctatgatgcttaccggtcggtagcaggagaaaaaaagatccgctgcgtctatctgactccccagggagagccttttacacagaaaaaggcaaaggaattgtccggggaagaggaattggtattactttgtgggcattacgaaggaattgatgagcgagtattggaggaagtggtaaccgattatatctccatcggagattatgttcttaccggcggagagctggctgccatggtcgtggtggacgctgtggcgcgactggtgcctgaagtgcttaataacgacgaatctgccgagacagagagctttcataacgatctgttggaatatccccagtattcccgcccggagaactggcatggaaagaaggtaccggaggttcttttatccggaaatcataagaaaataagcgcctggcgccgggaacagtccgagcgacgcaccgaagaacgccgtccggatctctatgcaaaatatcaggaaaaacagcgggtcatcaaaaaactttccgcgaagaaacgtatttttattcatatgatggagacactgtccagaggactgggggaagttctctatgcagaggggaaaaatgtactgatctatctgccggagattggcaatgctatgctgaatgcggaggatgaggagcatttggagaaaatgctgccactgattccgaaagccgtgtcggagcatagtatcgtgactgtgacagaccggtggaacgaacgtgtcagtgagattttagggtatcatggcagtatgctatgttcccaggcgtgctataccagaggagaaccacttccggtgaagcataaggacatccggcagctgacagtggaagaggtcccttatgtggcggagcattatcatctgggagatgagatttatgtccgggagaggattgcagccggagatgtcttcggtatctatatcgaaggaaaactctgtggttttataggatgtcacaatgacggcagcatgggaatgctgtatgtggaggatgcataccgcagacaaggacttgcagcatccctggaaggttatctgatcaacaaacagagagaacaggggatgataccctatgcccatattgtgaatggaaatgaagcgtccgtacaactgcaggagcggttgggactgaatctgtcggaagctgtgatctggtggctgtacagataaaaaaagcttgctttttatgcaggcttatgataaaatctgaatgttgtgaaaacgagatggtcctctgttaccaataagcgtattaagaacatccattttatgaaggaggctcattatgagtaacattatcaaagagatcgaagcagaacagttaaaagagaccgttgaccagtttgaagttggcgataccgttaaggtatacggcaagatcaaagagggtaaccgtgagagaatccaggtgtttgagggcgttgtactgaagagacagggcggcagcaacagagagactttcactgttagaaagacttctaacggaatcggcgtagagaagacctggcctttacactctcccaatgtagagaagatcgaagttgtaagaaagggtaaagtaagacgcgctaagctgaattacttaagagatcgtgttggtaagaaggcaaaggttaaggaattagtaaaataattgtattgaccggtgagggcagctgttttcggacagctgccttttatatttgaaaaaacaccccggatatggtacactgtgacttgtaaacttggatagtaagatagggcataacattgagaaataaaggactaagtttttacaaaaaaaagaaaaagatcagtcaggcacttttgcgggagatattcagctggatcttcagcattgcgttgtctgtgtttctcgccggagttatagtgatcttcctcggcaggtcggcaagagtggtgggtatgtccatggaaccgacattggagaacggacagcagatctacattgaccgttttacctatatcctgtcgtcccccaaggcaggagatgttgtggcatttctgcccaatggcaatgagaattcccattattatattaagagagtcgtggcaggaccgggggataaagtacggatcgcagacggaacactgtatgtgaacggtcagcagagtatctgggttacagagagggtactggatgccggtattgctgagaatgagctgattcttggaagcggagaatatttctgcatcggagataatccgaataacagtgaagacagcagatcagccaatatcggtccggtggatgaggatgatattgtgggcaaggcatggttccacctaaaatcttctacagaaggtatgggatttatcaaataaaggaatgcaggaataaaggaaagaggaaacgaatgaattatcaatggtatcccggtcatatgaccaaagcacgtcgtatgatgcaggaaaatataaaacttatcgatctggtcattgaactggtagatgccagaattcccatcagcagcagaaatccagacattgatgaactgggaaagggaaagtccaggatcattttattgaacaaatccgacctggcggatcctgtctggaataaaaaatgggtggaatattttgccgcaaagggaatgggagtgttggagatcaattcccgtaccggaatgggaatcaaatccattcagggactggtacaggaagtctgtaaggaaaaaatcgagcgtgacaggaagcgtggaatcgtaaatcgtccggttcgtgcaatggtcgtaggaattcccaatgtaggaaaatccacttttattaattcttttgcaggcaaagcctgtgcaaagaccggtaataagccaggcgtgacaaaaggtaaacagtggatccggctgaacaagggactggaacttttggatactcccggtatcctgtggccgaagtttgaggaccagcaggtgggaatgcggctggcgtttatcggatccatgaatgatgagatcctgatccctgatgagttggcatgtgatcttatcggagccatcaaagagctgtatccgaaagcactgcaggaacgctacgcagcagatcctgtgggtaaacccatagaaatactggaagcggtggcagagagccgcaaatgttattcaaagggagaacagctggacctggtaaaggcatccggacttctgatcgatgatttccgtagcggtaagctgggaagaatgacactggagaggatagattcagacaatgaataaagtaatgaaagaatttttgaacactgccatttacctgctctgcgttctgggagcggtgtggcttgtgatcaccttcgtgggacagcgtaccgaagtggagggagcctctatggagaatacccttcacaatggggataacctgattgtggataagctgagttatcgttttcgtgatccggagcgttttgatattattgtatttccgtttcagtatcaggcaaatacatattatattaaacgtatcatcggattacccggagagacggtacagatcatggaggatggcagcatttacatcaacggcgagaaaatggaggagtcctacggaagagaagtgattcagccggagacgatcgggcgggccgcggaaccgatcgtacttggagaggacgagtattttgtcatgggagataacaggaataattccagtgacagccggacggatatcgtagggaatatcaagcgggaagatattatcggaaaagcatggctgagaatctggccgctttctgatttcggagtgttaaagcatcagtgaatttaacagatgatcggagaaaaagatggaaagtgcagcgaagatcaaagaaatattacaggcagcggagttagagaagctgcctgattttatagcagcatatcaagaggatcccaggaacggcgtacagaaactggttgcatcagcacagaaaaaactggacgcattggaaaaggaaaaacagagaatagagaatctgaaaaaatatgagaaggaatatgcaggatacacttatatctgcggtattgacgaagtgggcagaggaccgcttgcgggacctgtggtagcgggtgctgtcattttacctaaggactgcaatattctctatattaatgattccaagcaattatccgaaaaaaagagagaagaactgtatgatgtaatcacaaaggaagcagtagcctgggcggtagggtacgcatctccggagagaatcgatgagatcaatattttacaagctacttatgaggcaatgagggaagctatcggtaaattgtcaccggcaccggatctgcttttaaatgatgcggttacaattcccggagtgagtatccggcaggtaccgatcattaagggagatgccaaaagtatttccatcggggcagccagtattgtggcaaaggtgaccagagaccggctgatggaacagtatgcggatgtgttcccggagtacgactttgcttccaataaggggtatggcagtgcagcgcatattgccgctttgaagcaatatggccccacaccgattcacagacacagttttatcaaaaacttcggattttagaagaaaatctcaggggagagcagaacatacgatgaaactgacaggatggttttcgcaggacaaaatcacggataacagcaaagtgcagacgacggatacccaaaatgcggaacaggtgagccggcagatccggacactggttccgggacagacgattcgaggggaggtagtctccagagaagggaataatgcgcagatccgtctgcttcaggatgttctgatcgatgccagggtggatgcggatattcgtctggatttaggacagaatattacatttcaggtcaaaaataacggacaggtactgagcttaagtccgctatttacaaatatggcaacggagggaaccgtgctgaaagcattggaaatggcatcgctgccgaccaatgagagtacagtagccatgacgaaacagttgatggatgcaggtttccctattgataaaaatactttgcagcagatctggcatgagagcaatgtgtttccggaagcggcaatcgaagatatcgtgaacctgcaccggctggaacttccggttacggaggaaaatctgacgcagatggcatcttatcgtaatctgacatatcagctgacggagggaatcacagctgtggcggagagcctgaatagtacattgcagggactgacaacaaacggtgagatagaacaggcagctacgatctacggtcatattctggagttgttgattcccggagaagagaatccggaagtacagcgggcaaccgtacaattccccgattcggagcagacagagacggtattgcagccgggggagaccatgtcacagacaaaggaggcaatagcgcatacggatactgctgttacgaatggaacgccggaagcatcaaaaactatgcttcctacacagaaaatgatcgtggacggaacgaaaccggaagatgccgcagaagtggtgttgaagctgttaaaacagggattggcgaccaaggacactgctttactgcgcagtgttttacagaatttcaaaatagcgggattgccgggcgaattgttgcaggatgcatggagtatccgaccggaggatgtggaatcttcggagaaggtggaagaactttatcagaaacttgggaaacagttaaagagtctggcgggtcttctggaagaaaacggacaaagcagttccaacgcttttcaggcggtgacaaatttaagccggaatgtggattttttacagcagatcaaccagacgtatgcctatatccagctccctcttcatttgcggcagggggaacataagacaggagaactgtttgtatatacaaataagaaaaacctcgcagggaaagacggacgggtcagcgcactgcttcatctggatatggaacatttgggcccgttggatgtctatgtggcgttacaggataccaaagtcagcacgaaattctatgttcagaatgatacaattctggattacctggaagccaatatggaggtactgacacagagactgaaacagcggggatatgtttgcaattgtgagactactctgcgaacagaacttcagcagacagcacaggcaatggcccccattcttaaggcgggaggcagtgttcccgtagcacaatatgcatttgacgtaaggacgtagcgcagtgaatggatagggtaagcaaaaccggagagggaacagaatgaatggatgacgagaaaaagaaagtaaaacaggcgatcgccctggaatatgatccttccgatgaggcgccgcgggtggtagccagcggaaaaggaattctggcagataagattatcgaaaaggcccgggagagcagcgtgccgatccatcgggatgacaagctggcagatactttgtccaggctggatatcggagagatgatcccaccggaactctatgaagtggtagcggaaattctggtatttgtagatgcggtagatcatcgtatggtaaaagagagtgtggcagacgggggacgacataagaagtgaataacaggcagacagggaatgcttatgagcagatggcagcagaatatctgcaaaaaaaaggaatgatcatcctggatagaaatttccgcagggggagaaacggagaaattgatattgtaggcagagacggaaaatatcttgtatttgtcgaagtgaaatatcgatccggaaccgccaaaggaaatgcggcagaagctgtgacaatatcaaaacagcgaaaaatatgcagtgtagcggattattaccgttgtctgcataactataacgataatacatgggtgcgctatgatgtggtggcaattcagggagagaagattcagtggatccctaatgcttttccacattattatcgcacaagaggttagagatatgtatcaactgatcagaagtaagcacggcgataaaaacagcatacaacagagacaggcaggagaactggagtatctggtgttcccgaagctggaagagaccggagtggtgaaacatttgtttaccaccagaacaggtggtgtaagtagcggaatttatgcgaccatgaatctcagcttttccagaggggatgatcctttgaatgttatggagaattacagacggatcggggaagtactcgaaacggacccggagcatatggtggcatccagacagacccatactaccaatatacacgcggtaacggagaaggattgcggcaatggaatcggcagagcttcctcttatgaggatattgacggactggtaacggatgttccggggattgcactggtgacttattatgcggattgtgtccctctgtattttgtagatccggtacacagagcaataggtctggcacattccggatggagaggaacggttgcgggaatggctgcctgtatggtactgtatatgcaggagcattttcatagcagaccggaggagctggtgacggcaatcggtccatccatctgtgctgactgttatgagatcggtgaagacgtagcggaacaatttcggggacattttccggaaaaagttctgcaaaagggaaagacacccggaaaatatcaattggatctgtggcaggccaatcggagcattttattaaatgcaggggtacttccggaacatattgctgtaacggatgtatgtacctgccataacccggagtaccttttttcacaccgtgcaagtcacggacaaagagggaatcttgcagcttttttaatgctgaaaaataattgtcaataacattttagatgggagtagcgtgcagacgcagaaatgagggaagtatggcaaacattttagtgtgtgatgatgacaaagagatcgtggatgcgattgaaatctatctgagtcaggatggttacaaaatatataaagcatatgatggagagcaggcaatacagattttggataaggaagaaattcatctgctgatcatggatattatgatgccgaagctggatggcatacgtgcaacactgaagatccgtgagtacagcagtattcccattatcattctgtcggcgaaatccgaagatacggataagattctgggcctgaacatcggggcggatgattatatctgcaagccgtttaatccgttagaactcgtggccagggtgaaatcgaacctgcgcagatatacttccctgggaagtctcaccggagagaataaggcaatctatcaggtgggaggactggtgttgaatgacgacaccaaacaggtaacggtggatgacgaaccggtcaagatgacacccatcgagtacaatattttattgcttctgatgaagaatcaggggcgcgtattttccattaatcagatctatgagagcatatggaacgaggatgccataggggcagacaataccgttgcggtgcatatccggcacattcgcgagaaaatagaaatcaaccccaaggaaccaagatacttaaaagtagtatggggagtcggttacaagattgataaggagcaggcatgagaaaaccaacgttaaagcggctggcactgggattggtacagcagacggccgcattgttgctgatggttgccattgctgcgatcctgtttaattcttacctggcagtggatacggcagacggagccaaagtatatgaattatcaccattggatgcggagactgaatttgaggactctgtgattttccatgatctgtttcaaagctcagtatcggacattatacagcttatggtgattaagggacagatggaaacaaatggttcgtttgatccctacaaatatattgacattacggaatttgtctccggtaaaaccggcagtgcagactgcccggtgactgcggtgtacgaattggaggatctgatcaaatggggaaaatacggcgtggaatatacggatcgtattatgagcatgtcggattttgtgaattactttggatcggtgaatcagaattctaatttcagactggacgcagacgggcagctggtattctctgtggaaggcacacagacagaagaacagcagcaggcggtaacacaggcaatcgaagcaattccggagagccagcggacagaacggctggaagatctggcatttacgtatatcgtcaaagagagtgtcacggatatcagagtgtccagggaagatgacggaacattgacggtctattttcctatgctcgtatgcagatatgccacggtggatggggaaaaacaactgaccgcctgtgccaataactgggtggagtacactgctttacaaaataatctggcactggcaatccatacattgtccgcaaattacgaacagtatcagaactgtaatgatctgtatcaggagaatgcgagcaacctgaagtatgcggtgcgcctgatgtcaaaggatggcattacgaggacttatacaaatgtctcggagattgcggacagttccgataacgagatgacggattatttctccgaatacagaaggtatcttatttactatccggacagcctggaatttaccggcaataccggaatgacggagagacagatctaccagtatctcaaggattatgattatgcgcatccggatatgacacatatatggatcgcagtggatacgaactatccggtacagggagatgcattttacaatgccaatgtagtgttccagagaattgttccgaatatctggtatctgatcggcgggggtattctgctggtggtgttatggctgttgatcggtatttatctgacggtgacagcaggagtggcttttgacgaggaagacgaaccggtattgtatctgaacggaatagatcatgtctggatcgaatgcatggcgctggctttgctggcatgtgtttatgccggaaaagtgggatacggttatctgatggatacggccaataaggtatatctgagtcattcggaaatacagggccgggaaattacccgtctggcggcctatggtgtgttcgcagtgtacgggttctcggttagtgccggaatcaacgtattctggtatagtctgatccgcagaatcaaatctcataatatgtggagtgacagttttctgcactggctggtcagtagctttggcaaggcggtacattttgtgtcatcccacaggaactctgcggtcagttccctgattccgtataatctgtttctgttggcaaatcttgctggaatattagcggcgtatctgcttcgcggcaagggagtatggtggcttcttcctacatttgcggccgttattctggatggcattgtgggagtgctcaaattcaagcagaaggcggaacagattgacattgtggagggaatccgcaagatccgtgacggagaagtggattacaaactggatgtggaggcgcttcacggagataaccgcgagatggcggatgccgtaaataacatcggcgaaggtatccgcaaggcggtaagtaccagcatgaaggatgaacagatgaaatcggatctgatcaccaatgtctcccatgacatcaagacacctctgacttccattatcaactatgtggatctgttgaagagattaaaaattacagaagaaccggccaagagttatattgccgtgcttgacagtaagtctcagagactgaagcagcttacagatgatctggtggaggcttctaaaatatcttccggcaatatcgtactgaacctggaaccgttgaatcttacagaattgctgaatcaggcagtaggagaattctcggatcggctggaagagaaaaagctgcagatcatatttgacggaagtgatgtagtggggatgatatatgctgacagccgcagaatgtggagaattatagaaaatttattccaaaatatctgcaaatacgcattggaaggaacaagagtttatctggagatgaaggttgaaggtgggagagtaaccgcttcccttaaaaatatttccgacagaccaatgaatctgaagggagaagagctttcggaacgttttatccgtggagatgcctccagaacaacggaaggaagcggactgggactgtacattgcaaaaaatcttacccaggcccagcatggtgaatttcagattcagctggacggagatctgtttaaaatcattctggatttcccggagtatgagagaccgtcgcaggagggaggagacagcggttccggctgaaactatagaagaagcataataaaaacgcaggagccattacaggcttctgcgtttcagactgtagacaaaacgc

SEQ ID NO: 11402 - DNA, 3693 bp, Unknown
  gut microbiota DNA sequence
gagtacgatatggacaatgacgggaagaaagagcctgtgaaatatcgtgtgctctccaaatgcactacagattttagcgggaatgacagtacggtaaagacaatgctgttagactgtgataacgtctttctgccagacggtgacaagggaatgatattccatgaattgaattatgccgtggatgacagcaaatggaacaatagtattttgcgggaatatttgaacaatgattttctgacatcatctttttcattacaggagcaggctgctattgcaaacagcgtaaaagaaaatgtagcagaaagtgatggggatgcctgcgactttcaacctcagagatggacagcactttcgggagataaaatatttttgctggatgcaagagaagtccgaaacgaaagttatggatatagtaatgagcagtggggggcagacaaccggggaaaaatttgcatacaaaaaccaaccatgtgggaatggtggctgcgttccgaagaagaatatcctacgttaccggaaaatgaaggtatgggtgcaggtgttatagcaagtaaggcagtaggttgtctctttgttaatgaatactgtggagtaagtcctgtactaaatgtcagactgtcggatattcttatggtttctattgtggaaggaactgccgggcagacaggggctgcatataaactgacattgatcgatccggctatgaaaatccggccagagcaaagtacaaatgcacagtcagaagagcaggtgacagtaccctatagacttacaggggcggacattgataatgcaacatgggtatcggttctgttcacaaagaaagacatccttacagcggacggttattatgatgccggggaagcaatttatattccgaatgtgggtcaggacggtaaagcagtattttcgattccagaggaatacaggaataaggaatgcggaaccgattatcatgtttatctgattgcagagaatgtgaacggagagaaggaaacagactatgcaagcaaaccggtggaaatcgtgtacagtaaggatcacatggtgacggtaccacagacaggtgatgctgggggattactggaaaaaatgtatgctgtatgctttatccttttctgcatttggatgaggcgaggtaaaatatccctgcataggtgatgaatgaaaggaaaactcgggaaataatggcagcaccggatattatctctacgatgccagaggaagcgtctccggcgtcaccaatgaagagggacaggtctaccagtcctaccgttacagtgtcaccggagagatcaccttcggtgctccgcagtatgagaacgaatacacctacaacggagaatcctacaatccgaatatcgagagccagtatctgagggcaaggtactactgcgtggtaacggcgaccttcctcaccgaagacagctacctcggcaaccagacagaaccgctgacacttaacaggtataattactgcgtgagcagctatctgaattatacggatcccagcggaaatgatcactatactacttggcaaggaattattgcacataaagtattacaagaatattttaagtccgagtatgactaccagattggatatcatccatatacagaatatagggtgactggttatgcaaatagtaaaacgggaatagggtatgcagatattgtattaagaaggccagatggtgtatacgaagtatatgagataaaaccctattcagagaaaaagttgggaggtggaattgaacagaggcagggatatattaaagcaatgaaggatgcttatttacctgtagatgatcaaggacatacatttaatccgaataaaatagtattgccaatactagatacgcaatataactatgcaacctattatacagatccaagtatgccaggaatgatatactatagcctgagtcagacgaaaaggcctaaatatgtaacggctgtaattaagcaggcagatgaaaagaaagaagtgtggtggtgcgagccaggagatacattaaccaaggtgctaaatgtacttacagatgcgatgatgttagaatgggttggagaaacgctcattgatagagttacgcaaagtgtacttccattttgggtgatgccagaggatatattagataatatgcttgtatatccaaagggctatgagggcattccaaattccatagtatagggcatatatcattaaagactgaaaaaattttagaaactattatggagaggatataggggatataatgcaatgaataaaaggaaaatagtaaaagagattataaatccatatatggacaaaaatggtttcacattagaaaagtatgagcggggagattggtcttatcgaaagaaaatcgatgaggctttattagagataaatattgctgatgcaaatggaagacttcatatgcacataggagtctatgggcgtgcatacgatgtacaggcagagcagtttattgatacactgccatctgcgaggacaagcatgatggactgggattatggctggataggaaaaacggaagaagaaaaagagaaactgtttcgggacatactgtatgattatagagatattttagaattgaacggagacaggatctttgaaaaaatagtgacggattataagaacaggcttccgaacagaaaacattatttgctaatgttggagcattacgatgaactggagcaaaaatacaggaaagaattatgcccggaagaatgtgatattctagagctatgggaaaaagttgctgcatgggtggagaatgtacgcaaggatcctttagaggaaatagaggagagattagtaggatatgtgacagtgttggaaacggaaatgattaaaaggtatggtggcaaaagagaaaatgattcggatcgggaagcttgcgttatctatgccgggaaaaatcatcaattattcaattttttatctaactttttctggttgtggcaacatgaagatatgaacaatagggaaaagagagagatggaaaactggtacaatgaacagaaatagataaaaattatactaattgcttaaaaattagatatcaagagaatattatttcggtgttccgaatgctgcattaccagaggtgtcctttggcagtgacaaagcagagaaaagctgctatcaaagaaagaattgtagagcaaaatatagaaagaatcggcggacaataaaatgtcagctgattctttttattcggaaaatgatgcaactatgatgtaatattgtgttattttgataatgaaactcaatacaataaccgaaaatatatacgtgggataaggtaggaaaaaattcctcaggcaataaaaatggtgaatacacaatagttggagtagtgaaatgaaatattgaggggaaagcagtatatgcgaaaactattattaatcattcaagaattaattattgtgaattgcatattgggaatgattgcttttttgagtattactgtacaggcaaaagggcgtgtgttggacgaacctatggcgaaggaaatcacagggatagaaaattatggaattgaaaatccatcaaaacctataatcgatgaagcatggcaggggaattatgtgtattttggggagtacgatatggacaatgacgggaagaaagagcctgtgaaatatcgtgtgctctccaaatgcactacagattttagcgggaat

SEQ ID NO: 11403 - DNA, 467 bp, Unknown
  gut microbiota DNA sequence
taatgattgcttttttgagtattactgtacaggcaaaagggcgtgtgttggacgaacctatggcgaaggaaatcacggggataggaaattatggaattgaaaatccatcaaaacctataatcgatgaagcatggcaggggaattatgtgtattttggagagtacgatatggacaatgacgggaagaaagagcctgtgaaatatcgtgtgctctccaaatgcactacagattttagcgggaatgacagtacggtaaagacaatgctactggactgcgataacgtctttctgccagacggtgacaagggaatgatattccatgaactgaattatgccgtggatgacagcaaatggaataatagtattttgcgggaatatttgaataatgattttctgacatcatctttttcattacaggagcaggctgctattgcaaacagcgtaaaagaaaatgtagcagaaagtgat

SEQ ID NO: 11404 - DNA, 1352 bp, Unknown
  gut microbiota DNA sequence
gtatgatgaagaaaaaagaagcctccgatggagccctgacacctttccaggcggtatgtactgctctcgcagctaccgttggtaccggtaatgtggcaggtgtggcaggtgccatcgccattggcggtcccggtgcggtattctggatgtggatatctgcgctgctcggcatgtgcaccaagttcgccgaggtaacgcttgctgtacacttccgcgagaccaatgcacagggcgacctggtaggcggtcccatgtattatattaagaacggactggataaaaaatggcacttcctggcgtatttattcgccgctttcggtgtgctggctgtgttcggtaccggtaatgccacacaggtcaatacgatcactactgccattgattctgctctgagcagctttaacgtactgcctgcagatgctgtgaagcttgtcaacctgatcatcggcgtggctctggcgatcatcattgccctgatcctgatcggcggcatcaagcgtatcggcaatgtcacctccaaactcgttcctttcatggcgatcatgtatatcgtgttggcactgggtgtgatctttttccatattaagtctgtacctgctgtatttgcttctattatagaaggtgctttcaatcccgcctctgtcaccggcggtgtggtcggaagcttcttcatgagtatgaaaaagggcgtatcccgcggtatcttctccaacgaagccggtcttggtaccggatccatcgcccacgcctgtgccgatacgaagaagccggtaaaacagggcttcttcggcatctttgaggtatttgtggacacgatcatcatctgcaccatgacagcgctggtcatcctgtgcagcggcgtacccgtaaattacggtgaagctgccggtgcggaactgaccatcagtggattcaccgctgtctacggcaactgggtatcgattttcaccgccgtggccatgtgctgtttcgctttctccactatcattggctggggactgtacggtacgagatgtatcgaattcctctttggttcccgttccaacatgcctttcatggtgctgtattcccttacagctatcgtaggcgctaccatgaacctcggactgatgtggagcatcgccgagactttcaatggactcatggtcattcccaacctgatcgccgtgttcctgctgtccggcgttgtggtgaagatgacaaaggaatattttgcaaaagaaaacggatagtatctgcatgggatctgcgttatgatcattggataaataatgtagttctttcgtttaataatgacgataaattgagagtttacgcgagcaatgagccgcgcataggcaaaataagaaccg

SEQ ID NO: 11405 - DNA, 498 bp, Unknown
  gut microbiota DNA sequence
gccttttgctgccaatcttatgaatagcgtggctcattgcggatgccatctgccacccggggagatctgtttgtattaaaaacaccattttctgctaaaaaaatacaaaaacatgagattttgccatgtaaaaagctgttattttcgctgagcgtgcaaaatgaagaaattccgtacaaaaattcctgatttagaagtttttttgtacggattttgctattttgatgcgattttcaccaaagcaatagaaggagggctacggggctgtttcgctaactccctgcttagtagggcaagcatattactgcccggaaagtgcttttagaaatccaagcagtatttttattgaagaattcatgaaaacgttctgacaattaccgcttcggcataggatgcttccattccggcagtaagtatcagtcactataaaagaaaatcacttcaaacttactgcttatacagcacaaaatagatttcaggcggtaaagatcggaacag

SEQ ID NO: 11406 - DNA, 899 bp, Unknown
  gut microbiota DNA sequence
gtcttccgtatgcagcaagtatgcacagtcgggggtggattcgtaccaacttttgtagaagggaagaaccttgtcggcaatcggcacttttcggatgccgttttctgttttactgctgattacatcaaagtactgttcatcgaggtgaacatgttcctttttcaaatcaagcaattctgaaattctgactccgttgtagagaagcatcagaacaatctgataatacttatcatctttctgttcccagattctctcaatttcatccttttcaaatttgtttctgtcatacttattcgggttgcggtctttgtactgtgctacatccacaaaactggaataatctttgttgcaaatatcgtttttcaaggcgtaatcgtaaagctgattgaaaagcactttgattttcctgagagtaggataattcttaccacaggtatcaatgacattttgcaaatccactaatcgaatatccttaaaaactttgttgtagagggtaccgcaggctttataggatgcggtatatcctttgacattggattcggatacagtaggatacttacgcttggaccattcttcatatacatcagagaaggtcatcttggcagcttttgtatcgaatggattattgttgtactctgcaagcatctgtaagccttcagctcttgtagcagcgtatccaactgtaatcatatcctgaacttgtctgtccttttccttatcgtagtgccagcctgttgtctttctgacctgataaggctttcttctttttccggaaagttttacaacgcttccgtatccgttgggtaacttcataagcaccattcctttcgctttaaattcagcaagctgataagcgaacagataaatacttaatcctcatggactacttttgtaacact

SEQ ID NO: 11407 - DNA, 1170 bp, Unknown
  gut microbiota DNA sequence
ctttaatatgtgctcttcatatgtgcttcagtttcttgtgcagcacccggatccccttcggcgctatggcgaacagtgtatgataacacttattctttttcgtaaggtaagggtttctcatggcgcgccaccatcccttccgcaggctcttcacgacactgcggtagaacgcattgtccccggtcatctgtgctatgggaatatgcagcatgtagtccagtctctggaagacaccgaaacggaaggcgatctccgtcagctccgggtatctctcctccaccagccgcagtaccatatctgcgttctcgatgttgtccgcgaacactcgggagaagcggtttttatctctggtgttgctgtccgggcggtaaaatacgtgataggtctgacccggaatgcacgcgatcccgggaacgatgttctcctcatccgtcagcagcttcaccagcaggtggaaatcctcgttcagcgctcccaccggaaatttttcctttgtgaacagatccttttgcaacagcttggtacagaaggagcagtctccccggtgcatcagcagttcttttaagaagttatctgatgagatcacctgttcttcggataccggctcacagatgttcggtaagatgttgccgtccggatcgatctcatccctgcctgcctgtgcaacgggcatctgtgtagtcgcgatcgcccggtacaggcgctcgtacatatcggcatccacatagtcatcgctgtccacgaatcccacgtatgctccggcagcctgttccagtccgaagttcctcgcggaagagggacctccgttctccttgtgaaaaacgcggatacgcgggtcattttccgccagccggtcgcacagcgccggggtgtcatcggtggagccgtcgtcgatcagcaggatctccaactccggataggtctgcttctgcaggctctccacgcagcggggcagataaggtatgatattgtacaccggcacgatcacactgatcagcggctggttggtctcattactgttcacgttctgtcctcttcatttctttccgttaaatatcgatacatccgtcgctccgggatcaccggggcaggggagcagggaccatctgtccacagtgtggggacgggcggtgccggaaggcattggtcgtctgcgccggctaggaatcc

SEQ ID NO: 11408 - DNA, 22073 bp, Unknown
  gut microbiota DNA sequence
gtccggacggtctgctgcgccgcttctcccagtctgcggcactctgccggatcctgcagcagctctgcaacgtattcctgcagctgctgttcacagccgtcgtgatagaggatcccgttttccctctgtcggatcatccagggagccgctccgatcatatgatccgccacgacagcgcagccgctgttcatggcttcgttgaccacggctccccagccttcctttcggtcactggtgacgaggtagatctccgattcctccatggctgctcggacctcctccgggctccggaagcctgcgaaggtgatcttatccgtcacgccaagctcttctgccaggctgtgtacttcttcctccacttctcctccgccgatcatcgtaatgtgaaaaggaatctcttccagatgttctttcagataagcggctgtcttcactaccagctccggatgtttccagtcgatcatgcgggccgcccacaggatgcttccttttttcttgcgtgaaaaaggttcccccggcgcatactctctggtctcggggaaatacccgaaccgtagcattttctccggataggcatgaatgatccccaggtcgcagggcacataggctccggcacacaggaagtacaccggtgccttgcggtatctggtgtggtctttatacttttgcagcagtcctctgggagagatggctttccattgtccttctttatacagccgctcgttgtagcggaagataggttttcccgccgccagtcgttcccggatgtagctctcgtcatcgcatccaccgaagatcaccacgtcagctgtcaggagcagatgccgccattccggtccgcccgcagtctcttcgtctggattcctgcccatgaatgcttccgggccgctcgtagtcgtactatcctgttgagtgtagcgcacgtacggtctctcctcggcctgccaccccatcttcacccgttcttcttccatgggctgggtctgcagaaagcagaagcttccttccaggagttcatacaaggcatcgcagaaggacagctgatggtgattaaaataattagaaacgaataccacctgcattctcagccctgcctttccgctatctttgcatagatttcctgcaattttgcaaaatttttctctttatcgtgggtttttcttgcatgttctcttgcatttttagagtattccaacattttctccggagaactccacatttcgataatggatttttccatggattttacaatattttccaattctgttgtttttaattcttttgaattgcatgtgttatttttgctttcagccgcatctgccgtatttctgctgatttcagccgtttctgtcagccggtgtccttcacaccacaggccgtcccttccgccgtcgaacagactggggatcccgccaacctccgtgctgacacagggcactcccaacagcatggcctctcccagggagttcggcgaattttccagggaagaacagcacaggaacaggtgacttcggaggaatcgttcccgcatctgttgttctgtcagtttccctgtaaaatgcacgcagtcttccagctgcccctcccggatcagatcccggagatactgtccgtaagcggagatcttcagcttctgcttcagcgtgtggtatgccgtcagatcatttcccgccacatacacctgcacatcggggaatttcctgcggatcccgggcaatgctttcaggagataatgcaagcccttcagcggataatctccctgactaacgaagatgctgtggggttcacagtgctccggggcccagctgccttcatagaaggaagcgcgcagggtctcattcataggataatactgtgctccgggattccacccggtggtcacctcccggtcccatgccgtcctaccggtgatatttcccgccagaccgatggcttctctctccatcacacctctgcggacgaatttctcctgctggctgcgcaggctgtcccgttttaccagatcccggaaggtcactttgcgcgtcacgcgctccggaagatcggcgaaataggcttccgcacagaggctgcagatgccctggatccccaaaaggatcctctccggatgcggatagacacggcagaccgccagcgtatggggatattccgtaccaaagcagtggatcacatccgggtcataatcttccgtgatcttacgcagctcttcttccagctccggctggtaacggtccggatgtacggtatcctcatggaagccgtagcatctgacgagatatccaccgcccccctccggagcagaagcagcttccgtagcagaagtggcttccacgacacaggcagggtgttccccctgcacccggactacaaaactctgtgggatctcttcccccgcgggaaccgggaacgccactgccagcgtcatgccggtgtcttcccggtccacgatctgcgacagcagtccggacagccagccttccttattggaagcttctctatgcaatgcctcggcgatcaccgggagcatgatattgcagatccacagtactctcataaatcaaatcctcttttaattaaatatccaattcaggtaaggtagcaatctgatctccacatcgtacatgccacgtaacagcattgcgaaatacaacagatatgccgcgacgactccgacaatgcacaggttgcggaaccatccctttttcgcattccatagcacgcccgggatcaggaagatctgggactggatcaggtaataggccacccgggacacctccgggatgaaggagccacaggtatagagcaccagtcccgccaggttcagatagaaatagtaacggttcctgcgatcatcccggatactgtccttccagtagatcaggcacaggatcagcaccgccaggcattttccgatattcacgtaggacaactggccgttgtcgaacatggaatccttataatagggataaaacttaaaaataagattccgataaaagccctgtccgaagatcagggataagatcagcaggagcccgactgcgtagtgccattttttcagtcgtacccgcgacaacagatctgctgcgatataggccggaatgatcagcagcaccgatttatggatcgtacatcccagcagcacccagaggatgaacttgccatactcgccccgcagtacatatttctgcgcatacatggccagcgccagtgcaaaataataccgcacggagttcatgctgttaaaatagaagccctgggtcagcagtaaaaacagggacactacgtaccagtccgcctgatcatgcagcgctttcaggaagaaaaacaccgtgaccagcgaaaaaaatccgaagatcggcagataggagccctcaccgaagatccagtgaaacagcttcaccagcccgacaaagcctttttcataggagacatggcgtccctgatcgatcagctggaacttcagccagtagacccagtagtcaccacccaccgcaatacggcaggccgagactcccgccaggaggcagaatacggcggtctccgccaccagatttctcgcctgctgacgatcgtaccccaccggtgctccaggcatccgcctgcccgacaggtatcctgccgtgtaggcgctgttgcgcacgcagaagccgaatcccaccgttacgagtgttaatacaatatataccagtgcacttttttccatgtgggacccccttcctgcctacgatgtctgtcgcaatttccggcgtattctctcgcgatgtccgccgcggttcgcgcgtattcacctgcgatgtctgccgcggttcaggctcagctgcgctttcctgcttcgcggatgccgtcccgcatccaatgcttcgcctgttttatcgttacctcactgcacaatgtccccttatgggcatacaaaaaccgcagtgccagcggtcctgccagccttccgtacagataatgatacagtacaccgcggtcatggaagaatttctcattgtagccatggaaccaggtggagtctcccgcttcctctctgccgatggtcacgggcgcggtatagaccttatagccttttcggatgaattctgtcaggaacaggctgtcctcgccgttactgtatttcgctccgccgccgaacagcagggagaaggtgctcccggatgccaacaggctgtccctgcgaactgcaaagctcaccgctccgtaccggccgcaattataccagtgcactcgtttccgctccgtgatgtggtaggtgcgccgggattcctcaacttcgatattgaaaatgatcatgtctgcctgcggatttttctcaaattctgccaggatcgccgtttcatatccgtcctcatatacaatatctgcatccgaaaaaaggcagatgtcccctctcgcccgaaggatggcttcattccggcttctgccgatgccgcgctccgggaagcgatagaaacggatggttcgtgcctccccgtttccctgggatatctgcatttcctcctgcccgagtctgtcgcattggttgatgatcaccgcatcggactgcaggttcatatgttgtacggtttcacgaagagaagcgttcattaccgatgccagtacttctaccttcatgcctgctctccttctgcctgggtagtctttgtatgttccatttctgtatttctcgtgttcatatcgttatctgctgtatcggaaccaatcatagggagaaaataatagctccggatcagcgtctcatccgcattccataaaaaagctccgtccaccttacagtcctgtgcggtcagatactccagcacagcctccagccgcttacccaccgtcgctccggccggcactgccagcaggaccacatccgccgcccgcagagtctctgcgctctcagggcatagcagcggactgggaactgcgatccattctctgtcgatgggctgcactctgccgctggtctgctctctaccggcgggctgcagttcgcgcagtctgtccacagcctcctgtggatctgcctccggcagggcaccgcagacggcgatcttatgggcatccgctttctccagcagatatttcacattttccgcaaatcccgtactttccactgtacccagactgtgtaatccataccgtctgcggagagtggtcgggagccagatgctgtcccgggacagctcccataacaggaagatcaccactacgaaaaacaaggacagcaccgccgccaggatcacggcccgtaccggacgcacatccggcaccactgcctccgcgaggtctccatgatccagcactttgatccgcgtgatctccggcatactctctgcgaactccccgcacatggtctcttccgcggcatgggccagcgcaatgctctccccggggtcctgtgtcgtagccttcgtcaccggaatactgaaatcggaaggcagggcagccgacaaagcttcgatccagcggtctctgccctgttccagcactgccgcagcaccgctctctccgcgctctgccgcttcctgcagatgagtctccacaccgtccaggaattctcccgtgtggagcaggctgttccaggtggcttcgttgatatagtaagcaccggccgcattagggttctcgacatattctaccttataagtggaagaagccgcatacccgggatcgggctgcagcaacacatttttgacataataaccgccgccgaacagtactgaacccagtatcgtcagcgccagtattttccatagattacggcccagccgcaagagcagcagccgtagatcgaagggttccttaccatagcttgcttccatgaggcttcctcccatattgtcatattgtcatattcccatacgttcagctcagttatcgtctttttccgcacggccgtcgtactctgccttgaaggccgtcacctgttcgctctcgacaccctcggtgctgtccggccagaacagtactttcagtgtcagaagcatcagcttcagatcgagccatacagaataattttcgatatatgttaaatccagttttaacttatcatacggagaagtgttgtatttgccgtatacctgggcgaatccagccagtcccgccttcaccttcatacggaaggcgaactccggcatgacttcggtatactgggcaatgatctccgggcgttccggtctgggaccgatgaaggacatatctccccgcaggatgttgatcagctggggcaactcgtccagacggcatttgcggatcacttttccgatcggagtgatgcggtcgtcatttttctgtgccaggcgggctacgccgtccttctccgcatcggtgcgcatgctgcggaacttcatgatatagaactctctctggccgatggtacagcgcacctgtttgtacaataccgggccgccgtcatacagcttgatggccagtgccgtcaggagcatcagcggagaggtgatcaccatcaggagcagggagcagatcacatcgatggaacgtttgatgaaccgctgctccatgctgagggaatactctctggtcagcaggatcggcgtatcaaatacatgtaattcctcggatcctactaaaataacatctgatattttaggcattacatacacacggatcgactgtgcataacagaatttcagtatggtgttgcggtccttctcattaatatcccagatcacgacagcggtgatctcaccgttctgataatcactcagaatctccctgcagagctctgccgcgccctttctaatatgttcacatttcgtgatcttgtatttatccttacggctttcgaactttttacagatatccgcgatgggacgatccccatggatcagcaggagttctctgggcgggaacgccgtacgatagattttattcgcaatattggcatagatgatcactgccacgatctgcagcactaccatgagcaggaacatatccggcgggaacacactacgcgccatcatacacagctcggcatagatcagtacatccgccatcagtgttgcaaacacctgggaaaatatgatctccgtatttttcatataacccagacgcattccaccgtaagtcacggagaaaaagatcaggatcacgctgtagatgccgttctccagtaggaagccgcggtaccagatcttctgcagcgggtctaccagttggaactggaagtggaactgccacatgtaggcaaacagagcaatttccaggaacaggcagatcgccgacagtcctatattgatcaagcgcttgaaggattccctcctgcgtaatctgttcacataataattaccgtttgtattcaacacaaactcctcctatattctgcgcttcaccgcacgtactgcccagaagcagaaatgccaggcgctgctcggcacagacattccctctaccttacgatacagattccagatcctgcgcagagcttctatcttgttggaagacagggatttccccgctctccgatattttaccaaattttcatccaaaccacaagctacagtacccccgcgcagtattctccaccataacgcggtatcctcactcttgatctgcggcatctgcagctcttcttttgacagctgttccatgtcgaacattactgtgctggtgaagatcgtggtatttttcaaggcttccttataatttatggtcgtcggtacatggactattttccccgttcctatgccgttctcgtcggcgaattcatatcctgtgaacacaaaagcagccttctgctccttcataaaagcaagctcccgctccagcttctccggtacccacagatcgtccgcatccagataggccaggtagcgtccctgcgcctcgttcactcccaggttccgcgccctggcagctcccagattcgtgggatgggtcagcagtcggatccgccggtctccggtccgccggatatattcttcgatgagctgtctgctgcggtccggtccgcaatcttctattaacagcaactcccagttcgtataggtctggtcccgcacacagtcaagtgtctcttcgatatagttttccgcccggtataccggtaccactatactgatcaaatcctcttccatattgtaatccttctgtttatccgaattctgagccggttgttatccggcttctatccgattcctatctgatttctatctgattcctatccgattcctatctgatttctatccgatttctatcaggtaatatcctgctgtggtcttcagctctgtgtctgtccccagggtctcctgcaatttttccacagtatcctccggcagatcccccggcagtaaaatgtagtctactcctgcggccgccgcactgtcaaggcaggttctgaaatcaatggtccgctcaccggtattttcctccgtgcggacatactccggctcaccggtctcctccagatggttcatccacagatacagatcctcctgccatgtctcgtaggtgtcgtacgaatagcttcccagcgcggcatcccagatgcttctcccatacacgggatggatatcggcactgtatgccctggccgccgccaggatctccttcggagcccataggctatattccgtctctccgctctcttccaggtgatattccgacagctgcccaagcacctcccgctcccggggtgtctccacctgtgtcagctgtgtgccggtccggtccgataccggattcccgctcaggatcacaattcccgccaggagcaacgtggccgccacattccggatacttttttctctccacagggtatacaggaactctgtacatgcccaggcaatcagtgctgtctggggcactgctgcccagatccatacataggaataaaacgcggtctggtatttcatcaggatcaccgctgtcaccggacagatgcaggtcagcgtgatcagcaccgcatataaatagaacagcggctgcttcccaccgttccttgctgctttgcttttccacaggcaataccccagatagaggatagctgccagcagcaatgctgcatatttcccatgctgcgtataatcgagccatccgttcgtggcggacttcagaagtgtcatcattctgcgtcctcctctcccggtgctgtcttcacagcctgtgttttcttatgatcgctgcggctgcacattgtccacagccaccgtaatgccacccatgccaccgtcacgagcaggcacactcccgcgccgtacagtgtccagaccatacaggcttccgccaggatacagagcaccgcaccgagatattttctctcgaacaggcatgaaaacagatagggaagcagcaccgccgcacggatcgtcactccccggaaacctccgtagaaaatatcaaagccgtccacgccgggcatgtaagtccctgcacagaacagtattcccactatgatcaggaagatattgcatttttctctataatgatcaaaaagcacagcacccagcctgccgtaagccaggtatcccatacataaagtcaggcaggggatcagccggtatactaccgtttcaggggccataccgctccaacggctgatggttccgtacagagtaggcaggcacagcagcttcagacggaaagacatgccctgtgtatacggttcccccgtgaggggatccaccgtatagatgctgttctccttcaggaaggtattgacggtctccagcgtcatatcgccgtccgtccacacacgtcctcccgtgaggatccatagcacctgcaacagaatgaaaaatacaagtactactgtcaaaatctgttgtcttccgctcgttttgctgttctccggtgccggttttccgacgatgctgtttttatgtgcgatcaggccggacaagatcaatacaagcaccgttacggcgatctccgccagcagcagctccgttacagccaaaaaagaccaccccaacaggcagcccgccaaatgggcgacttccgtcagcccgatgatgatcagacagcctctgatcagtaaatccgatatccgaaaagtcatgttttctcccggtgcccgctccgtggatccgggcaggctctctattgctctgaatcgttatcatcttaccatatttatcgggacttgacaaatattacgtggcacgcatgaaaaagcataaaaaagccgcataccgtaaatctcttccggcatgcggccctgtcagtgtgtaagaaagaatactgcatcgaaacgttaacttttctaatttaaaaagaataaattcaatatgttacatagccttataatccagtcggatgttgtccgcgatacgtgcgatatactcgctgttcgtcggtctgttccttccgctggctgctgaatatccgaatattttctcaaatgtctccacatttccccgagtccaggatacctcaatggcattccggatggcgcgttccactttctggtctgtggtcttgaaatgttttgcgatcgtaggatacagaagtttagtaacgctgcttaccacttccatatcttttcctgacaaaataattgcatcacgtaagtagtgataacccttcagatgcgccggcacccctatctccagcatgattttggttacatatctctccagttcagaatcttttactgctacaatatccaaaacaagtccccctttatacttgtcgagtattgctctcctaccgtgactgacagagaaatagtatcatagctgtcgttttttgaaaagacttttttccgttaaaatatagttaagagagcaaaaatgttacatttaccccctgttttgtaacagtaaaatgcctagatttcttcctttaccaggtagatcggtctgcgttttacttccatataggctttcgccagatactgtccgagaataccggtacagaagaactggatgccgctggtcatcaggataatgcacaccagggaaggccagccggagaccggatcaccgaagatcagcttcctcacaatgataaatacgatcatcagaaaagcgatcacgcagaacaggatcccgacaaaagaagcgatcagcagcggtgctgtggaaaaagcagtgatcccgtctatggaatataccagcagtttccagaaattccacttggtctctcccttggcacgttccacgttttcatattccagccatttggtacggaaaccgacccagccgaagattcccttggtaaaacggttatactcccgcatggaaaggatcgcatccaccatctgtctggtcatcaggcggtaatctctggcaccgtccatcatctcggtatgggatatcttcttcatcagatgataaaatcttctggcgaaaaagctgcggatcggcggctccccttttctcgtaacgcggcgggtagccacggaatcatatccctgccagatatattcgaacatttccggcaacagggaaggcggatcctgcagatccacatccatcatgaccacatagtctccccgagacttttccagtccggcgaacatggcggcttcttttccgaaattcctggagaaggaaataatatgcacacgcggatcctgctcgatcagctttttcacttcccgcacagtaccgtctttggaaccgtcatcgatatacagcagctccagttctatttctttttccttgaaaaaaggatcattcttcgtcagttcccggtaaaacagggctacactttcctcttcattataacagggcactattacactcaacaggctcattactggtctccttaggctttggttataagattccacatgacattattatacgtttcttcccacatcatttcaagccattcttcccacatcatttcaagccaggcactgtactttttccttcttttggattatactgaatttatatatgcctgtccttccaaatggggcgtggcagaaacgaggttatttatgactttttttgaagaatttttcagtaatcatatttttctgactgcagcctgcggctggttcgtggcacagatcctgaagactctgatccatctgatcatttccaaaaaattcgtggcggagcgtctggtgggcagcggtggaatgcccagttcgcattccgctaccgtatgtgcactggtcactgcgacatgctacgaatacggcgccggcagtttcgagttcgccatctctctgatcctggcgatcatcgtgatgtacgatgccatgggagtacgccgcgagaccggtatccaggcgcaggtgctgaatgatatgatgaagatcttcgaggatatgggccgcagcgagatttcccctcatgacaagctgaaggagttcgtaggacatacgcccctgcaggtactcatgggtgcgctgttaggtattttctgcggcgtgatcatttatacttttgtgatctgatcagggataaggtttgatggattttttgatcggtaacgcttttgataaataccgtattatggtcgaggtgacttttacatgatttttcataataataaaaaacggacctggcacagagccgccgcgcttctgctgtccgcttctctgttgctgaccgcctgcggcgcacagaacaataacgataatattttcagtccgatcctgccggacaacagtcctgcttcttcgacggatcccgatgacaagcttccggatcctgtgacgatcgtggtggaagatgattcggtggcacccgctgagggaatggtgcgcagtcgtctcaccaatgaatgggtggatgccgatgttgctgccacgcgccctattgctgtcatgatccccaatgaggctgccgcgatccctcaatatagtctgtccgaggcttccattctctatgaagcaaatgttgagaaccgcatgacgcgtatgatggcagtctatgaaggctgggaggatctggacaagatcggcaacatccggagtctgcgtgattattatgcctactgggcatttgaatgggatgcgttcctggtgcatttcggagggccctttttcatcaatgaattgttggcacagccggacacgcaggatatcgacggtacctccggcacggatgagggagcctttttccgcaccacagatcgcaacaagcctcacaatgcttatacttccggggccggtctgctgcgagtgatcggccaaaaaggctacagtctggaatatcgtgggctgtccgacgaagagcatttccgttttgccacgaaggctgaacccaatacgctcgggcagtacggttccaaggccaaggatgccacttatatcgatatgtcggggtgttaccctctgaccagatgttattttgaattcaatgaggatgacggtctctattatcgttcccagcatctgtccggcagtacggacggaccgcatatcgatgcattgaccggcaagcagctgactttcaagaatattctggtgcagaataccttttatgaagagttgggcgaggggtacctggcattccaatgccacgacaccacgagagacggctggttctttacgaatggccgggggattcacgtgaattgggagaagacctccgattacagtgccacgaggtactacgacgacaatggtgatgagatcgtcctcaatgccggcaagactatgatctgcatcgtggaggacggcgattccttcacgttccattagagatgtaaattgagagtttacgaaagcatagccgcgcataggcatagtgaggacagcgatgggcgcttgcgcacaaatcgctgtctttacttatgccgtgatgcggcgaacgccgcgatatgaaataagattggcagcgtttttgctgacaatcttatgaatagcgtggctcattgcggatgccatctgccacccggggagatctgtttgtattaaaaacaccattttctgctaaaaaaatacaaaaacatgagattttgccatgtaaaaagctgttattttcgctgagcgtgcaaaatgaagaaattccgtacaaaaattcctgatttagaagtttttttgtacggattttgctattttgatgcgattttcaccaaaacaataggaagagggctacggggctgtttcgctaactccctgcttagtagggcaagcatattactgcccgaaaagtgattttagaaatccaagcggtatttttatcgaagaatccatgaaaacgttctgacaattaccgcttcggcataggatgcttccattccggcagtaaatatcagtcactataaaagaaaatcacttcaaacttactgcttatacagcacaaaatagatttcaggcggtaaagatcggaacagcaaaacaaaaataccacccaggaagacaacaaagtcatccgggtggtatttcactaactctcaatttacaaaataataatattcgcgcatttcacatcattggcgaggtcgtacactcgtccggtggtaagtcccaggaccttcggacggagaacggcattagggatattctccacgatgcgggcggtctcgccgttgctcaatgccacatctgtgccgacaggatagaggatgacgctctctaaaaagcagcgcatgacgttaatatccagttcttccgtcatggacatgatcatctccacagcatctctgggggagaacggtttcttgtaagggcgctccgtcaccagggcatcatagatatccgatatggagatcagccttgcaaacaggtctattttatctcccgtaacccccatcgggtatccctttccgtttatcttctcatgatgctgcagcacacccagcttgatctccgtggacaggtcctccttcggctgcaggatccggtatccatatacagaatgttgcttcataatagcgaattcctcgtccgtaagtcgcgctgccttgttcaatatttcattcggtacttttgatttcccaatgtcatgtaaaaggcctgcaatgccgatttcgtatacctgtttgtcatccagtccgtattttcttgcaacgatcatggacatggtcgctacatccacgctgtgtttgaaggtgtattcatcgctgacctttaatgccccgatatccactgccaccgcatcattatcttcaatggcacgcagtagatcatctgttatgctcctggacgcattggtgaagtccggcgattgcgtgtcctggtacaaatactgcacgccctgtgccacacggtttcttacgctctcagagatctgtactttggcaggatccttgaccttcacctgatcatattttttctgtaagggttcgggcaatgactgtgtcttatctgcctctgccggtttgatatcttccgtaccttcacaggtatagatgcctgtgactcccattttcttcagcgcatcaatatggaagtcctccagtcgggttcttctggcgatcagtacacgacccgcacggtctatgatcgcctgatcgatcatcattcccggctgcacaatgcgcagcggcacatattttctcttgatcatcggtcgcttcccctttccggatgattttagttcatgcattattgtagcatatcttcatgaaatcttaaagatatctgtccaaaagtttaaaactgcttaaaagactttttatcagacattcctttatactcttctatagaaaaagacggctattttgtcaaaaaagggactcttgggagggatttttatgaatacaaatgcagcacatcagataccggtgcaccgacagcgccgcagaatttccagacaggagatgctccgccggaagcgagccatccgcagaagaaaacgcattgcacgcttcttccgcatttccgttgctgttttgctgcttctcaccgcagtatctttttggcaggattacggtggcgagattctgcccaccgtcaatcatctgtactaccagctgactgcaagatacgacctgccggtatccaaatatgattttgccgcgctgcaagaagaaaatgaaaccaccttcgccgaaagtctctcgtccgtcgatgcagatgctgaaaacatcacagaagccctgtcagagcttgtgaaaaacaatgcagaagctgcagatttcgtagctgactaccctaatcggcaaaattatctgggtcagtctatcgacctcactcacgatgtcatcatcggacaggttcctctgttcctgcaatgggacaagcgttggggctatgtgtccttcggcgacagcatcatcggtctctccggctgtgggcctacctgcctgtccatggcctatgtatacttcacccgggatttgaacggcaccccaagagaaatggcttcctattgtgaaaaaaacggatattatacagaatccggtaccagctggtccctgtggaccgatggcctgtcggctttgggtctgtccggcgaagaattatccttaagtgaaaacagtatgaaaaaagccctggatcagggcaagcttatcgtgtgcagcatgcgaccgggggatttcaccacctccggccactatatcctgctctttgattatgatgacacgggcttttgtgtcaaggatcccaaccgggtaagcaacagttcccacacctgggactatgtcacgctctccccgcagatcaagaatctgtgggccatcagccccactggtttctgacaatatccgctaagatcttcgccgtgccgtcgataccgaaccggctgctgtcgatcatgagatctttgtggtcgaagacactctgccagccgggaatgtatgccttgtggtagcggttacgtgctgcgtcaacatcacgcatcatctttttcgctgtctggggatccatttgcaagttctccacgcagtttttcagtcgcgcttcctccggtgcatagacgaacacattcaaatgattcggaatgtcttccaaaatataatctgcacagcggcctacaataatgcaggagccttttgccgcaaaatcacggatgatatttttctgagtatagaagatctcatctttcaggctggacattcccatcccgagcggatactgcctgcggaaaaatgtggacttcatactctcttcctcgtcgctgatgacggataccggaagtcccatgcgcttcgctgtggcttccacgatatctctgtccaggaattcgattcccagattttctgataattctttggcgatggatcgtcccatacttccgaattgtcttgaaatcgtgatcacatattgttccatacaaatccccatttctgcgcacgtttttatatataatagttttgttccgagtgtgcgcgaacacgaatcacatatattaaaaaggcagttattccgctaccacccgtaccggtctcttccggcgcttctgcatggagcgcaccacgcaggacagggtgtagttgatgataaaatagatcaatgcagccattccaaacagcacaaatacatcggatacgtttacattgccggtgccattgtagcggttggcggcggaaagcagctgtttggtccgcgccatcagttcaatggttgccacgttggccagataggaagaatccttgatggtcgtgatcacctggctgaggagggtcgggatgacgttccggtatgcctgaggcaggatgatatagatcatgacctgcaccacgttgaagccctgcgcatgaccggcttcaaactgcccgtgggcgatggagttcagtcctccacggatgatctcggcaatgacggaagaggtaaacaggatcaaagcaaccgctgccttgaacagcagcttcgtctctaccgtggtcagtccgaacagcttccggttgaacagctccgggcaggggcagaacaccaggcagatgaagatccacagcagtaacggtgtattccggaacacttctatgtatacggtggcgataataccaaatattttcgtagttttgcttgtgcagtaattcctgcacagagccagtacggaaccgatgacaattcctaacacgacggcgatcagcgcaatgatcagagtgaatagtgttcccttcaggatatagagcattactcccttttgtgccaaaatggaaaagcttgcttccagattactcattgtctgtcacctgcccttctgttttttggaatgtcactcgttgatccctttttttcagatgaatctcccagacactggctgtcttggagagtggataacatataatgaaaaatagcagtccgctgaccagatatgccggtgcataagcaccgccggtattttccccggtgacaaagctgtaagtcagcgagatcagatcggctccgccgataatgtacaggcaggaggtgtttttgatcaggttcacgatctggtttaccataggcggtaaaatgatcttgatgctttgcggaaggatgatataatacatccgctccacataggtgaatccctgggactgtgccgcttcaaactgtcccttgggaatggattcgatgcccgcacgtaccacctcagccatataggctccggtatatacgcccagtgcaacaatacctgtcggcaggattccaatgctgtgaccggaaaatgccagtgcatagtagaagaaacacagctggagcaggatcggtgtattctgcatgatctctacatagactctgctgatgacctgcaatatctttttcccgctggtcgccatcaggccgaagatcacacccagcaccagtgccaacagaatggcgaaaattgctgtctccacagtattcagaagtcctaacaggaatgtactcctgtacgcccagaccttgccccaggctctcgctgaaataataccagacatagtgtttcctcccggttacttttcatttctacagcgcccctccgggtactccctagtcttcgggcgctgtagactgcttcttatgttatctttactctaatccgttctcagtgatcaggctgtcgatcgtaccatctgccaaccatccctggatcagctcatccacataagcggagaggccggaacccttagtggtagctacgccgtattcctgaggcgagaacttgtcatcgatgtaagaacgtccctcggtcttgtaaatcgccagaatagacttatctacacagaacgcatctacttcaccggcactcagtgcagtggagatggcaggatagtcatcatactgctggaaagagatgcctgtggtccacagtgcgggatcgaaggtatctgcatcaaatccgctaccatcgatcagaccggcttcgatcatagcattcaccagtgcttttgcagaagtggaaccggaggatacaccgacctttttgtctaccaggtctgccagagaagtaatgccgctcttatcctctaccagtacggttacatagtctgtaaaataaggagtggagaaatcccagctttgctttctctcatcggtaatggtgaaggtcgccagtacgcagtcgatatcgccggaatccagaagctcggttctggtagctgcggtaactgcggtgaattctacgtccacgccgaggctctctgcgatcttctcagccaggctgatctccagtccggaatactcaccggtcagggtatcctggaagccgaagccgactaccgcattcttaacaccgactctcaatacgcctctgtctacaatcgcctgtacatctgctgccagctctccgtctgctgctgtggtctccgcaggtgccgttgccactgctgtgctgctgtcagcggtagaagctgctgcctcagatgcaggtgcttcggagcttccgcatccggtgagcagtgttgctgtcattgccattgctgccgcaagtgcaatccattttctcaaatttttcataactttctcctccttttatttcctcaatatatatctaaacacgaagcctttctgactgacacgctgtaaaatgcggcttcatggatagaccgacatgataatacatctgccgctgtgctgaccagagtatggttcacaggatatcagcggatgatcttgcccaggaactgctttacgcgctcgttggaaggattctcgaaaaagtgatccggagttccctcttctatgatctgtccatctgccatgaataccacgcggtccgctacctgtctggcaaatcccatctcgtgggtgaccactaccatggtgatgttttcttttgccagcttgatcatgacatccaatacttcctggatcgtctcgggatccagtgcggatgtgggttcatcgaatagtatgatctttgtctgtgcacacagggctctcgctatggcgatcctctgctgctgtcctccggacagtgtggtgggatatacatgtgccttgtcccgcagacctactacatcgagataatgataagccagatcctccgcttcctttttgctcttgtgatgaagcttcatgggagctatggtcagattcttaagcaccgtcatgtgcggatacagattgaactgctggaacaccatggagatggactcccggatgatcttggtcttattcgcatgcgtcagcttctgtccatcgatatagacatgaccactggtaggctcctccaggaaattcatgcatcgcacggtggtggatttcccagagccggagggtccgatgataaccagcttctcgccttcttttacttccagattgacatttttcagtacctggagatctccgaaattcttacatacattttccagtctgatcattttgctcctccattctgtgttccgggcaggaacttatgtaacagaaaaaggcgcttttaccgatttggtaaaaacgccttcgttttatgggttatatcttaaacagttttgtgcgctttgtcaagcttttatttcatcaaatcttttaacacttcttttgctttctccagctggttatccaccggggtatcgctgttgtagtaagcatccccgtcaaactcgcattccacatctggctcaataccggtgccgtggatattgcggccgttgggggtataataggcactgatggtgatcttgatggcggaaccgtcggtaaacggcatgatctgctgtacgattcccttgccaaaggtagtggtacctaccagggttccgatgccatagtcctgaatggctcccgccaggatctcggaagcgctggcactgttcatatccaccaacactaccagcggtacttcgagaggagtcttgccgtcgcaggtatattctgtgcgcttgcccgccttgtcttcggtatatacgatcattccctccggaagcagctttcttgcgatctgcaccactgcatccaggcttccgccggggttgccccgcagatccaggatcagtcccttcatatcggatccttttacggtagccaatgcatccgtgaactggtctatggtcacatcatcgaattccacgatctggatatatgccatgttgtcatccagcatctcatatttgacggtaggactctccacctttgctctctctaccgtaacgtgcagataatcgcccgcgccctgtctgacaatcgtcagatctaccgtggtgccagcttctccgcggatcatgctcacggattccgtcagcgtcttgcccgcagtggacactccatccacttcatagatgatatcgttggcccgcaggtccacatccgccgccggtgcgccctcgatgacaccgctgatcttcggcagattcgtatcggaatccatgctgacataggctccgataccataatagattccctgggtctgttctgtcagttcgttcagttcctctgcggtgtaatactcggaatacggatcatccagagcctccatcagtccgcggtacataccgtcctccagctgttcattggtgacctcgcttaagtaaaagttctcttttaccgtgtcttccagcagttgcagctttttgatcgtctgggcattgacagcagaaccctcgtcataggatacctgcgccgacacatcgtccttcacggtaacgatacgatggatctggaaagcgataaagatgccccccaccacgagaagagtcgcagcgaatcctacgataatgccgctgaggaacaaaccctttccggcattcctttgggactccgtcaccgtttccaattccttattttcttccatatatactctcctttattttccaatctttcgttgcaacacggcgcgtaatcgccatagcgctctgcccgcaagcagtca

SEQ ID NO: 11409 - DNA, 29800 bp, Unknown
  gut microbiota DNA sequence
gaactattgcgacaggtaattccaaggtgaagtatatgctccatccttacgaacactgaagtgcagatggttgccggtggaacgtccggtggaacctaccgccgcaatggtctcccctctgactacgatatcacccctggacacatacagtgccgatgcatgcatatagatcgtatacaggccgccgccatggtcgatcatgacgtagttccccatggtattgctgtaggtggctgccaccacctgaccgtcgtaggctgcatagatcgctgttcctttcggtgcggcgaaatccacgccattatggaactgttcaattcccagggtaggatggatacggttgccataatcatccgaaattctggtataggatgccaacgggaatttgaatacaccaccgtcataggtcagcaccgtaccgctggcctccaggatcctctttttctctgctgcgatcgccgcctccagtgctgcgatctctgcatcctgatcggcgatggattgtttatactccttgatcgcctgttctttgttggaaatatcgctctcataggcggtgatatcccggctcttctggtcgatcagggcctccatattggcctgctcctgctccaccccggccttagcttcatccaggatctgtttctccgcttccagttcttccttacacagtgcaatgtacttacggttctccatgaattctttccattgctggcggtcatatgccatgaccagatccatgaaatccgcccggttcaggaaatcactgaagctctccgcctttaacatcatatccaggatataggaatctcctttttcatacatgacacggatacgacggatcatggcatccttctgcgcatcctctttggcctgcgccgcatccagttcctcctgtgtctgtgtgatctcttcctctttggctgtgatctggctctttaggtctgcaatattctgttcgatctcgctcagattctgatccagctgtgcaacgtaacttttcagattacttttcttggtttccagatctttcttgatctgttccaggttgctcaggttgctcttcatcgtttcgcgttctttttgtgcctgattgatctgatcctgtttctcccggatgctgtctgacgtaatggaagacatgctggtagcctgcgcgggcagaccgctgccgcataccgggaccgccagcaccaggcaaagtgccagcaggattccttttttattcttattcatttaactcccatccgtatcacttgtttgcgggattttagaacccgggtactgccatgcagatacccgggaatgactacttcattatacgtgcagatgttttctgacggtggatatgcttcccaggaaaccgatgcccacaccgactcccagagataccgggatcaggaaatggaacacctcatctaccgacaggaaattcaggaaaccactgagtaccatgaatctttccacgatataattcagtgcgtaattatacagagaatagatcagtcccagcggaacggcagctccgatcagtccgatgagcataccttccagtacgaaaggtgcacgcacgaaaaagtccgtggcaccgatatatttcatgatattgatctcttccgaccgcacagagataccgatcgctacggtattgctgatcaggaagatgctgacagccagcaggatcacaataatacccatggacacataagcgatcagcagattcagtccgctcagggtattggccgtcatctcggaataattgaccttgcgcacctgcggaatggactgcagccaggtcaccagtgcatcctgcatggacacatcgctcaggaaaatctcatagctgtcttctcccgccagcggattctccgggaaaccttccgcataatcctcgccgaaatagtccggtccgaaggtagcccatgcctcgtctgcggatttgaactgtacgtcggatacctcggcacgcttggcgatctcctgtccgatctcttctatctgctgttcggaaggaatctgtccctctgtatgactctcgcagccatcccattcactatggaaaaatacggtcacagacacgccttcctccgctgtcttcaggatgttctggaagttagccacgatggagtagaacaggccaaacagaaacaggcatgccgatatggtcgcaatagatgccagggaataccatttatttcggaaaatattgacaaatccctgcttgatcgtatataaaagtgtactaatcttcatcaatatacccacccttctcttcgtcgctgatgatcacgccttttttcatggtgatcactcgtttctgcatggcattgacgatttcgcggttatgggttaccacgactaccgtggtgccgctttcattgatctcctctaacagcttcatgatctcccaggagttattgggatccagattaccggtgggttcatccgccaaaagtatggaaggattgttcaccagcgcacgggccagtgccacacgttgctgctcaccgccggagagctgtttggtcttggctttgtatttgcctgccagtcctaccgtagccaggatcgcagggacatttctgcggatctcgctgacgggagtctcaacgatacgctgtgcaaatgctacattttcataaacattacggtcattcaacagtcggaaatcctggaacaccacgcccaggttacgccggaatcggggaatctgtctgtgctttaatctcgccagatcatttcccataacataaacactgccgctggtcgctgtaagctcccgcagcagtaatttgatcaatgtcgatttaccggatccgctgtcacctacgataaatacaaattcccctcttccgatgctcagcgttacgccgttgagtgccggagagccggtggaataggacttgcttacattgtccaggaagataatgccattttcctctatgatccgttctctcttcagcctttgtgcctctttgtttgccatttgctatcttgcctttctactgtcttgtcatcatatttcaccatattgatttcttgcatagcctcattcgcaaaatcgctcctacggagcttttcttttgctcattgaggctttctcgccaaagaaataacgtcaaatgttcttacgaatgcaagcattcgacgctcattttccgttatttcatggctctgcaagaaatcaatactcataagtttccatgtacttcatatattttacaaccatcagcgcgatcttgaaggtgatggcgtcttcgaatacgcgcagatccagtccggtactcttctggagcttatccagacggtataccagtgtatttctgtggatgaacagctgtctggaggtctcggacacattcaggctgttctcgaaaaatttatagatcgtggtcagtgtctcttcatcgaaatcatctgggcttttgccgccgaagatctcacgaatgaacatcttgcacagcggaatgggcagctgatagatcaggcggccgattcccagttcactgtacgcgataatatctctctcatcgaagaagatcttgcctacatccagcgccatcttggcttccttgtaggaacggctgacttccttgatctcatgcacgatagttccgtatgcgatccggacctcccgaatgccttccttcagaagagtggtctccagcgctctggctgccttctcgatctcttttccggtatcggtctctgagaactccttcaccacgatcacgttgctctcgtccaccgccgtgatgaaatccttgctgttggaaccgaaatgtgttctggcgatctccaggacgttattatccttgccgcctgcggattccacgatcataaccactctggggacatcggtctggatgtgcagcttcttggaacggctgtagatatccaccagcagcagattgtccaaaagcaggttcttgatgaagttatccttatcaaatctttctttataagctaccagcagattctggatctggaaagcaaccattttgccgatcatatagacatcttcaccggtaccgccggctacgagaatatactccagctgctgttcgtcatagatcttgaaatactgatatccctggatctcctgagaatcagccggtgatgctgcgaattccaccgcaggcttagaacagttccccatatccatggtggccgctacttccttgccatccacatccatgacgcacagttcgactctggcgattcctttcagtccttcaatggtgttctgtaaaatctgatttgatatcatcttctgctccttcagtccccaactataattctctttcgctgttaccccggaaaaatgatacgagagcgtatccctcatatcatacataatacaaatttacaaaaaaactggtaaaattgcaatagttttttatgcactttttagtaaaaatgccattttatttttaaattagcgtaaaaaaagagttcaggaactaatattccgaactctttttgtcttagcgtttattattgtattatttctgcgctaaatccgcaaatcgatattagtaccaagctccggtgttacgctgcgttccatagctgcggaatccatcatctgtacgattccctgtcccagtgcttcgttcgtatccatcgccttgctaagtacagccgttccgactttcgtctgcagattgttcgaagccattgccattgataatcctgcgatatccataggaacacctccttctatcggtatctctcagatactgatattttaccacgatgctcccgcaattacaacggcagtgtcaacaaatcttccactttttccatgggatagtctgttttctcgtatgttttcgcttcaccgactccggcagcaagcatccctcctgctttcgccgcattgattcccgctatggcatcctccaccacaaggcaattccctggtgtggtctgcgtatattccgcagcctttaaaaacacttccggatccggcttggatttcgtaatatttgtgccatcggagatagcgtcaaaatcatccgtaagttgtgtctgcgccagaatgaatttcgtatttttgctggaagagccaatagccagatgataacctctttcgtgaagttctttcagcattcctcggatctctggtctcacatccgcaggagacatatttttcaaaaactctttataatagccgtttttttcttccgccagattttctttttcttctgttgtgtatttcctggtgctcctctccaggatgatctccagggaatccatacggctgactccccgcagacggttgttgatcgtctcatcaaaaggaactccgatgcgatccgccatctttttccatgccaggtaatggaacttatccgtgtataccaggacgccgtccaagtcaaaaataatcgtctttaccatgctgtctcttcctttcctatatttccgtatttcttacacacttctgtgctgcttctggtccgcagcatatgcatccgtccgggggatccactctaaaaatttctcaatctggagattccagaacctccactcatgacggaaaccgtctacaggcacccaggtcacatccacgccgttctcttccatgaatttttcataatggcataccttttcccaaagcatatcctgcataccacaggaaaaatatacgggagggatcttctttccttctgccacattcttacgaatgagtccgtacgggtcaaagggtccgtcctgaagcttatttttctcctgttcatcctcggttccgattgctgcggaaaaggctccgatggcagcgaaacgctccggatgattcaatccatgaatcatcgccccatagccgcccatagacaagcctgcaatataagtatcttccggtctgttcgatacggggaacatccccttgataaatgccggtacttcctcggacaggaagtggaagaaatcatctccgtccgcattcttgcgatagaatttattctccgcagagatcatgatcaccgccatggactgttcttctgcaaaaagttctacattggtgtagctggtccagtcactgtgatcgttgcccagtccgtggagcagatacaataccggataaggatccttcacttcgtaggaagccggtctgtctgccacgcccaaagattccggaatggtggggcttggaataatcactgtcatttccacggaacgcaataatgtctgtgatataaattttgtctcaaatcttgccatagctgtcttgctcctattcttcacccagagtggcattttccactgggtaatctgtacactgcctgttttctatgaaaccaccttgctcttatgcccgaataactgttttaccatctgcaagattctcgcgccatcgttaatataagccatgatcagtgccagtacaacaccggtaacgatagtctgaatggaactgtcgatgccaaaggcatttaatccgtaagtgaacacttccattcccagggctcccacgaagataccccagggcatattggtaaagccgcccaggaacagtccgatcagcacaggcgccatggaaccgaacatcagagcagttgagcttaagttattggcaggctccactttactgctgcaggcactcagcatggctgcacagcccagcagtgcacctaccagtgcgtaggtcagaataatatttttcttctcattgacgccggcattcactgccagtttggcattggctccgagacttctggtatcatagccgaatttggtcttgtatagcaggaaccaggtcactgccatcaccacaatgagaagaatatagatcagagggaactggttcatccgaagcagttcctgcgtgtattcggtatcattggcgaaaaagttgacgccgagaccgttgttcaacagtccgctgaccgcctcatataccataacgatgcccatggagatgatcatgttggggacacgtaatgtcacatagaaaacagcttcgatcaatgccagcagcatgcaggctgccacgcagcacagcaatactccgaaggttcccatatgcagctgcattcccaggttaccgccgatgatggctcccagcatgataatggctccgggaccgaaatcccatctgccaccggacaacgggattgcaattgcaagggctatgatcgtattttccacagtatcatgaataatgccttctgttgtgtatcctgtgaaaaaggatgtatttccgataatcagtgtaatcagcgcaaagaccgcatacattcctaacggaaacaataaagtcattgcataccttttgaagtatcctgttttcttgctcatagtttacgttcctccatcttagagcagtaagtctgcccatctgaatccccgcggcacttttgagggtgccgcgaagtatattgcttaaattactgacgtgctgccacaatatcggacagacttctgttggtcagggtgttcagatcagcaagagttgcatctgcattgtaggaaatgatgcaattctccagttcctctgccgtaacacagccatctgctccgttctcaggtactacatagttctgatagttctgcagatcttcggtagttccgatgacaggataaccggctacaccgttgacaatgctgccttcgttatactgaccgtctgctgcatcgggatagctgttgccttccagagcattgatgattctggctacacagcttgcaattgcctgggtatggttattgttgccggctgccagcagggcaccgctgttcatcagagattctacggaagtatcatagcccatggcgatcagcttgacattgctgccctgcagtgcgggatatacatagtccagaccggaagccataccgaagacagcatccatatcggtattctggttgatcagatccttggtgttctgctgtacatcgtcagaagtcataccggaggtaaaggtaagatcctgtactgcaatgttcttggattgcagttcactctggaagcttgcgtagatttcaggtgcatcggaaaatgcccatgcagggaaagagataccgcctacgttggtaataccggaatctgcaacagcgtctgcatactctttacccaaagctgccagatctccgccgaactgcttggtaccacccaggaaatactgtccgggatctgtgcctgcgaaatcatcctctgtgatatggtccagtgctaccacatagtatacaccggcatccgcacaagtgctcatagctgccacaatgttggtatcatatccgctgatgattgcctgacagccggaactgatcagattctccacacaggatacctgtgcatcatcatcgtaaaaagtagattcgtattcgaactctacgttcatattctcctgcagatacttacagaaattctgaatattggtaccctgggcatcggtccactgatacattaccacaccgatcttgtaagggtcaccggttttctcggtatttgctgcttccgcggttcccgctacgctctcctgtgctgcggtggtacctgctgcctcagagctaccgctctgtgtattgtcagtggaaccacatcctgccatcatcataaccggcagtactgctgccatcatcaggctgattattttctttttcatagtaaaactccttcctctttttggtcctttatgattactctatttatctgggcatctctgcgatggatttattctgtcgcaatgtcatgccaatgataacaatgaaaatgatacctttgaccagtgtgatataagtctggttcacaccggagatggtaagtccgttagccaataaagtgtaggtgatcacaccggcaatcgctgctccgatccggctcttgcagcctccgtttaagttcatgcctccgagaatgactgccaccatgacatccatttcggtaccggatccaatatttttacctacattgccgctgcgcgctagcaggaataagcttgccagtcccacgcatgtgcctgcgataatgtaacaccataactttacgatttttaattttgcaccgctctgctctgcactcaccggattgtcaccgattgccttgcagtattttccaagctttgtgtagttgaacagcacgataccgatcagcgcgatgatgatcattgccgccagggcatatgccacattgctttttaacggctgaatcagatcataacgggtgatgttcatacgtccgtcatgcagagacagaatgtaggtcaccatacccctggcgatgaacatgaccgccagggaagcaataatactcatcagtcccaggtaggctgtgacgaaccacatgaacagatacagcgccaccgccgtggctatggaagccagcaccgacaccggtacgttgccggtggcattcaataccagagtaattaccatggtacacagacctgccaccgctccggaagcaatatccacggttccgtgagcgaacatgaagatcatgccgatagaaatgatcataagcactaccatctgtcctaccaggctcttcaggttgtaagcggaatatatcttgccctttgtcagaattgcgaacaggacgaataccagcgtcagactgccatagcagacaatattgtttcgatgttgttttataaatttccatgcattcatttttcacacctcaaatcatatattcgataatctgctgttctgaaaggttctctgaacgtttgaagctctgcgttacttttccatccttcattaccaggatctcgtcacacataccgatcagctccggcatctcttcggaaatgatcagaatcgaatagccttcttttttcatccgggcgatcagctggtacatggtggttttgacaccgatgtctacgcctcgggtagggctgtccatgataatgatccgggacttattgccgatccatttaccgaaggataccttctgtttattaccaccggatagttctccaactgcctgattcatggaggagcacttgattgccagggattcgatctgttccttcgcatgttcccgttccttcttcggcagaatgaaggttcccatacggttcaggttcgccagtaccaggttgtccttaatggatgccgggagcaccagcgcttccttatcacggtccttggagatgtaaccgatactactgtccaatgcatcctgcacactacgcaccgtaacttcagtgccatccggtcggaatgcctgtaccttaccctctgtcagcttatccagaccgaacagtactctgcccagttgatgcattccgcatccggacagtccggccacacccaggatctctccctcgtgcagtgtcacgctgacatccttcagatctctgttggaaatatgttctgcctgcagggttaccttttctccatgagagctgtcgtaatcgctgcggtaataatcacccttgatctcgcggcctaccatcgaatgtttgatacggttctcatcaaactccgctctctctatggtgtctaccagtttgccatccctaagcaccgtcagcacatcgcagttctccatcagttcttccaggtcatgggatatgaacaacaccgcttttcccttgtcccgcagttcatgaatgatgcggtagatggtttttcttccgctctgggacaatgctgtggttgtctcatccacgataaacaggatagggtcgtaatacagtgcttttgcaacctcaaccagctttctggtctctaagctgtaagcagctgccggtctagtaacatccacatctgtcacaccgatattttccagtgccttgactgcttctctgttcatttctgctctgtcaatgattccatgatgggcaaaacgcttctcatcgcctacgaagatattctccgcgatgctcagtccatcaatggtgccggcttcctgcacgatcatggtgattccacattttctggcatccccgggatttttcggactgtagggcttcccatacaagaacatttcgccgcccgtcacagtgtgaattgcactgatcatggaggatatggtggatttaccggaaccgttctctccgatcagtccgcgtatttctccggtccggatcgccatacttacgtgattgactgccgtgacgtctccgaatttcttggtcagatcttttgtttcaaaaaatatttcattctgttgcttttccatacggaagtttcgcctcctatgttcttaccagacttgtaacgtttataaatgtgcatcccattttccgcagaacggatctaccgggctttttcccttgaactcgctgcgccccagcaatttctccatcaaagcatccacggtctgtgcatttccggaataacaattgatgtaagtccgtactctcgggaaatccaacaagtgatacggattttccaacgatacaaatacggtgggaacatcgttgatatacaatccacagtccgctcccatgggctgtttccattcgatccggacaactgtctgattactcttggttgccaggtttgccacatacagcatcagatcatattgggataccatgtcttcgtatttggtggtgaatccttctccgtaaggctggggtacgaattcgtccacttcgaagccttcatcgatcagtttttgtttgatgctctcgattgcggggcttactttatagatggaatagccttcgccggtgggttcgatacggtacagaaggatccggtgatatttctccggtgtaataggcaatacgcctttttcctcttttaccagggtaattcctttatccgctacttcgaccgcccattttttgtgctcggcacatccgacgattgcttcggcctcttctgtctccggcagtgtatttttatgatgcagtcccagggctgctttcagtgccagtactctggtcactgcttcatccagtctctcgggagtgataataccctcttcaatgcccttcagcatgaaatgataatcttcttccagatttcttgcaaacaggaacatgtcgcatcctcttgcaatcgtctccggaactgctcgttctctgcccatcgccagcatgaatcctgccatggtggtggcatcggtactgatgacaccgttaaatccgagccgttctcttaagagtccctgcaaaagttcacgggacaggcttcccggcatcagttcttcatctttgatatcgggattgatggctctctcccatgccggctgcatgatatgaccggtcataacagtcaacgctccggcatcaatacactttttatataccataccataagtattcatccagctctcacagtcgagatcgttgatggatgtcaccagatgctggtctctttcatcctgtccatcaccggggaagtgcttgatgcatgctgccattcccagcttttggatcgtattcacataggacagacccatacgggcaactctctccggatcagaaccaaaggtacgggtattcgtaatgggattacggaaatttgaatcgatatcaatgattggagcaaaggaccagttggctcccacagctccggcttctctgccgcatgcctccgccatcttcgccgccattatctcatcatcggtagccgcgatctccatgggagatcctaccagcgttccttcttccacaataccattaccgcccttttccaggttggctgcgatcagaggatatactttgctgcggcggatcacttctctggtggcatccacagcattcttcgtcggcatgatccggtacatgaatccgccggggttcatcagattgaatacataatccattgtctctttgttgttatttttcaacaatacgcagaaaagctgccccgctttttcttccgtgctcatgcctgccagtgtctcatgcacccatgtaatgtcgtcatcgcttaagtaaaatggttttgcttttaaatcgatcattttttattcttatgctccaattcacgcagttgttttttgctgcttaattaattcttttaattatgtcatcattatagtaccgtcatgcgtcgtttgcaattgcttaattagacaatttaattaagctatttttggtagaaaatcacaaaatttatcgagtattattgacgggcagatttttcatatctataatatagttaattcttttaaatatgcttttgtgtcaggggggatttttagaaatgacatcttcgatctcatccaaaggaaataatatgatgcgtctgaagcaggagaaccagtcctctatccgcaagatcatttatctgcggggaccggtactgcgctcttctattgcagaagacctgcatctgacgcttcctactattacaacaaatgtgaatgctatgcttcagagcggtattttatttgaagatcgggacaatgtagtcatgacgcctgggcgttctgcactgccggtggatatcgttccggattcccggtattttatcggtgtagagatcacgcagatctccagaagtgtctgcatttgtaactaccgtggggcaatcgtctttaccagtattgataataccatatataaggaatatagcgaagtactgcaatccgcagcccgcctggtgcaggctgcactccagtccaccgtggttcccacgaatcggatctgcggcataggtgtctgtctccccggtctgattgattccgaggcaggaaaacttttggcacaccgccagtttggctggtatgacaaggatgtggtgaaggatctgcgcgagtttaccggttataccggacctattacggttgaaaatgatgcctcttccagagcgcttgctgcacagctgttccttagggaacagttaaaagaggttccgtcgtttttctatgtatatgtatctatcggtattgcttcaccgtttgtcaaaaatgatttctcactgtccagttccccggtaggtgccggtgagttaggttatatgatcatggatccgaagatgcccttcggtacctggggcagcaccggcagtctgaacaatctcgccggcatccgtgccctgaaggagcaggcgcaggcagccgcaatctccggacgtgctccttatctgtattccctatgcggtgatgctctgcctacagaggcccagctgatggacagtgctacccatgatgaagtgatcgataagctgatccgggatgtaatcctgtatctcggtgtggctattgccaatgaggacaacttggttcgtcctgagagtatccttgtggacgctccctattttgtccatcagaaataccgggagctctttatggataccctctataaatactccttccgtcccagtcacttccgctttcatatcatttttctgaaccgtgatgaactgccgggtgcaaaaagtgctgcagcggttgcgatacgtagtgatttcgataagtacattgcgatataatgtcgatggaaccaaaatatcatcttaacatacaacaaaaataccgattccggaaatatgttgtctttccgaatatcggcatttttcatttttactgttctcagatcctgcggatatttttctctgtgatctgaattttgccttctttcaacagatgtcccacggcacgtttgaattcatttttgctcatgccggtctcatgggtaatgacctccggtgctgccttatcgttaaaaggtagggagccttcatagctgtccagcaatttttcgatcttctccgcatccttctggatctgcagatatgccttttcccggatgctcagtgtgagtttaccgtcttccaatacctttacaacgcgggcggtcacctgttctccgatcttcggcggctctgtggcaccaaagagttcttttttcgggatgagtgcggagaagcagtcatccaccgctacgaatgcaccgaaatttttgctgatctcatagattcttcctgtcaccatgtcatcttttttataagggctgtctgtgcgcaactgttcgtagacattcatggtcgcgcagagtctgccgcttttgtcgatatagagggaagccagcacctgatctccggcttttacttttcgcgtctgctgtttgaagggcaggaacagatccttctccagcccccagtccaggaaagctccgactttgccgatctgcactaccgtcagcagtgccacctgtcccatgattaatttgggagttttggtcgtggcgatcaggcggtcgctggaatcccgatacaggaatacctccacctcatctcccacgtttgctccggcagggacctgtttggccggcaggagcactttgtcttccggtgcttccttcgttgccagatagactccgaattctacttttttcacaattaccagcgtctgtttttcgcctaatttcagttccacgttttctcctgttctgtctgtttcacagcttttgctcagttatcggtttcttttccttctgctattatcactactatcgtagaaattctacagatacatagagtctgccttcctcatcctgcaggcagatgatatatccggtctctgtctgcactacataaggatgcagcacatcatccagaaatgcctgttttttatattccgcacgcatctgacggatcacaaaatcatccggcagatattccatggcaatattcacatattgcccgttattcacgtgatggttggtatcgagatgatgttttttcaccacgataggttccagcagctgtccaccctccggtacggtgatcttacggggggcatagtccatgtccagcttttcgtcgatcccatagcctctgcgcatatcttcatttaccatcaccggcttgcccgtggcgacgtccagaaggctccatagggagttagccttcgcgatatattcacccttttcatccagcatggcaaaattacggtatcccagaaatgcttttaattcatagggcagtgtcacgatcctgactttttcccctaattgcggataatggttcacaacgatctgccaggcagaaagcacccagacctgaccgatctccttcatatagccgattccaagccccacatcttccgaatggaaggtggaacaatcctgaaaatagttcagcagggcattcagcgtcagtctcccttcgctgtctgtctcactgtaacgtattctgctgtcaaatgcgtacatgtatcttatctcctttgtctgctccccactgtcagcccctgcggaatgtttttacagggacaacggagagattcccaacagcatctgcacgatctccgggaacatctgcagaaggatcatcacgatccagaaaatgcaatagcagagcattccgggattgcagatgactgttttaaatctctgtcccttggggatctgtcccggatccaatgcaaatcttttacggaagacaataaacaatacaattccggtgatcacaactgccagaataaacaatacatagaccatatagccgatccatcccggcagatacgccatcatgaaatccatgaccgcctgcgcatccccaccgttcataacgatctcctggtattcgtccaaatgaattgccttcaataacagtacactgactaccgcccccataaaattaatgcacatgtgtaagccgatggtgatcttcaggttgccggtcttcacatacagaaatgccaggaacattcccagcagcattgcatacgcgaactggttcaggttgccatggaacagtccgaacatcaggccggacaggacaatcgccactccctgaccgtattttacggtgcgatccacgatcagcttgcggaaaatatattcttccaggattggtgcgcagatcaccatatagagaaaggtaacgatcatgttggactctgtggcgtaggccataagggcattatctacttccgagcccttcagtgcgccgactaccgtagtgatcagcgttcccaccaggttgccgcaatacatcaatgcatagcacatgatcagcgccacaacgaactgcccgggggttatgcttttcttcacaggtgcttcccccggcatctgttttaccagcgtgatcaataccggcatgccgatcagatacaacggtaggacagcaaggatcaggttgatggtcgtattctccagccactccggttttaccattcccacaacacccacgactgctatctgtaccgcgtagatgatcaatgttccgatcaggaaccttaagcccagaccggaaaaactcttcttcatacttttttcgtccattttcttttctctccctcatgtcatagaaaaagctgtgcaccgcaaggatacacagccccttatttttctgctgcggtctattccccgagaccactctctacagcttctaccagagtcttcagcgcctctgcctcatcctcgccttcgcatacgaattcgatctcatctccgcacttaacacacgctcccaatacgctcagtacactcttggcgttggctgtgttctcacggaatttgaaagtgatcagagacttgaactgcatggcctccttgcacagaattccggcgggacgcaggtgcaggcccgtaggattcttgattacaactttctgacttaccatatcataaaccctccaatatctatattaatatgcattatttcttctaacattcttatgaatttacatacccattacatacgaattacattcttatcatagcatgaatgtaattcattcacaagaacttttccaagacatctttcgtattctgtctgtttagaacatgatatcctggatcaggctggcaagtctctgtgcttcctcctggatcacctgctgatcttttccttcgatcataactcttaccagaggctctgttccggaaggacggatcaggacacggccttctccggcgaacttctcctccaatttctgaatggcatctgcaatctctggatattccatgtacttttcttttttatggttggctactttggcatttacaagtgcctggggcagtacttccatgatctgtgccagctcggacagcggcttgccggtctccaccattacctgtaacagatgcagtgcgctgagcagtccgtcaccggtggtattctcatccaggaaaatgatgtgtccggactgttctccgccgagacttgcaccaatttccttcatgcgttccaatacataacggtcgcctaccttggtcttctccatggtgatgccgttcttctcagccatcaggaagaatcccagattactcattacggttgctacgatggtgtcctttttcagggttcccttgctcttcataaagttgccgacgattgccatgatctggtcaccgtctacgatcttaccattttcatctacagctaacagtctgtctgcgtcaccgtcaaatgccagaccgacatttgccttctcatagactactctcgcctgcagctcttccatatgggtagatccgcagttggcattgatattggtaccgtccgggttgttatgaatggctaccacgctgccgcccagttccttcagacattccacggaagtgtagaaagatgcgccttccgcacagtccactacgatcttcagtccggtcagatccacatttaccgctctcatcgcatggttaatgtattcttctctggcatccgtgcggtatttgatcttgccgacgccgggtccgatcgggaacttgataccaggcatattgttccggatcagagcctcgatctcatcctccatagcatccggaagcttataaccgttgccatcgaagaacttgattccgttaaattccaccggattgtgagaggcggagattacaactcccgcatctactttgtattttttcgtcagataagccactgccggggtcgggatcactcctacatagatgcagttggcacctaccgaacaggctccggccatcagggcatttgccagcatatctccggaaattctagtatcgcagcctaccatgatggtgggtttatgctcattttccttagtgagcacataagctccggcctgacctaactgcatcgccagcaggggagtcagttcctcattggcaataccacgtacaccgtctgttccaaacattctagccattgtaaaagtcctctcattccgtcgctcttcacgacatattgcttttttatttattgattatcagtatctgcatttttcaggcggatatggatattgatatccgggaccaccgtaatatcctctgccagattaaaggttaccggtatggtataggtacccggtgtcagttcttccacaccgttatcctccatccattgcgtcaggttcaaaatgcccgtcacgctgctgtcgtgcagtatgctgacatccctggacaatccggatactgtaatattgtattcctctgccgtggaagtgatctctgcttccatgccgtccggtactcctgtgacagaaatattttctgctgctaccgtgagatccttgctgacgatcggttcaatgtagactgtagccgtgatcttgccatcaaagctcttatccgccagtctgacattcgccggcaggtattccttcaggttgatgatatccaccagattatcagactgtcccgtaatattcatacggtcctccggcacggtaatcgctgaaattcccaccagtgtggatacgtttcccgcgatcctgactgtgggtacgctgctctccacctctccggtagccatatagccatcctcgggtacacccatgtattctatttctaccgggacttccttcgttgccagtacttctaccgtcatatatgcggaatcgacattcttcttaacgctttccagcaccagttcgttatcgtccgcatcatacagcttgatgtccacatttgccgacaggctggtggtggaatccgtcacattgatatccaccccggcatgatccacctgcgaaatagcggatttcggtccagtcacttcgatatttgtctgatccagtgtcacattcccgatcatgtaaccggaagccacatcgccgatggtattgctctccagcttgatccatttgctggtcttatcttccacgttcagccgcacggaatcgtgattccctttgatctccacagaatcattactgatattctcacaataataggtgatcgcgatcgtattgatatctgtcagcttgctcatatccgcttccgctacgatatcacttctgcgcagctcggatttcacgatgctctgcggtccggtaaccgtcacacggaccagattgctgttgtccaggacctcgtatacttttccttcttcatccaggagttctgtattgatcagacggacctggatattgttgaaggtcactgtatccttagggtcgtaaatctgcgccaccaggaaccacagtacaaaagcaagtaacagagaagcaagcttcagtcccagattacgtgtcaataattttttcattttttgtctcggctccttcccttccagattcgcagattcttgtgttcctctacggggttgttcaggatcttatgcattctgtcacgcaaggaatccgcatcgagattacgttccagctcaccttcataagccacactgatcttgccggtctcctcggacacaatgatcgtcagggaatccgtgatctctgagatacccacaccggcccggtgtctggttcccagctccttgctcagtcccagattgtcagacaacggcagatagcaggtggcggataccactctgttcccctgtatgatcaccgctccgtcatgcagcggtgtattgtgttcaaatatattgatcagcagctggctggtaacaataccgtccacatcgataccggttctctcgtaatcacgcagagataccttctgttcgatcacgatcagggctcccgtccttaccttgcccatctccacacaggctttggtgatctcgttgatcgtcttctccgagaattcttcattcacgcggtggctgttgtcaaacggcagcacagagctgataatgtttttcttgcccagctcttccaatgccttccttagctcaggctgcagcaccacgatcaatgccgtcaccgcaaaccccagcacattctgcgccatccacagtatcgttgtcatccggaaaaaataagccaacagcaaaaaaacaaggatgacaatcagacccttaagcaatatccatgcccgggtcgtcttcatccataccaatgtataatacagtaataccgcaatgatcaggatctccgccacatcgccgaaatccatggtcgtacggtaactgctgaagtttttcgcatattctgccagcttatcccacaactgcatttttcattaatcccttcagaacaattcttcgtaatcgtccgagtcgtcctgcgccatatggtcactgcttatggtaacgcttctgccgccggtcatttcacgtccgcggtaaggattttgctgtccataaggagcgctgcttctggcaggcgctgtacgctctgttactacacttcttgcggatccttccgcacttctgatattctgtccgccactccggctctggccggaaggtctgccctgcccagcaggatgggccgtctggtttgccggccggcgctgggtgttgatctttttcacagtattggccggtgccgcaacagtcatcttcggtaccgcttttacataataataatactcatcatcttcaaactgcaccttttccgtcctgctgtaatccaggcagaaccggaaaaattctatcgccttacataccagcacagtaacaaccgctcccagcagcgcactgaagatagaaaggttggtatcatacataagatcccccaccagcaggatcagtacttctatcatgactccggcgatcattgcgatggtccaggaatgatccacactcattctgcgaatgagatatactacgaccaccgtaatggtaaatgccacgatggttaccagcatagccttgcttcccaaaatgccgtcaatcagcagacgcagcttcgccgtagcctcttccgcacccatggaattgatcgtaggtgcattggtgatcactgtctgaagcagataatataccacaacgccgcagcttaccgatacgcaggaagcgggagtgccgatcagtcccatagccaccggcatcacatagggaagcttcagcatacacagcaccggtgtcagcaccactaccattgcttccttcgccgtgaaacgcaggaacagcagatacagcagtaagaatactaccagtcccactgcagctgtctccagagacaacgcatacatatgcagcagagagaacatcatggcaaatagtacaataaatccggtaggcaaaaaggaacatagcagagaaacgatcagtacgatcgccatattgtccagttttgtcatgtaacccattttaccgtttatgatactcagcacgatgaagctgagcaggaacttgatcaccggtgcaataaacgcttcattccggctgtatatctttttcagattttctcttaattccagtaacgcagtcatatttcctccaaattaatctgctgcctactcattatatatagaattcagctttttcagattattataatagcatttcaggctttttttcgccctggcataacgcaaagagcagatcaggtaggaggcaattccgtataccactaccgtgattccataatacatcagaacatttttggcaaaactgaccagatccattttataaatgtcctgcataaaggtctcaaaatcgtaaaaaataaacagagcaaaacagaccgcataggcgatcgtggcacacaatacggatttcaatacctgtatcgcaatgtagtcactgcgaaaataccggccgatcgccatgttctttttgccttcgttttcttcataagatgccatctgggtcatcaatatgatcttttcttcgttcagcataactcctccgtctgcggatgcctacagataacgcatccgttctccgtccctagagattctggtgttctgcgttcctacagactttttgggcagcacactctggagatccatggacatctcatacttacatttttcacaaaatcttccgctgcggatcggcgcgccgcacttttcacactgcagatagattgcggatccttctgtcagctccagtctctcttctctgagccactgttggatctgtgagggttccacatcgcagttctctgccacatcctgtattcccactccgggattcgcgcggatatattcttttacttcctggaactttgcttccattttttctctgcaatgaggacacaggatcggacctgctacataattaaatatatgtccgcacattctgcaatttcttatattcattatacttcacaccttcctcatcataatccggccccacaggccagcgtaacgcaatacacttcggatacgccatgggatttcagcaaaactgcgatctcatccagcgtggtacctgtcgtataaatatcatccaccagaataatccggtcatataattttacatcatttctgcctatattaaaagcctttttcaaattattttgcctttccgcgggatttaaccgcttcataggcgccgtattccgcactcttttcaccagcttttcatctaccggcagctgcatgtttttccccagggcccgtgccaggcaggctgcctgattgtatccccgcttcgaaagcttctttttatgcagaggtaccggtaccagtacgtccggcgatacgctgcggataaaatctcccagatattttcccatttcttctccgaagaattccgcgtattcctgtcttcccttgtatttaaaacggtatatggaaggtgcggccgccgcatattcatacagtgttctggagcgatcaaacatatgctgtttctggtggcagtcgctgcagaattctccgtcttcccgtatctttttgccacatttcatacaccagggcggagttaccacgcgaagcttcggaagacattccaggcagatcttctctccgaaaggttttacgatcctgtcacacaccggacatctcgtagggaacagcagctgccatagtatcttcatgcttcctcccgcaagcagcatatctcggggagatcacaaacctcccggattctctgctccagtgcagtgtatctgcgattctcactgacattgtcgatcatattccggactgtttcactgcttcccagaatcgtgacacagtttctggctctggtaatccccgtatacagaagattgcggttaaacagcattctcggtcctccgagaagcggcagaataaccgccgggtattcacttccctgggacttatgtatggtgattgcatacgacaattccagttcttccagtccggagaatgggtaatttacacgtctgccatcatcaaactctaccgtcagtgtcgcagcggtatcattgatctcccgtattcttcccatgtctccattgaatacacccaggcctttatctatgggaatattatatctgccgacgatctcccattccagctgatagttatttttgatctgcatgaccttgtcgccctcacggaacactgcatttccgcacgcatgctcttttttacagggatcggccggattcagataccgctgcagaattccgtttaaggtttcacatcccagactcccctttctcatgggcgtcaatacctgaatgtcaaacggcgttgcattgacatatcggggcagcttatcctggatcagctggatcatatgtttatatatgacatttacgtcacttctctccagcaggaagaaatcctttgatttattgtctaacgcgatctgttctcctttattgatgcggtgtgcattgacaacaatgtcactttgtccggcctgccggaagattttctccagtgtcaccatggggaatgccttgctgttcatgatgtctcttaatacctgtcccgggcctacgctgggcagctgatccacgtctcccacaaggatgagtctcgtccccggaaggattgctttcaacagcgcctgaaacagctggatatctaccatggacatctcatcaatgatcacgacatcagcttccaacggattctcctggtttctttcgaaatttgcctttctgctgtcatctccggataatgcgctgttcagttccaacagccggtgtatcgtcttagcctcgaatccggttgcttccgtcatcctcttcgccgcacggcctgtgggtgctgccagaaaaatatccattccctccgattcgaaataacggatgatcatattgatggtagttgtcttgccggttcccggaccgccggataaaataaaaagaccgtttttgatactttcttccactgctttcaactgcagttcatccagttccatggacagattttccgccatccgctccagtctcttgcggattgccatgtcctgtgacggcaaattctccgattctgccatgggaatattcagattccgcagcatattggcacaattcagttccgcataataataaggtgccgcaaacactgcctctcctttcgccaccagcttccggtccacgatcagattatccacctgcggacggatattatcctctatcactcccaatagttctgctccacggcagagcaattgctccaatggcagataacagtgcccttctcctaccgcctgtaacagcgtatacaagattccactgcggatacgataatccgagtccgtgtgaattccgatccttcccgcgatctcatccgcgatccggaatccgacgccgctcacatcctccgccagacgatacggattttcccgcatgacgctatacatttccgcaccataagtattatatatttttaccgccagtgtattactgatgccgtattgctgcaaatataccagcgcttcccgaagatcctttttttcttccatctggatagcgatctcctgtgcttttcgttcgctgatacccttcacttccgccaggcgctccggctcttcttctatgatccggaacgtgtcatcgccgaattttttcacaatacgggccgccagtgcctctcccactccgcggatcgcaccggatcccagatatctttccattcctacacgatccgtgggggtcaccgtctcgtagttctgtattttaaactgtcttccatacaccggatgctctatatactccccttcggcagtgatattttctccctgtcccaggcccttacacatgccgacacaggtcacttcttccccttccatcatcagtatcatgacggtatatccattttcactgttctgaaagacaatatgatctacatatcctgtaatgctttccatttttattcctcattctgctgtgtatttgtggctgttctctgcgaaatgcccggaaaatgccgcggttgcggtaaaagataaagaaaagggccgccgggaacggcagcccgaaatacttactcaagattataattgcgcttcatttgctcataaagcatctgtgccagtcccagactgttctgctctgtggaatctgatgcgatctgctgtaccatttcatccttataatagtccatcagctgggaattggaggaagaagtatcctcgctctccggaatggtcttcatcatttctttgaacatctgctccaaaaaataggattcaaactgtttgcaggcatccatgagttcatcatctgttgccttcgaataatcggagctgtttaatttatcctgtaatttggaagccgtctggttcgctgcatcggtgtaagcggtactgtccagcgcagagtttccgtataaactgctaatatccataatttagcctttctagattccacggtaatgagcaatgcatctcgaaaacgcttcgcgtttccttcgatgtcgggcattcgccctatcaaaccgcaatctgacaattttgcctgccagcaggcaaattgtcatctttcgctttgacatttctcattacctacgcaggttgttcgcctgctgtagcatttcatcggatgccgtaatggctttggagttcagttcataagctctctgtgccacgatcatattgaccatctcatccactacctgtacgttggagctttccagatatccctggatgatactgcttcgttccacattattattggtagcttcgttgatcgcctgtccactggctgctgtctgctgatacaggctgtctgccagtctctccaggccgttcggattgttgaactggaatacgccgatcgtaataccgatgggttgcggattgttctgtgcatccggatagcagaggctgccgtccttgctgacagtaaccttgctcattacatagttattacttaggacaataggacgtccctgcgtatccagtaccggaagtccctctgaggttgccagcatattgccaccgttcgaagccagggtaaactttagattaccatttctcgtataataggtattgccgtccgcaccgcgaactgcgaaaaatcccttaccgtcaattgcaaatgcggtgtcgctgtcggatgccgtcaggcttccttccttaaacacggaactgatggaagcattccgtacgcccagtcccacctgtgcgctgctcggtttcgcatctccattagcggaggttgttttcgtctggatgttttgatataacaggctcttaaattcattcacctgtgtcttatagcctgtggtgttgacatttgccaggttattggcaatggtatccacatttgtctgttgtgcgatcatgccggtcgctgctgtccataagcttctgaccatatgtagtctcctctcacgctgtccctaatatcatccatgatccggttttccatcctgaaagttgtgtatcaaggtcgggtgcttttgccccccgacatcatatatatcggctcttttttattttagattactgtactctgccaatctggttcactgctacgtccagtgtatcgtcgatcgtctgcactaccttctgattcgactcatatgcccgggtaatcgaaatcagattcaccatttccgatacgatctgcacatttgccatttccagatagccggatttcacctgtgcttttgccgcaatcgttttggctccctggatcggctgatagtaggtctcgccgtatttttccagataatcataatcttcgaaatctgtcacctgaatcttagccactgcctgaccattctggtagatcgtgccgtcatctgtgatggaagaatcgatcagagtattcagccggatccgtctgttctgggtatccaggacatagtcaccctcttctgtcaccagatagccgtccttgttcagtgtgaattgaccggcgcgggtatatttggtatctgtctctccggctttgttcgtaaattcaatggcaaaaaagccttctcccgacaaagcaagatcatacgtattgcccgtgattcggaaagatccctgggaatagtctgtataattctcaccgatcttaactccgggattcttcactcccagtctctgcacatttcgcatgcctacggactggtccttgatcttaactgtcagcacatcatcaaaggactggctggtggagccttcctttttatagccgacggtagatgcattggccagattgttggtcatgatatccattcggttctgctcgtttatcatacccgtgtatgcggtgtataatcctttaaccatttgtatcctccatttgcgatatcgatccttcgacaaatgtccggcatcctgccatttgcttcattaattatctctgtatcctgcaaggaactctacgtatttaccggttccgatggctactgctgtcatgggatcctcagctgtcatggtattgatccctgtcttggcagagatcagatcctccagaccgcgcaataaacttccgcctccggtcagcacgatccctctgtcggcaatatccgctgccagctcagggggagtcttctccagaacactgtgaatggtctccacgatctgtgctgtggtctcgcgcagagcttcctctgtctcctcggaagataccttgacggtcttcggcagaccggttaccaggttacgtcctctgacatccatataatccacttccgctctcttatagcaggaaccgatcttgatcttcagatcttctgcggttctctcaccgatgagcagattgtgtttcttacgcatataacgaacaatggcttcgtcgaaatcatctccggcgatcttgatggaagcgctgactaccgtacctcccagagagatcacggcgatatcggaagtaccaccgccgatatccacgatcatgttaccgcagggcttggagatatcaattccggcaccgattgctgctgcaatgggctcttcaatgatggatacctctctggcacctgcctgataggtagcatcttctacggctttcttctctacttccgtaacgccgctgggtacgcagaccgcgatacggggcttacggaaggttctcttaccaagagccttctggataaaatacttcatcattttctcagttacggtatagtcggagataacaccctgacgtaagggtcttaccgctacgatattgccgggagttcttcccagcatcagacgtgcatcctctccaatggctttaatcttgttcgtgtctctatcaaaagctacaacagaaggttcctttaatacgactccctttcctctgatgtataccagaatgctggcggtacctaaatcaattccgatgtctgtgcactgcattttctattctacccctttccgatggtatcaatctatatataagtttagactctacacgctattttagtcatatacatcatattataactgaatttttcccattttcatagagggtaattattaatttttataactattcagaaccatgcaaatatcatcg

SEQ ID NO: 11410 - DNA, 5192 bp, Unknown
  gut microbiota DNA sequence
agtaccctgtgcgatcacggtgccgccgcggtcgccgccttccggtcccatatcaatgatatagtctgcggtcttgatcacatccagattatgctcgatgacaactaccgtattgccgccgtctgccagtctgtggaggatttccaccagcttatgcacatcttcaaaatgtaatcctgtcgtaggctcatcgagaatatagatcgtcttcccggtacttctcctggagagctcggttgccagcttgatacgctgtgcctcaccgccggataacgtggtagagggctgtcccagcttcacataagaaagtcccacatcatataaggtctcgatctttctgcggatatagggcacattctcaaagaaaggcaatgcttcctctacggtcatgtccagtacgtcgaaaatgctcttgcccttgtatttcacatccagtgtctcacgattgtaacgtttgccaccgcagacctcacagggcacatagacgtccggcagaaaatgcatctcgatcttgataatgccatcaccgccgcaggcttcgcaacgtccgcccttgacattgaagctgaagcggcccttgctgtagcccttcgccttggcatccgccgtagaggcgaacagatcgcggatcagatcaaacactccggtataggtagccggattggatctgggggtacgtccgatgggggactggtcgatgttgatgactttatccagctgctccacgccttcgattcccttatgtttaccgggaatacaacgtgcacggttcagctctctcgccagatgtttgtagagaatctcattcaccagtgagctttttccggagccagacacaccggtaacgcatgtcatgacgcccaatgggatctccacatctacatttttcaggttattttcctgtgctcccagtactttgatccagccggcaggagttctcctggtctccggcacaggaattctttttttaccactgaggtattgtcccgtaatggactccgggatctgcatgatctcttctgcagtaccacaggcgataacctcgccaccgtgggaaccggcaccgggaccaatatctacgatataatccgctgccagcatggtatcctcatcgtgttccaccactaccagggtattgcccagatcccgaagattcttcagggtattcagcagtttgtcattgtctctctggtgcagtccgatactgggctcgtcgagaatatagcacacgcccaccagtccggaaccgatctgggtcgccaggcggatacgctgtgcctcaccaccggacagggtagcggtagctctggccagagacagatattccagtcctacatccaccaggaatcccactctggcgcggatttccttcaggactctctctccgatgaactgctgctgtttcgttagggtcatggtgtccaggaacttctgcaggtcgcggatagacatggaagtgatctcgtaaatatttttatcgcataccgtaactgccagggactccttcttcaggcgcattcccttacattctttacagggggtaatgcgcataaaggtttcgtattcctgtttggagctttcggatgcagtctcgcgataacgacgctccacatttttgatcagtccttcgaatgctaccggatacacaccacttccgcgctggccggtataatgtaccataacttccttaccattggttccatggatcaggatatcatgaattttctgcgggtactcttcaaaaggagtgtccaggtcaaaatgatattccttggccagtgcctgcaatatggcattggtaaaactgcccttgtccgcgcaggactgccaccccatcacggtgatcgctccctgattgatgctgagtctcttgtccgggatcatcagatcctcgtcaaactccatcttgtaacccagtccaaaacataccgggcaggcaccgaagggattgttgaaggagaagcttctcggctccacttcgctgacactgatgccgcagtccggacaggagaagctctggctgaaggtcaccggctcgccaccgatcacatccaccaccaacaggccttcggccagctccagtacgttttcaatggaatctgtcagacggcgctgaataccatcctttaccaccagacggtctaccacgatgtcgatattgtgcttgatatttttatccagtttgatctcttccgtcagttcatacatactgccgtcgatccgtaccctgacataaccgcttctcttggcacgctccagtactttggcatgctcgcccttacggcctctgaccacgggggccagcagctggatcttcgtaccttctcccatgttcatgatctggtctaccatctgatccacagtctgtttggaaatctccctgccgcacttcgggcagtggggaataccgatcctcgcatacaacagacggaagtaatcatagatctccgttaccgtacccacagtggaacgagggttacggttggtcgacttctgatcgatggaaatggcgggagacagtccctcgatactttctacgttgggtttctccatctgccccaggaactgtctcgcgtaggaggacagagattccatataacgcctctgtccttcggcatagatcgtatcaaatgccagggaagactttccggaaccggacataccggtgagtaccaccagttcatttctgggaatgtccacattaatgtttttcagattatgttcattggcgccccggatcttaatatactcccgggggcgcatcttctttgcttcttccattgtcttgcctttcttatttcatatcattccatatcatttaattgtttctttaattcaagcattttatctctaagttctgccgccgcctcgaagttcaggtctgccgctgccttctgcatcttcttctggatctcgccgatgagcttctccagttccttcttcgtcatggattccggatccttctcgaagcgtacctcctccttggcgatcaccttggagatgctgatgagatcccgcaccgcctttttgatcgtctgcggggtaatgccatgttcttcgttatacttcatctgaatctcgcgacgtctgttggtctcgtccagcgcttcccgcatggaatccgtgatcgtgtcggcatacatgatgacatgtccctccgcattacgtgcggcacggccgatggtctggatcagggatgttgcacttcttagaaacccttccttgtccgcatccaggatcgctaccagtgtgatctccggaatgtccagtccttctctcagaagattaatacctaccagcacatcaaatacatccagtcgcatatcacggatgatctgggcacgctccagcgtatcaatgtcggaatgcagatattttacccggataccgacttccttcatatagtctgtcaggtcttccgccatacgcttggtcagcgtggtgatcagtaccttatggtgtttttcaatctctttatttacttctccaatcaggtcatcgatctgtccttccacagggcgtacctgtacttccggatccaacagtcctgtcggacggatgatctgctctgtcctgagcagctcatgctccttctcataatcggaaggtgtcgcagatacgaacatcatctggtctatatgtgcttcgaattcttcgaaattgaggggtctgttgtccagtgcagagggcagacggaagccatagtctaccagtgtctgttttctcgaacggtctcctgcatacatgccgcggatctgcggaatcgtcatatgagactcgtccacgatgatcagaaaatcatccgggaaaaagtccagcagcgtcatgggcggcgctcccgcaggaagtccgttcagatgcctggaataattctcgatgccggaacagaatccggtctcccggagcatctcgatatcaaaattcgtccgctccgcgatccgctgtgcctcgatcagcttgtcttcgcccttgaaaaactgcacccgctccttcatctcttcttcgatattgtcgcaggctgccttgatcttctcctgcgagactacgtaatgagatgccgggaagattgctacatggttcagctctgcgtggattttccctgtcagaggctccacctcggcgatccggtcaatctcatctccgaaaaattcgatgcggatcagatagtctccgccctgtgccgggtacacttccactacatctcccctgacacggaaagttgcacgttggatatccatatcattacggttgtattgaatatcgatcagctcccgaagcacttcatcccggtccttcaccattccggggcgcagggatacgatcagatcctgatattcatcaggacttcccaagccgtagatacatgaaacactggctaccacaacgacatctctgcgctccgccagggatgccgtagcggacaggcgcagtttatcaatttcatcattgattgaagaatcttttgcaatataggtatccgaagaaggcacatacgcctccggctggtaataatcgtaataggaaacaaaatactccaccgcattttccgggaaaaattccttcatttccccgtagagctgacctgccagcgtcttgttatgtgcgatgatcagcgtcggtttgttcaatgcctggatgacattcgccattgtaaaagtcttacccgaaccggtgacaccgagcaatgtctcgaactgattgccctgtctgaagccttccaccagctccgcaatggcctgcggctggtctccggtgggttgatattcggaatgtaatttgaaatgatccatattccttctcctgattttcgcttctatccgtaaaactctatctgtaaaaataggaagtcgctatcattttcttagtatgattacccgtctagtatatcattcaaaaataaaaaagtacagagcaaaatcgaatgtttgttctgtacctttttatcatacgcctctttactgcatgatatcgccaacaccattatcccgaatcacttgctgataccaataaaaggaatctttcggaattcgctgctgtgatctatagtccacataaactaatccaaatctcgggtcgcatccttccgcccactcaaaattatctgtaaatgcccatgctgtatatcctatcacaggaatcccatcattcattgcacgatacaatttactcagatagcaatacatataatcaac

SEQ ID NO: 11411 - DNA, 1226 bp, Unknown
  gut microbiota DNA sequence
ctactataagcccctcttgtcattagaagtccccaaaccagatattcagatccacttcttcattgatgccgtccacggcacctttttcactgtactgccatactttatacgcatacggatagtacagatcatcattataataagcgaaccacttatcgtactgctccagctgtcccagatccagcatcagcgtgctcatctccatgttgtgatagatcatgggcttgtagccggcatcctgaacagtctgacagaacagtgcggtcagacgggttctctcttccacactcagagcgttggcgcgccccttgccgccgctgactttttccacgtcgtaaacgatgggaagttcaacattgtaaggttttaccttctctaataccagattcgcctcttccaacagttctgcatccgtgatcgcctgggaatagaagtagacacctactttgatgcctgcctgcagggcgcccttgatattctgttcgaaatattcatcttctactaacttaccctcggtaccgtatcctctgagtcccacacggataaaagcgaattctacgccatccgcagcgactttcgcccagtcgatattgccctgatgcttggagacgtcgattcccttgtgggataccacctgaccatcctgcatatactgcacttcgccatcctccaaaatgttcaggttctccaatgcatagtcatttttctgcaagtcgtcacgaatgggaacaaaattaaaagttccgttgctcactaccaccagttcatccggatagtagggacgtaaagtctctaccatggtggtaccggaggtcaggccatcacggatcccggagaggatcttgttctcttcctcatcctccgcctgctgcttcgcttccgctatcagcgcgtccacttcctcctgcgtataagtctttaccgcctctgctgcactctctgtctgaccgcctgcctccgctgcagccgccagatcattggcgttatcctggaacttgccgtcgatccaggaatacaggattccggcaacataggtcaccagcaccagtactaacagacatccggtcatgaccagaatcgatgctatggtgttgtttttcttacgcttatttgctctgctcagacgatcctcggagatccgtccgttttcattttgttttttcataagtacccctgctctcctttttcatactgtctcgctaaacttacagtattcaaccctatct

SEQ ID NO: 11412 - DNA, 795 bp, Unknown
  gut microbiota DNA sequence
tgaaatttcgatttatccggccatttcccgcatttcccgcaggatctttttctccaggcggctgacctgcacctgactgatcccaaggatcccggcgatctccgtctgggtcttattctgaaaatagcgcatgcggatcagctcccggtctctctccggaagctcccctagcagctgttccagcagcatctggtccagcagcctgtccttctccacatcattctccaccgcactgctgcttcccatgctggctcccacacagccgtgggccgcggccaccacccggtccgccaggcacagttcgctgccgtcctcctgccccacactgctatagagagattccacctccgctcccgcttccatagccaggatgatttcttcctgactcagctctgcttcttttgacaattcctgcagtgtcggttctctgtgcaggcagctctgtaaccgctgtcttgccagcctgaccttcagaccgtcctccttgatggttctggacactttcagtaacccgtcatcccgcagaaaccgtttgatctctccggtgatcatcgggataatgtattatagtggaaattttgaaatttcctttatccaatagggtaattatcttgaataagatatatgaaattttacacgcaagaagatatatccccttgcgatgtattaactatagaaatgtaatttactgtagtgtcaaaagatcattatactcaatttcaacataatcattcgatattttaatctttttgatatattcacgtacagtcttctgtctttcattgaaagacatga

SEQ ID NO: 11413 - DNA, 1444 bp, Unknown
  gut microbiota DNA sequence
attttattcaataattttaatgatgttcaatgtgaattgtgtttctatttttttattgtgaataataaaaggcagagatataattatgtataaataacagtagtgcatcctctattggaaatgatggataatattattaaaattatattgtatggatccgttgccagaaatgagaataccgatgagagcgatattgatattcaggagaaaaacatggaaaactcaaaagatacttatgatatagaacaagcattagacgaggcagatttgctggcagaaaatagtaacgaaagaatgacacatgaagaagtatttcacgcgctgaagagcagagtaacaattccttttacacttcatggcatagaagaaatgcttacagtagaatacaaacaaggcacagattccagggaaattggctatgatgcccttcagggatttccgatagataaaatatgttgcataggttatccagtaatgcatggttactttgaacatatgaatgcaaccggttatcggagatcctgtggatttattcaattcgtggaaagaattgaaaattatggggaaaacagagagctttccatagatgtcagtgatgataatctggaaaaagggaatccatattttgcgtatggttatccggcagaaatatttgatgctccctgttgtaatttggctgggtgtagacatttgaaatggacagcttatacctatctagtagatctgccctcccgcatgaatagcaataaactgaaattcctgggcggatactcctggggatatgaagaggatgaaaacggtccacagagattattaccgctagagatattgacagaaaatgactgggaaaagcatgcaacggaaaaaggaatattaaagatatcccaaataacaggaggctgtactgctaagttatgaagaatagatataaacaaaaactgatcttcgttattgcaattttatgtttgagcttagtaagctgtaaaagtaaaacagagccaattaataatattgcatcatggacaccggatgatggttggacaataaatggaattgatattagagatgattatgccaatttcatactattatatcaagacagggaaatagcaaatgtggaaatttcaaaatttgcagaatcatcatggattgatcgggaaacaacagcagataaatttgtgcaagtatatttaggtcagcatgcagaactaaagagtagtagtgagctacaattaggtaggaaagaagaaaaaatccaaaaacttgtggttgcatgggaattaagtgctgcagaggtcgaaaatggagcaactcctccaaaggatgaaatatggtattttggattttctaagaatgaagttttgttttgcgcacaactgttggatgaaaatgaggaattagaatttgaaaccataatgagaacgctcaaatattgagatgttga

SEQ ID NO: 11414 - DNA, 44926 bp, Unknown
  gut microbiota DNA sequence
gtttgcaggctgttctgctgcaggtgtctcctgtgcaggttctgctgtagaacttacttctgttgcggtagtatctaccgttacattgttttcattttcaaaattctgtccgtccattttttcctctttccgatcctttcaggatcttagtttatttaatctgccaacgggttacctttaccatctacattgatcttgcctgtcaggatcataatagcctctaccagactccagatccatatacctataaccaggaaaataccaactacaacacagcaaagaatatatccaacaatggtaagcacaagctgtgtgattgcttttccggtgtagccaagataaaaattatgaacaccgaatgtacccagaaaaatacccaggagaccggcaaccagtttggattttgcatccggtgcaggagcctgtttattagctacgccgcagtttaagcatactgctgcatccggagctaacggcttaccgcagttatggcaataattattgccctgtcccttagctacgccacactttatgcacattacagcttcatccgtcatataaggttcgccacaattcttacaatagtacattaattcttcctccctcttattatttcctattttataaaataatttgaactaacaatgtacattatacaagatgcttgtattttttaccagtggtattttcacattataaaagcggataacgtgcattttttatataataaatatcttattgccgctttttgtcaaacatcaggaagcatttacgatatattccgcaccatccaagaactgccattgttgaaaagaccgggatcatattataaagataccgcgccctggcttcaaacaacataacaaataaaaacataccgataaaaataacgatcatggtaacagaaacgctcaacagatcggatgaattctcctcaactgacacatcactcttacgtaatcctgctattgctttcactaaaagcaatactgcttgtgccagaattcccagcagtacaaaaatccacaggccctggcttactgtcgtgaaccagatataattactgccatccagccagtagaaattccgcaatggttccgtaaaagagctgtcggaaatctccggatattcccaggcctggaaatatccctcctgataccagctgaaggtgccgtcattaaaattcatgacctgtttgtgcagccagaaccgcaaggtccctataaagccccggtcctgcattctcctgcggattcctgcaagttcatattgcatccgggaagccttatcggaaccggcaaaagaccgtacgatctcaaggccctctccggaacaggctcccgtggtgtcctcattgagaccgttatacatataattactccaaccgatttccaactccggattgtatccgtagtgtaatgtctgatacattccctgcctgcaccatgatgcaagacaaaaggcaattaccagcagtaacatcttccctcccagtccgtataaccgggaacgaacatcgctctcctccgaaacggtcccaaaaatatcaattatgacgatcgcaattaccgccacataacaggtcgctttcataatgccgctcaggcatccgagaaacataagcaggaaccagagagcataactccacctgcttttgcggcctcgcaccatggaatataagaaaaggatcataacaggcatcgctatggtgcagccatccgtatacggaatgattttccatggagagattcccagaaaggcaatattgaaaatcagtgttataacagatgttcccaggtttttactgactctgagcaccaaaagtacagaacataatactgccagtgaaagcattacgcattggaactggatccatataaactccgggttatacggatacgctttcataccggaagaaaagcaatacagcttatacaaaagccatgtaatgggaatattgttgctgtagatcgtataataatcgtcatatcccagttcgccgccttcgaagatccagcgtgccgaattggccaccattccgcagtcccagccgccgtagaacgctatacatttggaaatattgacattgatcatataaaaaaggacacagaccgccacggtaacggccgtaaatacagttattgtacggggcgtggttggaagttttctgagaaaataataaagaattccaagtaccgcagctcccacgatcgcacataaaaataagaccctgtttccttccacagtaacaattttgtgcattgcattataatctacgttatttccgtaataaataacataaaagaaaaccggaagaaataacaacagtaaaagaagagagaaaaaaactgtaccgatatattttttcttcattccgaaagattcctttccaaacttttcagtaatgtctgccgggcaatattgtagcattttctataaatatttacaatgttgcccggataaaatctatctgatagattttatctaccaatatctccgttccctgtatccggaggcttttgctattttcgtcaattttttgcacgcatccttccagagtgttgtaggcaccgccgtttttccgagtgtccggtacgaaataagtgatctttaccgtaagttcctctctcatgtgctgttgcagataaccgatctgccggtcaatctcctgcttcctgtcttcatccagttcgacaaaatgatccgtcagacgggccgtttccttcagagcatcttcgtatcctgtcaatgccgcaaagggagaaaactgtgccgcccggtcctgcaacgacattctggggtgggtggcggacacaggatgcggaagccagagcatgtccttatatttctcgttcattttttaccctttttctacgattatttattatgctttgtgaccaccgatctgacgattcctgtctattgtggtagcgccctcttgtaagtcggctgccttcaaaatggcattttttccgtatttggatttcacccggagcattgcttcctgcaaatgtttttccttttccagacgttctttgtcctgctgcgtcgtatgctgtgcaggctcctgtccagcatacaaaaggcctccggagaacagatccagctgttcgtagaccggctcatccttcactttgtctgcatcttttaaatgattggctgtcagagtgatccttcgtgttaaaagtgatggattcacgatccgttcatataatcccatcgtcgtctccgtgatcttacttaaagatgcagtcattgtcgtaagattgccggtgccgtgggcatgttttggtacgctcctgccataacggtctaccgtgatctccccatgataatgatcggcaatctccggtatcttcagattatcaatgtcataacccacagtcagtacgatctgatctgtcaccagctttttcgccatcagatccatggccaactgttcagccatctcccggactatgatcttcgtcttcgtaaaatccatggcacaatgcaatacctgcccggaactgatacagttggtctccggccgataggacttgatcagatccatggtcaccggttcatatccccaggcatgatcgatcagaagctccgcattgattccgaacattttatagagtaaatcttcattatagtaatcctgagtgctgccgatagaacatctggccacatcacccatggtaaacattccggctgcttccagttttcgacggtatccaatgccaactctccagaaatccgtcagtggtttatgatcccacaaaagttcccggtaactgatctcatccagttcggcgatccggacaccgttttcatccggctccatatgtttggctacgatgtccatggcaatcttacacagatacagattggttccgattccggctgtggcagtcagcccctttttctcgagaatctccattgcaattttggacgccagttctcttgctgtcatgccatagattttcagatattgtgtcacatccaggaacacctcatcaatagaatagacatgaatatcttccggtgcaatgtacttcagataaatatcataaatctgtgtactgtattctaaatatctcgccatacgtggtgtagctgtgacaaaagctacctctaattcggaatgttcctgcaattcatccgcaaaagaagattttccggtaaaagctcctccgggtgcccttaccttccgcagtgcatttacttcccgtactttggagattacctcaaacagtcttgctcttccggaaatcccataggctttcagggagggtgacactgccaggcagatggtcttctgcgtccgggaggcatccgctaccaccaggttggtgttcagtggatccaagcctctgtccacgcactccacggaggcataaaaggacttcagatccatagcaatatacgtatgtgatgatgtttccataaatgcctcctttctgtgctgcggttactcattacatcatgattcgcacctatggtgcttaccgttgcttcacaacgatcatgatcaaattcgccgttcgccaattatgcaagcatattggctcacttgcgctcattatttatattatagcagaatgtatgttcgattgcaaaaataattttataaaaaaagactcccgattttttcgggagtctcagaattctgaaaatcagatttattagaacttgccagccttagcagcttcctcgatggatactgcaacagctacggtagcacctaccataggattgttacccataccgatcagacccatcatctcaacatgtgcaggtacagaggaagaaccagcgaactgcgcatcagagtgcatacggcccagagtatcggtgaaaccataagaagcgggacctgcagccatgttatcgggatgcagagtacgtccggtaccgccgccggatgcaacggagaagtacttcttgcctgcttccagtctctccttcttgtaagtaccggctacgggatgctggaatctggtaggattggtagagttaccggtgatggatacatctacgttctccttccacatgatagctacaccttcgggaacgctgttagcaccgtagcagttaaccttagcacgaagtccctcagagtatgcaattctctctacctcggtaacggtattggtgtaaggatcataagaggtctctacgaaagtaaatccgttgatacgggaaatgatctttgcagcatccttaccaagaccgttcaggataacacgtaaaggcttctgacgaactttgttagccttctctgcgataccgatcgcaccttctgctgctgcgaaagactcatgtccagccaggaaacagaagcagtcggtatcctcttccagtaacatcttgcccaggttaccatgaccaagacctaccttacgggtatccgcaacggaaccgggaatacagaatgactgtaagccttcaccaattgctgctgctgcttcagatgcctttctgcagcctttcttgattgcgattgcagcgcctacagtgtaagcccagcaagcattttcaaaacagatgggctggatcttcttaacctgatcgtatacatccagaccagcatctttcgtgatcttctctgcttcttcgatagaggagataccatagctgttcagtacagcgttgatcttatcaatacgtctttcatatgattcaaataaagccattttttctgtcctcctgtatcttattgttttctgggatcgatgatcttaactgcatcatctacacgaccgtactggcccttagccttttcccatgcagtgttagcatcgtcacccttcttgatgaagtcagtcatcttgccaaggttaacgaactggtaaccgatgatctgatcatccttgtccagagcgataccggttacataaccttctgccatctccagataacggggacccttcttcagagtaccgtacatagtaccaacctggcttcttaagcccttaccgaggtcttccagacctgcaccgacaggcagaccttcctcagagaatgcactctgggtacgtccgtatacgatctgtaagaacaactctctcatagcggtattgattgcatcacatacaaggtcagtatttaaagcttccataacggtcagaccgggcaggatctcagcagccatagctgcggagtgggtcataccggaacatccaatggtctcaaccagagcctcctggatgatgccttccttaacgttcagggtaagcttacatgcaccctgctgaggtgcacaccaacccacaccgtgagtcagaccggaaatatccttaacttcttttgcctgcacccattttgcctcttcgggaatgggagcacaaccatgatgtacgccctgtgcaacgggacacatttcttcaacttcttttgaataaatcatgtgaaatctcctttcaatatgtacttataatactattgataaaataatatcataatggtcgtgttcattctctcatatttccctgaaaaaatctagtggattttgacatttttttcattagtttctatgaaacgacaccatattcttacgttgcagcatttaccagctcttgataaaggtatcaatgtagttatccagacatttcttaatgacttcgatggcttcttctctgttgcctttttcattgactgcggtggtcttgttctccagtgctttatatactgtgaagaaatgctccatctcgtccaccacatgactgggcagctcggaaatatcatgatagcagttataattaggatcattgaaaggtactgcaatgatcttctcatcgtttttgccgttgtccagcatggagatcacaccgatcggatacgctcttaccagcgtcataggctgtaccggctcggaacacagtaacaatacatccagagggtcaccgtcatcaccgtaggttctgggaatgaaaccatagtttgcgggataatgggtggatgtatgcaggatacggtccaggatcagaagaccggtctccttgtccagttcatacttgttcttgctacccttggaaatctcaataacacagacaaaatctgtgggagtcactctctgagtgctcatggtgtgccaaatacttccatttacttctttcataatctctctcctctacgctatagttatttccggacaaaagatccggagaatacacaggtcattatccgcggatctgaccgtttccgtggatcttgtatttataggaggtcagctccttcagacccattgggcctcttgcgtgtagcttctgtgtgctgatgccgatctcggcaccaaatccaaattcaaatccatccgtaaagcgtgtggatgcattgacatagacacaggcagcatccacttcgtttaagaacttttccgccgtctgcacattttccgtcacgatacattcggaatgcttcgtattatatcggttaatatgagcgatcgcctcgtccacactgtcaaccgttttaatggataaaatatagtccagatactcggtaccgtaatcttcttccgttgccggaatacagtccggcaggatttcacgggtactttcgtccccccgcagttccacattttttgttttcagggtctccgccattttgggaaggaacctgtcacggatcgcccgatgtaccaccagcgactcacaggcattgcagacgccgatcctctgggtcttagcattcatcagaatttttactgccatatccacatctgcgtcccgatctacgtaaacatgacaattaccggtgccggtttcgatcacggggatcgtactgttctccaccacgctgcggatcagtcccgcaccacctctgggaatcagtacatccacatattctttcatcttcatgaactgtgcggtaaccgcccgatcggtatcctcaatcagttgtaccgctgtccggggcattttgcagacatccagggcatcctgcaatacccttacaattgcaatattggaatgaatggcatcactgccgccctttaagatcacagcattaccggttttaaagcacaatccgaaggcatcagcagtaacattgggacgcgcttcatagataatgccgatgacacctaacggaacccgcaccttatcgatctttaatccgttgggacgctcgaaatgttccataacctctccgatacagtcgggaagctcggaaatctggcggagtccctccgcaatctgggcaatccgatcgggtgtcagttttaaacgatccaaaagtccgggattcattccgtttcttctgccgttctccagatcagactcattggcggcaagaatctccgcctgcctgtcacacagatagtttgccgcagtgtccagtgccttatttttttcttcagtagtcagtttctgcaatatatatttcgcagcacatgcattttttcccaattccgttaactctgccatagctatcccctactttctatccgatatttataatttaaaccagaatcacctgatacggcttcacatctgtcacttccacaggtacctgttctacctgctggcagtggaaaccgataccgatgctccgcagtcttaagttttctttgtccgcaagatatctgtcgtaaaatccaccgccgtatcccatacggtttcccagcgggtcaaaggcgcttcccggcatcagaagtaaggttttgtctgcatgctccggttcaaacagataccggtccgtatcccctgccggttccgggattttcttgtaaccgtttttcaactctgacagagagaacatccgataaaactccatttttccatcttccactttgggaacgtagacgctttttccgtcttgcagagcactttctagaatctccgtcgtacagatctcactgccgtagcttacaaaacctaaaatcgtatccgacagataataccactggtgtccaagaatccgctccgtgatcagcagcttcccccgttcccgctccggttcggtaagcgcatttctgcaggcaagcgcttttcttcgaatctgttttttctgttctttgatcattttttctttttataagccggctttaatttctcaatggtgccgtccggtcgctcaatctctatattatccagctgcgctttcatattacgtttgatactgtccacatattcctgacgtaaaatggtctgttccagtttttcttcgtccgtcagtccctcattctgagatttatgataaagctcattgatgcgctttattctttcatccatattcataatgtattctcctttttgccggatcaatttttatgcagattctgtacaaattccggcagatcaaagctttcttccctgtgtgctacgaacagagtaccttcattctctccttctaacaaccgatgcagcacgccgatgtctctgctgttggcaatgatcatatccacgtcggaactggtggcaattttagctgcgatcatcttggtattcatgccgccggtacctacattactgccggtggaagccttgcccatattcatgaattcatccgtaagttcatccacttgttcgataaattctgcatccggattctgtctgggatcatcggtatagagtccgtcgatatccgacagcaggatcaacaggtccgcatcgatcagggctgccacgattgcggacagcgtatcattatcaccaatttcgatctcgtaggtagctacggtatcattttcattcacaatgggtatcacccccatttttaatagttgtgtaaaggtgttatgagcattataacgattcagattatccacaatggtatttttagtcatcaaaatctgtgccgctacatgattgtattccgaaaacagtttctgataagccatcatcagacgggcctgaccgattgccgagcatgcctgttttacagccatggcctctgcctgggtctgtccctcaattgtcttcagattcactgcttttttgcccacggcaatggcaccggaagtcaccagtacgacttccttcccctggttgctgatatcacagagttctctcaccagcttttccagccggatataatccagatctcctgtttcgctatgttgtaaagaagaggaaccgatcttaacgacgattttcttcttatcttttatctgttcccttatgttattcacgtgactgcctctctgactataaaataaaaactttcgaatatctgaatgatatactatttttctctgtacgtcaacgctgtgatggagcaaactgtgatgcaatcatctccgccacacggataccatccatcgccgccgaagtaattccgccggcataccctgccccttctccgcagggatagcatccgcggatcgtggattgcaatttttcatcccgatcaattctcaccggtgacgaggtgcggctttctactccggtcagaatcgcatgcggagaatcaaatccccggatctgtctgccaaaactgtccattccttccacaaaagcatgattgcattcctccggaaggatccccgtcagatcagtccattcataagctcctttgcactggggttccattccgtcccattcgtcggaatctatttctttttccggtagatcttctcccgtcacttttttgcggaaatctccgtagagctgtaccggaagttttccattacagagatcatatgcctttttctcgagtacccgttgaaattcaattccggctaacggatgctccgatccataatcctccggcgtcaccgatacaataatggcgctgttggcattttgaccgtcacgtccactgtaactcatgccgttgacagccagtcttccgggttctgaagacgcattgaccacatatcctccggggcacatgcagaaagaatacactcctctgccggtaccggtcttcgccgtcaccttgtaggcagctgcacccagtcccttaacctgctccgcaccgtattgactccggttgatcaaagcctgcggatgttccacacgaaatcctacggcaaaaggttttgccgacattgggaactgattttcataaagcatggaaaaagtatctctggcactgtgtccgggagccagaaccagctgctcacacgggagttcttcggcagcgttaattttcactcccgtaacatgaccaccctcagtcaatatttccgtcacctggctgtgaaaatgaacttcacctcccagacgcaggatctcttcccgcatacttttcacgatccggctcagtacatcggtcccgatatggggctttgcctgatataaaatagcaggatctgcaccgtaccttacaaaagtcctgagaacttctgtgtttctgccgtatttatccttaaccaatgtatttaatttaccgtccgaaaaagttccggcacccccttctccgaactgaacgttggaatcgggctgcagtttccctgtctcccagaaccgctccacatccgcctgtctcgtgtccacatccgcgccccggtctaaaatcacgggacgatatccgtgtagtgcgagataatatccgcagaataatccagccggtccgcatccgacgatcaccgttggatgcttttgcggctgtgtgccgcctgcagggaaatgatatttctttttctccgtttgcagaacatttgccttaccgagtctgcgacaggcatccttgtatactttctcttcttttttcacgatgacatcgatactgtaactgtaaaaaagttccggcttcttccttgcatccagagactgtcttacgacctccagttccagaatatcttctgtagggatccgcaggctttgtgccgtcttatgtacaagctgttcctccgtatgatttaccggaagtttcaactggtttaatctgatcataataactccttattctgtcttgattgcagcagaacaccccgcaataaacccgctgctccaggcccattgcagattatagccgccgcatcttccgtccacatccagaatctctcctgcgaaatacagcccggggcagagttttgattccatgtcttccgtcacttccgttactgcaattcctccggccgctacctgcgcattctcatagggattgctctccgtaatatgtaaccggaaacatctgcacagttcataaaaagtgtttattttatcttccggaatttccactgccggagttgtcggttttatgcctgcaattttcaaaaatacagacatcagctttttattcaggattcccgtaaaaaactcttctgccgtccgcttttcctgcagcatccggcgggtttccttcatattttcataggattcttccgtcatatccggcagaaaatcaatctcggccattacagttttccggtccctgagtaaataattcacatcacggctcaactgaaatatgggaattccggagatgccgtattccgtcagctgtaattctccgcgctcgacatctgtttcacgtccgtcacacaaaatacgcactctgctgtcagcacgaacaccggctattcccttcagaagatctgtctccagacaccggagctgcaccagcgcaggtacgggagcaatacaggtatgaccagcttttttggcaattttccatccgcttccgtcagagccggtaccgggggcagcctttccgccgcaggtcaggatcaccgcatcgaattgccattctctgtcaccatcgtttaccacaagtttcccggatagtgttcgttccactttctgtactttacatccatagatgatttcaactcccagcgtctgcagttcgtagcgaagcacatccagtaccgacgctgcctgttcactgaccggatacagatatccgtttttttccttgatcagaagccctattttttgaaaaaagcaaacggtgtcctccgtaccgaaacgttccagcgcctgctttatccatgcagcatctcctccatggtaacattccaccgtgagatttctgttgcccagattgcattttccgtttcctgtctgtaatatttttttcccgattcgatcatttcgttccaaaatcgtaactttggtaccttttcgggcagctgtgaccgcagccatcatacctgctgcaccgccgccgatgattccaatgtgttttttcatttctgtttcacctgtttctttcttcaggaagaatatgtctccagaaaatcatacagtgtttcctcatcaggaatggacagcatgtccataacctgcatctgtattttctccggaagactgtccagggcaatccctgtattgatatatatggtagaccgatcctccaggtataccacaacttcgttgtcaaatactgccagataaaagccatcgcttggctgcagatagcgataatccatacgaaccacaactttttccctggaaaaggataatacctctaaacccacaaaacctctttcgagctctgacagcggaggatgttccgcatacagattcatcgtttccaaaaacctctccctggtcatgccaatatatttatgtggaatctgccaggaagtctctacggaggtatttctgagaatgtccgtctctttcaatacatattccgtatccgcacataaggtttcttccgacaccgtaactgcaacactttccggtacctccgaagtgtctgctctatccgcagggatttcggaataccgtccgggatacgatcccggatagaaaaaacggattccccacaccccgataaaaataccaagactcaaaaagaaaatgggaattacaaaaaagtaactgatacgttttacaagtttcatactgcctcacatctgtggtgtcaatgttcattctttgtatcagtatcagttatttttggaataatatacatctgacgcaaattttacagccggaacattttccccagcatacgcatcagcctgccgccgggaatatattgaaaatcctgtccccgcagacaacgcaacaatagcagaaggaaccaatacagcaacaacgtaatgatcagttccgaaatcaccgttaccactgctaccacatgggggaacaacagtttttccagaccgaatgccagcagaccgcaggcacaacagcagccggccggaattgccagtcccctgagtgcgtcgggccgggtcttcctctgcagacataatataacacacagacacacagcgccggcagccattccgatggcactcccgaggacgatgctcagaatcccggcattttccattctgaaaagaatagtcgacgttatgacaaatacgatatccatcacaccgtatcccaacaggagcaaatggttttttcccgataattttaaaatttgtgagcaataaaagagcaagagcgcccacaggaccacggaggatcctgttgtaaacatttctcccagcaggattccgacagagttatcgattgtctgcgccaggggtaccgccagaacggcaagccatacggtgaaaaacattccatgtagaaatacaccctggattcccgactgtattgcattttggacatagcgttcttcttttttccggatatgtgcgccggctttggctactcccggtaggattcccatgcataaaagaaccacaaccagaagcatcatatccaaatatcttccgataaacacgccatagctgtctgcagctgcataaatatccgccgcatttttctcaaataaaacgagccctgtccataacggcagatacaaaagtaagtcgccgatgatatcaccgcccatactgaaaagcagaacccggacctgactgaaaaaagtatcagtccccttcatgcctatttccgcctctcttcttccggatgcacttccctgataaatcacaaatacaaaaatcagaaccaatacctcagagatcacaattcccaatgcgacacccatggcaccgtacatagcagtaaagtcatcttttttcaggagaagactgactttttccccataggtacgaaaaatacccaaaaacaaaaggcccagtccaaaataaaatacctgtcgcaggatagcggataccgcagaaggcatttccgatccttcactctgaaaaattcccaggagtaccgactgcatacatctaagtatcagcgcaggacacagaatccacaggatcatacttccgtagggaatccgaaacgctttttccagcacaaaatatccaagtgccgcacagagcaccgcaccgaccagcccggcagcaatctggaaaatcatcatattccttcgcattttggatacgtttttatattgtcctttggcatttctgctcctaagaagccggccaagacgatccgggacatttttaccggtaagtatccaaaaaaacaaaaaaacaaaaaaagcggccgccaaataagccaggccattatttccaagctgttttccgaacacccagacatttatccctgccagacaataagaaaaaaactgtatctgttttctttttatctctacctgattcatttcggttacctatacgtgtatccacgccctttttaatctcttgtaattccaagggatgcgagaacctgctcctgctttgcctccattacctctgcttcttccggctccatgtggtcatatccgcacagatgcagcatgctgtgagccacgaggaatgcgaattccctttttctgctgtgaccgtaactttccgcctgttccctgacacggtccacggaaataataatatctccgagaatcagttctccggtatccggatcaaagtaatcagcctctctgtcctccggaatatcaaaatcaccgggggcagcaaagtccagattggggaaagaaaggacatccgtctctctgtctatattacgatattccttattgtaggcatgaatcccatcattgtcggtaagcaggacattcagctgtacctcataaggacagccttccatttccagcacagcatttgcaaccttctccacggtatcctccacagaaaaagaaacctcaccctccgcaaatgtttcctctgtttcattttcaacgtaaaaagtcataatatagtttttcctccttaaatatcttctgcattctgttccagtcccgcagactcagatcacattcattcacaaatcctttgacccggatccgttcgaaaattttatcgatcacctgatcatagtccggttttttatccggctccttttgcaataaaagtaaaatggcgctgacaacggcatccgaacagtagagaaccactgtttccttccgtcgatatttttgatcttccttatactcttccaaaatctccttcgcgcctttcggaaagctttcgccctgaagattcataagctcccagccttttttgtggtacagccccgcacattttaaagcatctttgtccaatccaagttttaaggcgatccgttcacagaaatatgcggtatgaacacactgaaaatactctgtgcgatccgtctgccgatatttcgccagtatctgattctccgtatcattcaggtccagatagcgtactctgtcccggaataccactgctccggaaaaaaacttcaggataccaagcaataagataccggagacgaccagattagctgccggcactaaaaactgctccaggctcagatgctcattggtcaataacacaatattggccgtctcacataaaaacaggcagaacaaagacaagaacaaaggtataccgattgcaaattcctgctcgagatgctgaaaaaggcaggcagcaaaaataccgctgataaaatacaggaagaaaattccctgagtctgaccttcaaatgaagcaatcataagaaacactgaggagaaaagaattccgaccggcagattgctgaacagagataataccacaaaaacaggtaaaaagggccagcctcctaccggaagaaatgtacaagccagtgaaagcagcagacagctccatactgctatccaaaaacgcatcaggtgttcatcgttgtcataatccagttgagaatccaattgttctcttctgagaaaaaaaccggctacagccaggcccattgcggtcattactgcgtttcgcagagcattttcaacggagagctgtttgccgaaaatacccatagcatatactgccgtacttcccgcgatcacggtaaaaatctccggcagtaaaaaaagcaggaagtcgtttttatcttcgtttcgttcgtgcttcataatcatcatacgcctttacaatcttctgcaccagcggatgtcttaccacatctttgttcgtcaggttgcagaacgcgatatcatcaatatttttcaataccctggcagcaacatccagaccggattttgctcccaccggaaggtccttttgggaagaatccccggttacgattaccttagaaccgaaaccgattcgtgtcaggaacattttcatctgagccggagtggtattttgcgcttcatccaaaataatataggcattatccagggttcgtcctctcatatatgcaagaggtgccacttcaatcagtcctttttccatatttttggcaaaactttccgcccccatgatctgatacagggcatcatacaaaggccgcaggtacggatctactttactctgcagatcacccggtaaaaatcccagcttctccccggcttcgatcgccggtctggtcagtatgatccggctgacttcgttatttttaaatgcagtgatggccatagccatggccaaataagtcttaccggtacctgcaggtcccagtccgaacacgatcatattcttgcggatcgcatccacataggctttctgtcccagtgtcttgggtttgatgggtttaccgttgatcgtatgacagatacagtcggcatccatttccatgattctgtcttcctgatcctccttgcccatctcaatggcataatccacgctctgctcttctatttcatttccgcgatccgacagtgccgtcaattgccttaatacccgggaagcctttccggcattttcctcttctccggtaatgataatactcccattacgatctacgatcgttacctgaaaatcctgctccagcttttttatataagcatcctgcatcccgaagatcttccgcatctgctctgtatccatttccagattgattgttgtcacgctcattaatgtcttaatcctctttctgcgtagtatccacctgtgttccgactttttcctgcaccacgagttccccatgcgccacccagccatcgcactttgtttctattttaacatctttcgagattatttgtacccctttttcgcctaaactttcaagaaaatccgatattttttcctgcaatatttcctttgcctcactgtcatcgcgaagatactctgttttttgatactctctgtatgtaattttgccaaatgtaccgttgattccaaacatttttaatagtttcatactatgggtattcagaatactgtcatattgcagaaacgaaacatttcgagcctgtttccattctctgtcacccagacgcataaaatatcctgttttttccctgccggtatatttttttaaaatataatccgccggtaaaaaaattcgaaagtgaccagaatgctccatccggatatccgcgtcagcagtgaccatacgatattcccgtatcgtaccgtcttcggcatagataggcacctttccatccaccaacagatctcccttggccacctgactgccaattgtcacttggggaatgccgcttcgcacgatcatatcggtgatgacaccgtcatactctgccacaagatcccggccaatgatagcatccgcaccctgcgtatcttccggaatcggtgcatcattttcctttaattccagcagtagtctagtgcccatcagccttccggaagtccatgtgacctgtgggaactgcctgcggatctgcttttccagttctccgatatccagcttactttttcgcattcccatctgtattccttcctgttccaggaattgaaatatcatgtcatccgtgatgacacaattgccggatatttggatatcccatacaaacatggaagaaacgatccaaaacatgaccgtcagcaccagtccggccaggaatgcttttctccgttgcagatgcggcagaaaaaaaggtagtccatatctttctgatatgactacccttacttttgtttttctggcaatggaacgaagccggtaaaaagactccaggctgacacacatgatatatacatcatcctgcttttcaatattccataacaatattcccttattactgcataaattgataaaacgctgtggtgcaaatccccacactcgaattttcacatatccccgaagccgtttcagccattctgtcatcttccatcgttcccccattgttatatataagtcagcgatacaatgttaccactgattttcatgtcttcattggtataatagtcgatggaaagtctgcttccttccagacatacctggcaggtcctggcttgtaacaggatccgctctccggtgtactccaggataccacgataattttcaatccagacttccgaattgccggtgagcgtaaccctcagtgctcccatacagacatctttcggaagctgcaaagaattgatccatttttccttttggtacggctgtgttctctttttcatataaaactatatgaacggaatccgcagaatatgttattgcaggatccctttgatcagtggctctgtctccggccggctgtcagtgatagcataggcatttaagaacttatctttcgccgcttccaggcgctgttcgtcatttgcatgcagatatccgagcacatcgcctttttttacagcatccccttttttcttttctaaaagaatacctacagacaagtcaattttgctttccttggtctctcttccgccgcccaacaacagagaacagattccgacatcctcacaggcaatccgtcccacaaaaccatccctgtccgcacagaccggcactaccatggatgccttcgggagtaaggaaggatctgttaccgctttcggatcaccaccctgtgcttccacgaactcggacagtttccgtaaggcactgccatcttcaatgacttttgtaagtgccgctcttgcctgttctacactcaatgcctttccgccggccatcagcatctggcttccaagcaccatgcaaagctcggtaaaatctttcggaccttcgccccgcaatgttgcgattgcttcttttacctccagggcatttcccactgccattcctaaaggctgatccatatccgaaattacggcaatggtcctgcggcctgcattcttgccaatcttaaccatttcttccgccagggcaaaagcatcctccctgctcttcataaaagcaccgcttccggtcttcacatccagtacaatggcatctgcaccggctgccagtttcttactcataatggagctggcgatcagcgacatattgtctaccgtagcggtcacatcccgcagggcgtacagctttttatccgcaggagccagatctgcggtctgtcccataatggcaataccgattttgttcacattttcaataaactgttccgtagtcagtgaagtagaaaatccggggaagctttccagcttatcaatggttccgccggtgtgtcccagaccccgaccgctcattttggctacgggaattccgcaggccgccaccatgggtgtcaatgccagagaagtcttatctcccacacctccggtgctgtgtttgtctaccttgcgaccatggatggatgacagatccagcatctccccgctgtgtgccatggccatggtcagttcgtaagtctccctctctgtcatcttctgaaaataaattgccatcatcagagcagacacctgataatccggtatctctcccttcgtgtagccttcaataaaaaagcgaatctcttctttggataacgctccgccgtttctctttttcatgataatatcatacattctcataggtttcctcctgtctgcggcaacattaccaccagctcttatacaccgacttttttacagatatcactgatacagcatttttcgcaataaggatgggttctggcagtacatacctctcttccgtgatataccagtctgtggcagaaatcgctgccttcctccggcggaatgatcttccaaagctccttttccaccttggcaggctccttgataccgtccaccagtcccatgcggttcaccaggcggatacagtgagtgtccgtcacgatggcgggcttaccgaagacatctcccatgaccagattcgcactttttcttccaacacccggcagagataacagttcgtcaaagtcatccggcactttcccctgatatttatccctaagtatcttcatgcaggcgctgatatctctcgccttgctgtgacctaagccacagggttttacgattgcctcgatctcttccaccggtgcatccgccagggcatccacatccgggaatttctcgtaaagcttctccaccacgatatttacccgggcatcggtacactgggccgccaggcggacgctgacaagcagcttccatgcctgatcgtaatccagagtgcatccggcatccgggtattcttttttcagacgttctatgatttctaatgctcgttgtttttttgtcatattttcgccacttttatttaaatcacaatacttttacttatggtaaggctcgtgctgaatgatccggaacgcccgatagatctgttcgcacaggatcacacgcatcagctggtgcgggaatgtcattttggaaaagctgagtgccaggtccgcccttttgcagacgctattgtgcagtcctaaggagccgccgatgacaaagcagatgtggctttttccacggacactgcagtcctcgatccacgaagcaaattcttcggaagaataatttctgccggcgatctccagtgtcacgatcagggcatcctggggtagctttgcaagaatgcggactccctctttttcacggatctgatcttccagaacggcgcttgctccatccggtgtcatctcatccgccacttcgataatgttcaacttcgtgtaacgactcagccgtttgctgtattcatcaatggcatcacggaaaaatttctccttgatcttccctacacatacgatggatattttgatcattcttccgctgctccgtcagtatccgggaagatctgttcgtagatcatcgtgtcgatgagattctccagcatctgctggtccagattcataaactgatgattcatctggctgcggatcacttcaaatctcttgtaatacaaggcttcttcgggagtatcagcggcattttcaatctgcgcatcgattttttctgcagtcaggttttcctcgctccatttaagcaaggtatctaccagagagttctcggactctgcctttttctcgaaaagctttgcattacgcatggacaccacgcccataacgatgaagaggataaatacagcactcatgaccccgtagaacatgtacggattcccaatgttaaagggtagtacccctgtaattccaagagccatcaccagtattcctaaagcacccacaatcaacagtacccaggcagaggatctgttttcctctgctttagcaccactgttcatataagtcagtcctccctgtgtggatgcggctttcaatagttccccggaatttggcttttcttccgatgtgtcatcttcgccgggcatcaggaattcgtctaccgctgcttcttcctcagcggcattctccttgtgctccttttcctgctgctctaagaaaactctggcgatggtcttcgcctttttttcgtccttggcatctacaaacagttcatagacctgctctgtctcatcatagacaagtttactttttcccactccattatatgtaaggaagtcttttaacttctccatctcgtcctgttcaccgaacagcacggaaacccagtccgtcagttcttcctcacttaccagtgcttctccgcaatcgggacatacggtgattccttcccgatattcatttttacatttcggacaccatgccatatgctaacaccatccttaatattcgcaacactttattttgcactcagatattcatcaatacccttggcagcagcctttcctgctcccattgccagaattacggtagctgctcctgttaccgcatctccaccggcatagacaccttccttggtggttttgccgttattttcatccgcaataatgcacttccacttattggtatccagtcccttggtggtagaagagatcagaggattcggggaggtacctaatgacatgatcacggtatctaactccatcacgaattcggatccgggtacttccacgggacgacgtctgccgctctcatcgggctcgcccagttccatacggatgcacttcatgccggtcacccatcccttatcgtcggacaggatttctataggattggtcagcagatcaaaaatgatgccttcctcttttgcatgatgtacttcttccactctggcaggaagctcctcttcacttctgcggtatacgatatgtacctcagcgcccagacgaagtgcggttcttgcagcatccatagccacgttaccgccgcctaccacagctacctttttaccgtgcatgataggtgttctggaatcgggatcaaacgccttcatcagattgcttctggtcagatactcattggcagagaatacaccgttggcattctcaccggggatacccatgaacttcggaagtcctgcaccggaaccgataaatacggcatggaagccctcttcatccatcagctgatcgatggtcacggatttacctaccaccacgttggtttcaatatgaacaccgagagatttaacattctcgatctcttttgccacaacgccgctcttgggaagacggaactccggaataccgtataccagtacaccgcctgcctcatgcagtgcctcaaagatggtgacatcataacccatttttgccagatctccggcacaggtcagacccgcggggccggaaccgatgacagctacctttttgccgttcttctgtgctgccggtgtgggtttgataccgttttctcttgcccagtctgcaacgaaacgctccagtttaccgatggagatgggatcccccttgaaaccgcggatacattttccttcacactggctctcctgcgggcatacacgaccgcagacagcgggaagtgcgctggattcgctgatgatacgataagcctcttcgatattgccgttcttcacctgttcaatgaactgagggatctggatggctacgggacagccttttacgcactgtgcgtttttacagttaatgcagcgggaagcctcttccattgcttcctctttattatatccgagacatacctccttgaagttggtagcacgttcctttgcatcctgttctctgacaggaattctctttaatacatccattttatttaaccatgcctttctgttttatcgtgttcagactttccgtctaaaagcttactggcagttgccacagccgccgtgatgggtctcgccctcttccagggccagcattgcacgtccctctgcggtcttgtagatctgctgacgtctcattgcctcgtcgaagttcacttcatgtccgtcaaactcggggccgtccacgcaggcaaatttcaccttgccaccgaccgttacacgacaggcaccacacattcccgttccatctaccataatggggttcaggctgacaacggtcggaatctccagttctttggttaataaacatacaaacttcatcatgatcatggggccaatagcaatacacagatcgtattttttgccttctgctaccagatcttttatcgtctgggttaccataccacttcttccgtaggaaccgtcatccgtggtcacataaagatttccggctacagattccatttccttttccaggatcagaagatccttggtcttgcttcctacgataacatctgcagcgattccatgctcatgcagccatttcacctggggatataccggtgctgctcctacaccacctgcaacgaagaggatctttttggattttacttcttccagaggctgctccacaagttcggaaggacgtcctaaagggcctacaaaatcatggaaatattccccttcttctaactgtgccatcattttggttcccgcgcctaccgtctggaacacaattgtgatggttcctttttctctgttgtaatcacagatagtcagagggattctctctccttcactgtccattcttacgatgacaaactgaccgggttcacaggtcttcgccactctttttgcctctacctccatcagatagatgttggttgtcagctcctgtttttttacgatcttatacatttctcttttccgtcccttctgttaggatttatataggattttatatatctgaaacagccaccagagtataacggcgaccactttcgtccacctgcagtttatacagttcctgattataggcatttacggcaaacagatttcctgtctttgtgtcggttccgtcttcacctctgtagatttctgcgatgacataaaaatcatctattttatttatgttggtcacatactgatattgatacagatatgctgctccggactcatcaaagttgccggactcctctgatattttaccactctgtattgcatggttcacaacttttttaacggcatcttccggcatgaagtctgtattcataaccagattataacttttttcaacgatatcgctttttcttccttctgcgatccgtatgaaacgaaaagtcgattttcccaaaggcatgggaatcggtccggaatatacggcagaattctgcgtaggatcggaaccgtccgtcgtataatagacatcatttccatctgtcacttcaatgttgatcggaaactcatagtcaccgctgacagtcgtgacctccggtgcgctcaattcatcaatttcaatatgataatttttggtcaccaccggactttcaattccgttctcattgatgtatattgctttaatacaataatccccattttccagcaaaataggtgcggtatacagggaactgttctctccgggtttgcttccgtccatggtataataaattttcccgcttccgaaagtagtcaatttcagcggctgaatactggtataatatccctcctgaagattgaattccggttccatagccatataactctggtacttactcataatgtttacattaccacagttttgcagaagatcattaatcgttttataatcgtctctggccgcataaatggcaatcagttttccataagcagtctccagctgttcggaagtggcctcggaatctgccacgatttccctgagcaaatattcgtactctatcttattgtttttccggaagtaaatatccgccagttcaaatttaaaagtaatattttcaggttccagttccagtgctctttcataacaggcgattgcctgatcatactcctctaatgagacaaaacctttagcgcattttacctgatagtctgcagaatgataatgggaataagaaatcccaaaaccggtacataccacagcaaccaccagcaggaccagcacaaggacaataaatttccatcggaatgggtgctgtgaaacatggctttccgggagttcatcccaatcctgtgattcgggatttacaggttctccctcctccgcaggttccggctccatttccttcgcaatgtcactcagcgtctgttccatattgtattctacttccggctcaaaatcagggactatatggatatcttcaccgcaatgctcacagtaaagctttccttcctccatctctgccccacaattcggacacttcatacgattatcctcttattgcctgcaaagaaacggattccagacaattattcatcaacatggctatggtcatggggcctacgccaccgggaaccggggtgatcgctccgcatacaggctccacactgtcgaaatccacatcgccacataatttattctgttcgttccggtgaatgccgacatcgatcacaacggcaccctctttgacataatcagcggtgatcattttcggtctgcctacagcaactaccaaaatatccgcccgctttgtcacttccttcagatcctttgtgcgactgtgagccacggtaaccgtaccgttctcccgcaacaataaaagtgccatcggtttacctacaatgttgcttctgccaacaacaacacattccttaccggtgatctcaatgccggatctcttaaggagctggatcacaccggcaggtgtacaggatacaaatcccggtttgccgatacagagcgcaccgacattctgcggatggaatccgtccacatcctttaaaggagaaatggcatccagtaccttttcctcatcaatgtgtttgggtaacggcagttgcaccagaatgccgttcacatccgttctgtcattcatttctcggatcagctccagaagcttttcttctgtggtctcctccggaagttcatacgccagagaacgaacacccacgtattcacatgcttttttcttatttcgaacatatacggaagaagccggatcggctcctacctgaatcacagccagagtcacttcacgcccctgctcttttaaagctgcaactttttcttttacttcctctttgatctgtgcggaaatagcttttccatctatcaactgtgtcatgggacaccagtcctccttactagaataatcctgtgatcttcccattgttatccacatcaatattgtaggccgcaggtgccttgggcagtcccggcatggtcatgaccgcaccggtgagtactacgacaaaaccggcgccggcagatacataagcctctcttacgtttaattcaaatccggatggtcttcctaacagtgtgggatcatccgacagggaatattgattcttcgccatacataccggcagattaccgaagcccagctccgtcagtcgttttaactgctttacagcagcaggcgcaaagtttacgccggatgcaccgtagatttccttcgcaatttttgtgatcttatccgcaagaggcatttcatcctcatagaggacatggaaatcattctctttctcttccattgcctttaatactttttcagccagagcgattccgccttcgccacccttctcccatacttccgagagtgcaaactcacaacctcttgcttcacagaaatctctgacataagcagtctctgccgcactgtccgtgatgaaggaattcagggtcacaactacgggtacaccatatttctgcagattctcaatatgtttctccaggttgacaataccctttttcagggcatccagattctctgcacccagatccgcttttgctacaccgccattgtatttcaatgcgcggatcgttgctaccagtacaaccgcatcaggggtaagtccggctttacggcacttgatatcaaagaacttctccgcacccagatcggcgccgaaaccggcttccgtaatacaataatccgccatcttcatggcagctttggtcgctctgacagaattacatccatgtgcaatattggcaaacggtccgccgtgtaccagcgcaggggtatgctccagtgtctggatcagattcggttttatagcatcctttaacaaagctgccatagcgcctactgccttcagctgacctgccgttaccggttctccctgatagttataggccaccacgatacgggacagacgatccttcagatccttcatatcgtcagccaggcacagaattgccataatttcactggccacagtgatgacaaaatgatcctctctgacatagccgtctgtcttattgcccagccccactacgatattgcgcaggacacgatcattcatgtcttcacagcgcttccagataatctgtctggtatcaatgccaagttcattgccctgctggatatggttgtccaaaagtgctgccagcagattgtttgcagaagtaattgcatggaaatctccggtaaaatgaagattcagttcctccataggtactacctgagcatatccaccgccggctgcaccgcctttgataccgaaacagggaccaagagatggctctctgagagcgatcactgcttttttccccattcgtccgaaagcttctcccaatcctaccgtggtggtcgtcttgccctctccggcgggagtcgggttgattgctgttaccagaatcaattttccgttgggacgagcttgtattttttccagaaattcctcagaaagttttgctttgtacttgccgtaaagctccaggtcatctgcatcgatgccaatacctgccgcaacgttcgtgatcggttccatgaccgcttcctgtgcgatttcaatatctgttttcatattttccctccgtttattcagacagttctccatgtcagatttcctctaacaactgttcaaactgttccatactcataagtacctttctgggctttgtgccttcttcttcgccgaccacgccgtactcacacaattgatccatgatcctggcggcacggttaaagccgatcttaagcacacgctgcagcattccgatggatgccttatccttgtctataataaaacgcgcggcttcctcaaaatattcgtctctgtcgttgccaccgccggatccgcttccggaagagcctcccgatgagccgatatttttaatcttttcttctatatcctcggcatagctgttatagacattgccaaggctctgatttttcagataatccaccacatcggatacttccttatccgatacgaaagctccctgtacacgggccggcttcgaatagccctgagggtagaatagcatatctccttttcccaaaagtttttcggctccgttcatatccaggattgtacgggaatccacgccactggatacggagaacgccacacggctgggcatgttcgccttgatcagaccggtgatgacatccacgctgggtcgctgggtagcaatgatcagatggatccctgccgctctggcaagctgtgccagacgacagatggattcttctacctcgccaggacataccatcatcagatccgcaagttcatctacgataataacaatctgcggcatcttcttaggccgttcctctccctcgcaaacaggcatggtctctatctttttattatagcccttcagatcacggacattataatccgcgaacttccggtaacgatcttccatctcactgacaccccaatgcaatgcagcagatgctttcttgggatctgtcactaccgggatcagcagatgaggaatgccgttatacacactcagttctacaaccttagggtctaccatgatcagttttacatcatccggatgtgccttgtacaaaatactcatgatcagggtattaatacatacggatttaccggaaccggtagctccggcgatcagcatatggggcatcttggcaatatccgctactaccgtcttgccagcaatatccttacctacggcaaaagctatgttggaattaaattcctggaattcgttactttctaaaagatcacggagtgccacagtcatattttctttgttcgggacttcgataccgatggcagccttgcctgggattggtgcctcgatacgtatatccgtggctgccagattcaatttgatatcgtctgccagacctacgatcttagatacctttaccccctgctccggttgtaattcataccgggtaacactagggccctgactgatatcggtgatcgttaccttcacaccgaaagtattcagtgtctgctgcaagcgcatggcagtctcttttaattctctggaagaatctcccgtagacgcctttcccttctgtaacagactcaaaggagggatccggtattctgccgtgggctgtttggctgcctttgcaatatccttatgtatctggtcttccgccagggaattccccttaggaggctccggtgccgtgatcttcgggcgtacgcggctctcagccggttctgcaggtgtctcctcatgctccggaatgtcttccttatggatccggatagcttccgcctggggcgtcagaagcgccgcttcctcctgccaggactctctgcgttcaaaaggctttttaaacgtagctgcgctgcttacttcctccaccggtatatcttcataagaagcctcccccactgcttcctgcatcgtcacctgatgcatatccgtcacattgattttatcaaaatcactggaagtcacccgggtctcttccacttcaggagcttcctgtgcatcctcttcgtatacgatctcatggatatcatcccgtctaccggcaggctgtgtatcctgctttttcaaggaggtatccatcataactcctgtcacctttttctctctgcgggggacagcattcaggatctgttcgttctctttctcctcagcgcgaagtcttcgctcttcttcacggatccggcgctcctcttcgcggatgcggcgtgcttcctctctttgggaagtacgctcttcctgctcctgcctgcggatttcggcattctctcgtctacgcaccgcgtcttctctggacatttcacggatcctgtcgccgccgttacgcatactgtttaagaaggatcgctccgttaccaggatcagactgatcaatgaacacaaaagcactaccagcactgttcctacggtctccagataatgtaacaacagataacagatactgcctgccagaataccgccgccttttttgccggtgctgcagttcgtatataacagcttgatatcgtactgttccatggaaccggcagtcttcgtgatcagatcgcatactacaccgatcattaaaaacaatacgacaccggcgatcattttccgcacagcagttgggttcccctcattggcgaaccagaaagccaccgccagaaatattacaacaggcgcaatatacgcagtgaatccgaaaatgccaaataagaccccactgattgcattgccaaccggaccgataataccaaaattgcaacaaaataatatcaacatcgcaacaaacaggacgatcagaccaatctcgtgaaaaagttcactgtcctgtgcagatctctgcgcctgcctgttgcggctgctcgtcgtactttttcttgtcctgccggaagatgatgttcttttgcctgatgaagatgccatgtcatcatacccctaactttaatgttaatacgaatataactattcagaaccgcattagtaaaatcgcatctacgatgcttttcttttacgttagcctaatagtcataattagaagtatatcatttttccactgccttgtcatccttttttatattgctgtccatcatctcccgaagctttcggattgcgcggtcaatcccgcccacttcatcaaggataccgtgtttcacagcatcttctcctaccaggatactgccgacatctttcgtcaggaatccggtctccatcatgagatcttccagtttctgccggctgatcctgcaatgttgacacacaaatcccgtaattctgtcctggatcagcttaaaatattcaaaagtctgtggaacaccgatcaccataccgttcgtccgtaccggatgtatcaccatagttcccgttgggacaataaaagaatatttacagctgactgctatgggaacgcctatggaatggctgcctcccaggaccagagataccgtaggtttactcaacgacgccagcatttcagcaatggcaagtcctgcttccacatctccacccatagtatttaaaagtaccagcacaccgccaatttcttcactgtcttcgatggctgccagttgtggcaggatatgctcatatttcgtggtcttcgaattaccggagagattatcatgcccttcgatttcaccgataatggtcagcagatggatcttttccccggatgccgcatccgacagcgtcagttgtcccgttttttcaattctttcgtctctgtgttcttccgcctcggtcttcggcgcttcattcttgttctgattgttatctttctgattctgcatggtctgtttcctcccagtttcaatgattttatgattttgaaaatttaaataacaaaaaaagacgacacaaaggcattccacctctcgtatcgtcttttagtatgtccgtcaatccaacatttcattaggaaaccaacagatttttaatgatcaaaatcatcgtcatccgctaccggataatcaaaatcactgtcatcgtcattatccagcttataatccagcaccttaggcacatgctttttcggcagaggcaggggattttcgatcagctgtatttttcccgtttctgcaggttcttcctgaaaagacacctgctcttcctccgggaattcctctgtctccagatcctgtactttcagccgggatctgcgtttcaccgtttccgtactcaccctttctttttcctgcatcatggtcacatagggaatcaggctttgtactccggctccaatgagaagataacgaagccgaacatgcatccacattccctgaatatccggggttgtgatctgaaacgtcatcagtaactccaacacaatccacaaaaggatccagatactctgacgttctctgcgtttctgacaccagaaaccaaatacaccgagaatttgcattgttatcaataaaaagatcagaatcttgccagctgccacagtatccgctccggttgtcatagtactgtcgtaaattgtgaccggccaggaaaaagcagacggttggaacagccgtccccaggcagcgagaacatttcccataagtttcccactgacacaggcatctattgcgatcgaaacaaagaatccggctgcgccgccgaaagccgccagtagtgcagcccacattctatgtaaaaatccaacagtctcctcttccactgtctccagtgcaaaaaccgaaagtattggaagatacagtagcagaccagtgatatccagataagtcagcactcccatcgccacaccggcgataaaaaaaacgagaatcgggcggatgcccttctgtgcgccctttcgacgaaaagcatccagtgctgccgccaccagacacaggcctatcatccataacatctgataaagctcttccggtcccagcactactaccttccaacacaatggccagagcattccaaagcccagcgccgtgactgctgcagccggtccggtcagtcggcgaaccgcaaaataacacagaacccagccaaaaatctgtaagcctgcctggaatcccagtgccacggtaactttattgccaaggagcaacaaaagcccgtgcagcagctgcagatacagatagaccgcaccgtgtactacctgtggaatctgcgtctgtgtcgtcacccggaccgtatcaaaccagacattctttgccgctacatcaagatccatcagctggatctcacgaatccgcagaacgatccccaccgctaccagcagcactgtgaggatcccctcgaccacaagtatattctgccggttatccgcatttgttcttttctctctgctcttttgcagtcttcttgacagcagaaaagcaacaagccctgtgacagcaagccatacacctgttatcacaaggccaatccattgggcttcctccggagcgctcggcatagtgaccatcattgctccggttcccgccataattacagaaagtaaccacagtattacacttattacattctttttataattcattatttcagtaccttttcaatgttatatctgggacgatgttttacctcaatgtagattttgccgatatactgacctaccagtccaacagccatcagctgaataccgcccaagaaccagatggacagaatcaaagaagtccatcccggtaccacatgtccggtgcaataagagatcagtgcatagattgccgcaagaatgcttaatattacaatgatcacaccggctcccaggatcatgctgatcggcttcacactgaaagaagaaattccgttaaatgccaatgccagcattttctttaacggatacttggattccccggccactctttccttacgatcatagtatacacagtcggtctggtaaccgatcagaggcatcatacctcttaagaacaggttcgtttcctgatatttggagaactgttctaccgcacgcttggacatcagtcggaaatccgcatgattgtaaaccgtcttgacgcccatcatctccataaccttatagaacccctgcgcagtggtacgtttgaagaaagtgtcggtcttacgttccttacggacaccgtatacgatatcacagccgttatggaacttatcgatcatctcttcgatcacagccacatcatcctgcagatccgcatcgatggaaaccgtcacatcggacagatccatcgccgtgatcagtccggcggtcagtgcgaactgatgtcccacattgcctgccagcttcacgccgcatacctgtaccggatgcgcctgatgttcttcttcgatcagctcccatgtacgatccttacttccatcattaacaaacaggataaaactgtcttccgcaatcttccctttgcggatcagatcatccagtacccccctcagtgcttcggaagcaatcttcagcacctcttcttcgttataacaaggaactacaatagcaagtttctccatgctgctacccctaccctttcgaattattcgtcccagttgtgataaactgcctgaacgtcatcatcgtcttccagcagatccagtgttctctgtaaattcttcactgcagtctcatcggtcagagttacataattctgaggaatcattgtgacttccgcactgatcatgggaattccggcatcctccagtgctttacgtacctcttcgaaattatcgggatcggtcaggatctcgaagctgtcctcctcttcggagaagtcttccgcaccggcatccagtgctgtcatcatcagatcatccgcttccatatcacactcttccttgtccacgatgatctggccctttttatcgaacataaaggatacgcatccgggagtacctacgttaccctgtcccttggtgaatgcgcttctgacatttgcagcggtacggttggtattgtcggtaagtgcatctacgatgatggcgataccgttgggaccgtaaccttcgtaagtcacgtacttgtagttcacattgcccacatcgccggctgccttcttaataccgcgatcgatagtatcatttggcatgttgttagccttagctttggcgataacggtagccagtttaaagttgttagcaggatcgggaccgccctcttttacagcgactgcaatttcacgtccgataatagtgaaaatcttaccctttgctgcatcgtttttctcttttttatgcttaatattagcaaattttgaatgtcctgacatctttgttactcctttgaacttaaagtttctttctctttgtatgcgcaacgcctgcgcaataacgctttttttatcatagcattatttttgtttttcttcaagcactgattgtccgtcttctgcattctccagtgttttttcctccggaagctttttgacgaggacacttccgatcatttttttgaccacggaaaggatcttgaaattatatcccttatagtccacatcaaactgttcatccggctccgggatcctgtccagcctcgagatcaggaagccgtttaacgtctcgaattcctcctcgtcaaaagtaatgtctaacagctcttccacttccttaagcggagtcttaccttccatgacatattcgcccttaccgcggttcttgatatattcctgatcttcatcatattcatccatgatattaccgacgatttcctccaggatgtcctccatggcgatcagtccgtcagtctgaccgtattcgtctacaacaatgaccatctgtagtttctgggactgcatctctttgaacagttcatcaatatttttggtctgaggcacaaaataaggctctctgagcaacccatccagcttcgcaatgggcacatccagcttgtcatcgctgatgtggaacctcatggcatccttcagatgtaagataccgatgatatggtcaatattctcttcatataccggataacggctgttcttgccttccagcatggaagcaatggcatcttttaacttcgtctcgccgtcgatggctacaatacttccgcggtgcgtcatgatgtcctgagcttccttgtctccgtattcaaaaatattggagatcatctccgcttcactggcctggatcacaccctgttcatgcccttcctgaaccatgttaataatctcttcctcggtcacatcattctcatccacattgttacggacaccgaataggaatagtattccctttgcagtcagatttaccagccccgtcaagggagataacagtctcgtaatccaaaagatcggatcaatgcaggcatatgcccacttttccggttttctggatgccatttttctcgggatcagtactccgaaggtcagcagaatataaatcatggcaacaaaagacaataccgttgcaatcccggagatcactcccgtgggaacattttgaagcgacaatccgccgacattgatcacatgcaggccgtcgtcgatcgtctgcagccagatattcaggtaaaaggcacccattagaatattgatcagcgtaatgactaactgtaccgtattgatatagatccccggacggctgaccatctcagaaagccgcaccgaccggcgatccttttcttcctctgctttatgtaagatctctttttcattgaggttgtcaatggcagcatcaaatccgtaaaaaaacatatctaccaatagcagcaggaaaaagagaaatatggccacaggcccactgatatccatcgttcatttcatcctttcgtattttaattcttttatatatcctctggatacgcagggtatcagactatgtatccagttccagacttaccttcagtgcccggttcactctccgcataatgtcaccgtcgagatgacatactttatcctttaatctcttcttgtcaatggtgcgcagttgttccagaagcactaccgaatccttatccatatcataaagacgggcatttaattcaatgtgtgtaggcagcttcgccttattcatctttgaggtgattgcagcgcagatcacggtaggactgtgtttgttgccaacatcattctggatgatgagcaccggtctgatcccgccctgttccgagccgatcaccggccgcagatccgcgtaatagacatctcctcttctcatttctactccttatatcagcgatttaggataagtattgccgattcttacggagttatacgaacacttttgatccgtcagaaattttcaaaatagtctcttacttctgtaatctcaccatgctgtatgtagaccctgggaattcttttccccagatcacagacaaattcataattaaatctgccggagagttctcccaattcttccgcggtgatccgctctgtaccgtccacaccgagaagagttactttgtcgccctccataactcccggaatctccgaaacatctaccatgaactgatccatacagactcttccgaggatcggtgccttcttcccccggatcagtacatagccttttccggacagacttctgggataaccgtctccgtaacctacagggatcgtggctactctggtatccttctgtgccgtaaacagcccgccgtagctgacgctctgtcccgcatgaatcgtcttacagtatacaatatgactgtagagagacatggctgcccgtaagggtacaatatccttgctcacttcttcggaaggatacagaccgtaagtagtgataccagcacggaccatatccatattcgcctggggcatttccaagattgccgcactgttggagcagtgcttgacgggaatagtaagccccagctctgtctgtattctatcgataaaattctgaaaaagttccagctgatggtatgcagaagtcttatcttcttcatcggatttggcaaaatgggtgaagatgccctccacttccagctccggatgtcccataaggaatctgacgaactccagtccttcctcatccggcgtaatgccgattcttcccatgccggtatctaccttgatatgaacctttgccttctgtccgacctttgccgctgctgcgaccagctcttccaccgtatccctgcggtagactgccgggcggatctcctcccggatcaattcttcgtagcaatagggaaaagtatatcccaggatcaggatcggtttcttcacgcctgcttctctgagtacatgtgcctcttcataagtggctgccgcatagccgaacatgaagtccagctgctctaacattttcgcgatgggaacaccaccatgaccatatccgtccgtcttaatgacagccagtattttcgtcttctccgcaatgttttctttcatatggaccatattttcccagatggcatccagatccacttccgcccatacccgttgataggactctaatttttcctgcagttctctcgtcatattttcacgctttcttattttgatttttcatcagacattcggcgatatctcccgccatcacaccatattcggtatgaagtccggccgccagatctcctgccatgccgtgcagatatacgccacaggtcgcagcctccggggcatccattccctgcgccagcaatcccaggatcacgccggtcagcacatctccgctgcctgccgtagccattccgctgttgcccgtggtattcagatagcaggctccctgttccttacataccacagtcctcgcatccttggcaactgctacggcatgaaatcgtttggccagtattttcgcacatgtggggaggtcgtccttgcactctgcggtcgtccgttttagcagtcttgacatttcccccacatgaggtgtcagaaggatcactctgccttccgcaccctgggcgcgcagttcttctgccagcatcctgccgttctcctctgccaggaggtttagggcatctgcatccagcaccagcggcttcctgcttctctccaccacggtcttcagacattgcagtgcctgttcttctctgccgatgccgggacctatggcgatgacatccgcccagtctaagctctccgtcagctgtctgcaggagccgtacaacgcttccggaatcccctgctgtatgatctgtcggttttcttccgcggtaatcacctttaccatgccggctccggtacgataggatgctttcgccgccaaaatggctgcacccgccatgccgttacttcctgcaacaagcagtgctttgccgaaggttcctttgttccccgcagcgtttctcttaagtaactgtacggagcctttctcataagtgtacattacaggttcctgtcctaaaaagctctccggtccgatccccacattcgcagtccggacttctccggcgtattccgcaccgggatacagtaccaatcctctcttacagaaaccaaaagtgaccgtgacatccgccagaaatgcacaacccagcactctgccggtatctgagcagataccgcttggcacatccagtgccagcttaaatccctctgccatgttcatctcttccacggcatccgcatagcttccctccacagggcggcttaatcccacgccgaagagggcatctacaattacattatattcatccaccgcaatattactgtctgtcttcaccggaaaatgttgcaaagtctgccactgcgatttccattgcttcgtagctctctgcatatctcccacgcattttaccgcgactgcgtatccgtccgccgcaagaagtcttgctaacgccaggccatcgccgccattgttccccataccagcaaaaatgagcactttcgtccgttctttcacggcatcaaagcgctctttcagaaaatcctccgctgccagcgccgctctctccatcaggaccggccccggtatgccgaggtactctatggtattcttatcgtattgcttcatttcctgtgcagttaccagatatttcatactatttttgctccggattatatttcatgtcaaacagattgaccacctctgcaccaaagatgtcatgcatgtagttatagatctcctgattctgctgttccatctgctgtttctcgatcagacgttttttcagttcaatgcggatcgcgcccacccactctgcagtctcattgatctgtttgtcattatccttcataatatcatagcagcactccatagtaaacatcataagctgaagatttaatctttcgatctcccgggggagatctttcagctcatcttcataagcatccagcttctcgttgcactcctcgatcaggcgcttatgctcttcaatcttcttgtttatcttgctgttctctccctgctgttccgcctcatccaccataggcacgatttctttcatcagcttctttttcagattacggatgtccttcgactccgtattcagctttccctgtctttttaacagctgattcagagcatcctccgtctcttttaacggaacagaaccagtcttattcagcagcttgtaccacttattatccagggtgagtacgggcaaatgtttcccaacaagtgcacttttaaaagcttcctgccggttcctcgcattttctcctgcgttatcgttgcccataatatcactccctttatgccttactctctcgtaagctcacgaattcgtgctatcgcactcttcatcccgcttcgcagccgcttgtttttccctgaggctcattattttatatctgaactgtaacggttaatgttatacgaaagtttcattaaactgtctgacagatgtacattctccacctgtattccctccggaacgttcagatccacatgcgcaaagttccagatggcgcggatcccgttcgccaccagcttgtcagccacttctacggcactggtcttgggaatcgtcagtacggcaatatcaatgtcattctcccggataaaagattccagctgctccatgggcataaccttcacaccacggacatctttccccacaagctccgggttcgcatcgaacattcccttgaaaataaaaccacgacgctcgaagttcaaataattacccagggctctgcccaggttaccggctccgataataacgaaattatgctgcttatccagtcctaatatcttaccgatctcacggtacagatattctacattatatccgtatccctgctgaccgaaaccaccgaaattattaaaatcctgacgtatctgggatgcggtcactttcatcagtccggaaagctcctgcgaagagatacgttctacaccttcatccttaagttcccccaaatatcgaaagtatctgggcagtctgccgatcacagcctgtgaaatttcttttgcttccaatactttcacctccgatttttttaagtatacaccatatgttaaaaacttgtcaatgaattgacaggttttcttcttttcgttacaataaaatttaaaaagcccggtctccgtgagctggaaatactggaaataaaggatacatactaccatgatattatcttgtcagaatatttcaaaagcatttgtagaaaatcaagtattgaaaaatgtctcttttcatatagaggatcatgaaaaagctgccattgtgggcatcaacggtgccgggaaaacgacactgctccgcatcattgtaggagaaatgactcccgatgacggacaggtggttctggcgaaagacaagacacttgggtatctcgcccaaaacagcaccgtagacacctctcacaccatttacgaggaactgttatccgtcaaggcggatctgctgcgcctggaggaaaagatccgagaatgcgaaaacaatatgaagcatgctgatggggacgctctggaagacctgatgaagcagtacacctctctcacccatgctttcgagaccggcggcggctatctctaccgcagtgagctggtcggtgttttaaagggtcttggctttaccgaagatgaattctccaagccggttgccacgctctccggcggtcagaagacccgtgtggcgttaggacggcttctgttacaaaatccggatctgatcatcttagacgagccgaccaaccacttagatatgacctccatcgcctggttggagacttatctgctaaattacaaaggagccgttctcatcgtctcccacgaccggtatttcctggaccggatcgccgggaaagtcatcgagatcgaccagtccaaggctacaacctttatgggcaattattccgattatgccgtaaaaaaggaacagctgcgcgtcgctgcctggaatgcctatatgaaccagcagcgcgagatcaagcatcaggaagaagtcatcgaaaaattaaagtccttcaaccgggaaaagtccatcaagcgggcggaaagccgggagaaaatgctggataggatcgaggtcatcgaaaagccctccgaggtacgcacggatatgaagctgactctgacaccccggatcttaagcggcaatgatgtgctgactgtggaacatctgtccaaaagctttgactcccataagctttttgccgatgtcaatttcgagatcaagcgcggcgaacacgtggcgatcatcggtgataacggcagcggcaagaccactttgcttaagatcttaaacggtctcgtccccgcagatcagggcactttccgcctaggttccaatgttgagatcggctattacgatcaggagcatcacgtgctccacagcgagaagacattgttcgaagagatctcggacgattatccgtacctgaacaatacccagatccgtaatgtactggcggctttcctctttaccggggaggatgtgttcaagcgtatcagtgatctgagtggcggtgagcgcggacgtgtctctcttgccaagctggtactctccaacgcaaacttcctcatcctggatgagccgacgaaccacttagatatcatgtccaaggagatactggaggacgccctgaacggttacgaagggaccatattgtacgtctcccacgaccggtacttcatcaaccgtaccgcccacaggatcctggatctgacggagggacaattcgtaagttatgttggaaattatgactactatctggaaaagcacgacaccgtgatggctgccatagaagctaatgcaccgcagaatgcggatgcagatagtgctgttgctgctaaggctgcagaatccgaagtcaaactggactggaaagcccagaaagaagaacaggcaagactccgaaaaaaagaaaacgacctgaaaaaatgcgaagaaaagattgccgaactggaagcccgcatctccgagatcgacactgaaatgtccgatcccgccatcggtacccaggtggcaaagctgcaggagctgtccaaagagcagacttcctgccaggaacagttggagaaattatacgagcagtgggaagaactggcagagtaaattgaaagttacgagccatgcaaagtcaaaacgaaaacagcgatctgggagcttgctcacaagacgctgtttttgtttttgactttatacggcgacagccgtcaatgaaataaatgtggagcgtcctttgcgacacatttatgaattgagtgcatggctcgtaacgtagggctgccgtagaccggacaagttccgcctgtgccccttctttcgcctcagcgtgggcacaggagacagaaacaagctagtctgtacccttcttccgcctcaacgtgggcacaggagacaggagcaagcttctctgtacccttcttcc

SEQ ID NO: 11415 - DNA, 8119 bp, Unknown
  gut microbiota DNA sequence
aggagacaggagcaagcttctctgtacccttcttccgcctcagcgtgggcacaggagacaggagcaagcttctctgtacccttcttccgcctcagcgtgaatagtttatgggtatgggaagcttgtttcgttgccgatacccacaaacttttcatagtgtgggtatgggaagcttgttttattgctgatacccacactatgaaaaagtttgtgggtatcagaagtttgttttgttgctgatacccaaattgtgaaaactggaaggtataacaagggaattatatattccagaatgcatgcggcaagcattcgtggggtctacggcagccctacgttacgagccatgcacccaattcataaatgtgtcttacctttttaatattttgagcagcctctgcttctgcttgaaaataagcctccgtcaactgctcatactgttctttcgtcacccggaaataataaagtccggtgtcttttacatagtatgcctggtcttgcatcatttcccgtttttctgcggaatctgtattttcctcatagtatggcatcgaaacgacgtatgcagtttccccggtttgcgtttctttattaaggaattctttttccataaatcctgtcattcggaataattctccgttcggctcaaactcataataaatctgatttattccctcccggttccacctggctgcgcatgtaccgtttaatttcatccatgtggaatcaaagccattccataaattcagtcgtttcttttcctcatcataacttattacatagataaattctctctcatctgaaatacacaagtccgtaattccgtcacccgtcatatcgaataagtaataatatagctccttcatatctttggtgcaatatttcgttacgaaatgccctgttgcatcaatagtaatttcttttccttcaaaaatctcatcaaaatgaatatcgtttttcaaaagtcccaaaaaataatttttgtacttacattcccctgccgggaagcggtattcaaacgaaatatctccatactcgttttgcaacatctctacggtgtcttcctgcgcgtaggtcatttcagaaaatggcaactcccaatatccttcatacactttttctataaccggccaaagttcaccactgtacgagccgacattgcacacccaatattccttatctattcctcccgagtcattcattattaacgtcatcacattgcaatacttgtagacggtcatacctatcacttgttcatttttctctattaatgttatcatgtaattttcattttcccaatttacaaaatatggctgtgtatccgtctgccctccttgtcgtattgccagaccataatactgccatccctcattaaaaaagactaaatttgttacattttctgccttttccgtatgactgcccgatttatctacatgacttattacaatgtctgtatctgacaaggcagtatgtacttcgggatacaaattgatttgataccaagtatcccatattgatccttcatcacaataatatttcaaaaatatattatctttgctgttcataataacttttatcttttcaataacgttcaatttcctatagtttgctgctatttcgtgtagtcgatcgtctacttcatttgacaaaagcgaattgcttagatattccgtcatttcactaccaaaaaaatcttccaaatagggcgccgcttcatatgtataattactttcccatacgttatccgcgtatcctttcggcatattcgcaatgtaataaattaagttatttttttgtaaaataagaattgtacagaatattataattattgcatacaccttccatgtacgccttattttcctcatactaatccccctagtaatctgaaaaggattaattagctcataaataaatccagttttttctatatccaattctttcaaagtttattttttcttcttccagaggcccatctccatcataaagaatgcaatctctaatttttgtagtcctattaacaatactctccaaaattgtatctaattgtgatgaaatttctttttctttctgattctttagtattgcactcatcatatcattcatatccaatttacttattacatattctatattattggaaatctttattatatttccgtcttcgtgacaataagctgttccttagcatccctccacagccaccatacggtatcattctgataataatcaaataccatttcataaccggcgtccaaatatttttgttctataatttcatactcctgtaagggagaggtccacactacttctccccgaatccgtaagtccttcacagggcatgtctctttctggcattcatacaaagccgctctgttcccttcccgtaccagtattccttgcggaagttccaaattattctgcgtacaattgtctctgatccgaaatagttccccgttctctgtcaggcgggcattttcttctcctgtgtagtactctataaaaagatacaacccactgtcatcaaatctgttaaacatttctttggcatacagctttctgtttggaatggcatcatgaatttttttcacatttccttcggtatctattataaagaaaccgcttccttcctcgccaaatataatcattccatccgcccttaccatcatagagttcaaatagttttctgtggaatacagcgtatgtgaagtaaaatcgttacaatccagatattccagtgaatagtagcccgtttcttcatccatcgccttgtaatatgctctattatcatagacagcacatatttcctcctgcaaaatacagctgccccttacttttcctgtagggaaatcaattactaccgttctatattcatccacttccttatcataaagtgaatatattatacaattcttattctgtaatacatgtgcactatggtctctgaaaagatcattcatactttctctgtcttccacgggtatatagtccgtcagtttctttcctgtcaatttatattccccgtctttatatcgatactctgtatttcttaaaaaaatcacatcatcaaaaataagcagattacagtctcttctattcatataatttgtctgtgccataattttctctgattttaaactatattcttcaatatatgcgattctttgcttatattcctgcgaatttctccattcatccaatgaatataattttgcatctacaatgtcataccacatgacttcttgcaaattttcatcaacataaaagtaatcccaattaaccctataatcttcccgttgcactcccacatatattacataataatttgtattatctttttctgtttttacaaaattaatatctattgtaagattagcatttcctccacttttctgttcaatgaatgcactatatttttctatttccggaatggaatccataacaaacttttcagcagcttcttgattcactttggaaagtgccaaattttcatttgttttataggtattctcacaagctgtcaacataattactataagaattattgttatgcatacttttttcacttacatttctcctttatgcataaatcgccaaatgttctctctactatgttttctactatgttttctacaatggattgcataaatgacgactggcatatcgctaaattaatgttttttctgcccaaaatacttcttccatttttaccactggatgctctatcaagagcatccagcaataagttcaaatatgtagataacggttatgattatccaaacatttttctattttatatccttttctaaatctttatattttttttcacaaatttttaaaacatcggaagcatatccctcagttccgacattatataatcgtattgcctcctccaaactgtctgttttgttcattttgcgccttagtgtatctactcctatcgcaatacttaaaaatggagtcacattttcatattgataataataaatagtttttgatgtataatccccatcataactatttccattaccatcctcttgtgtattgaaaagcgatttcaatatagcatattcttcccgatttttcatagcatttatatcaatttcagaaagatttaattttctacgctccccccaagttgttttctccccgctttcatctatatctgttactattttaatatatctagtatcaattttaacatattcatatatgtttggatttcttacatctaaagcttgaagcacatcccttgaaatatttgcattaggactagttgatttatcatatcctattttcgattctttatacatcattgccttaataatattgggatttatctgtgtaccatactttaaattatagtatttactccagccaataatccaagaatcatatctttgataatttctttcctgatataatgttggaatatatacatctaatgcatgttctccgttcactaaatccatcatatacatttttgcataagattcactaatatttcctttcaagtactcatctaatacatataacgcattttgtttcacttgctctgtgcatgtagaattcactctccgcatacttgcttgcttaataactttctggcaatatgatggattcctttgcgtattgtccaatgcatagtcaacatttgctaagggactttgcaattcatgtagtgcgctcaaaaaagccgttgttctacgcaataattcccatttgatactttcattcatatccttagaattcattgcttgaattttttcacttaacatcttttcttctgtaatagtgagccagtttccgctcggatccgtataattcagatagctgctcacgcagtaattataccggttaagcgtcagcggttctgtctggctgcccaggtagctgtcttcggtgaggaaggtcgccgttaccacgcagtagtaccttgccctcaggtactggctctggatattcggattgtaggactctccgttataggcatattcgttctcatactgcggagccccgaaggtgatctctccggtgacgctgtaacggtaggactggtagacctgtccctcttcattggtgatgccggagacgcttcctctggcatcgtagaggtagtagccggtgctgccatcgaaccagtcaagggagatccggtcgaatccgccgtttatctccgctccgtagatataagaggtatccgtcctgccattgatgttctgctcgaccagtacctcggcatgctcacggttgacatcgtttaagtactcagtcagttcgtagttttttcccttgccttttttacatcagtatcaattatttccaatttataattcctgacatttcatcccatgaaaatattaagggttcaaaatactttgcctcaggaagtacaataaagccatcatccgacatgtaaaaagatatatttccatacagccatgtcacagaatctatctgcccgtcatcatcctccggatattctccctgcatggttctgctgtcaactatcatttccgcttccgtcattgatccataatgcaatatcctctcaggatctccctctaatataaacattcggggttcccgctcatctccatcaaagtagtgaagcaacatatttttaaatttgtctttattacctatcatatcgcttaggagcactctttcccctgtaagcatattcactacaatagcatacataaccttcccaggcaaacgccgatcctccgttccttcgtaaacaacagaaagatactgtttatactgatatattcccgcaatcgtataagggtcatcgtcatcccaaatgacatatatatgtatatctaattgtgcgcagtcaaataaccagcaggcatctttccacaaggtgtgattaattttccactgcagcctcttatccggacatccttgaatctggacatatgggatatgatagctctctccgttatctatcgaaaaattaaatgtcttttgttgaatctcatattcataacatgacaacaactgaggttcttgcgcatcgtcaacctctattgttgtttcttccgcctcagtttcatatgtattaatggtttccgattcctgactttcctcataaatctcagatttgttcgatgaacatcctattatcgatactgcaatacataagctcaacacaagtatagccacaaacttatttaccaaatatctcgtaagctttgtcatacttttcacttcgatccctccaattctttggtaatggattgctgttgtttccaactatcagctgatcatttttaattttatactcccctcctaatcttattgttgctaaatctttatctgttgcagtaaatccattaacataatactgtgtaatgaggaatatagcctccgaatttccattagcattaacataatcatttaaactgcccatgcctgtttttacgacattcgtagttgcccaaaaccatgcagcagcctctaagctataatattttgcaatataatgaactttgtccattccgaagttcaccatatcacaatctctaccaatggcttttaaaaaattttcttgcgtttgttttccagttaattgaatatatcctacacctctgtcatcaaattctaagtttgagttacctgcaacatctttaatatagcttttccaattatcttttgttaacaattcttttccattttgcattccttcaatattgtcttgtccaaaattgctttcatgcgccattgttgccataagcattgtaatacttgctttgcttgttatgccatattgattcaaggtacggttgaactttatgatataattttgtttatctcctgttatagctttccatccaaactcctcaagttgttctattgatacatgaaaaatttcacaggcataactactattttgtttatatgcttttaacataatgctttttgcatatggcatatcatgcttatagtcaaacgataatacatagtcaacagatgcttgtggagagttcagttcatgtaatgcactcaaaaatgttttggcaatataaaaatcaatcttcctattttgtttttcatttgcggatgtctgaatatatttcaccccaaattcattctgttccttttcatatatccatttcccgatcggatccgtataattcagatagctgctcacgcagtaattataccggttaagcgtcagcggttctgtctggttgccgaggtagctgtcttcggtgaggaaggtcgctgttaccacgcagtagtaccttgctctcagatactggctctgaatatttggattgtaggattctccgttataggtgtattcgttctcatactgcggagcaccgaaagtgatctctccggtgacgctgtaacggtaggactggtagacctgtccctcttcattggtgatgccggagacacttcctctggcatcgtagaggtagtagccggtgctgccattatttcctgagtttttctttcattcatcacctatgcagggatattttacctcgcctcatccaaatgcagaaaaggataaagcatacagcaaactttttttccagtaatcccccaacatcacctgtctgtggtaccgtcaccatgtgatccttactgtacacgatttccaccggtttgcttgcatagtctgtttccttctctccgttcacattctctgcaatcagataaacatgataatcggttccgcattccttattcctgtattcctctggaatcgaaaatactgctttaccgtcctgacccacattcggaatataaattgcttccccggcatcataataaccgtccgctgtaaggatgtctttctttgtgaacagaaccgatacccatgttgcattatcaatgtccgcccctgtaagtctatagggtactgtcacctgctcttctgactgtgcacttgtactttgctccggccggatttccatagccggatcgatcaatgtcagtttatatgcagcccctgtctgcccagcagttccttccacaatagaaaccataagaacatccgacagtctgacatttaatacaggacttactccacaatattcattaacaaaaaaaacaaattactacccttcttgatatagcacctgcacacataccatcattt

SEQ ID NO: 11416 - DNA, 922 bp, Unknown
  gut microbiota DNA sequence
agatgtttcagttcaccgggttccctccgtacacctatggattcagtgcacggtgactgaggtatgctcagccgggtttccccattcagaaatctacggatcaatggatatgtgctcctccccgtagcttatcgcagcttatcacgtctttcatcggctcttagtgccaaggcatccaccctgcgctctttttagcttgacctaattgcttaattaaaagcttttcacatctagcgtgatgttactttaggttttgtttcgttttgcttgtttgatcttacatctctgcaagatccctcggatgtcttgttatatcgttttgcaaacttgatataatagatttattatttcaatattcggttttcaaggaacaaactgggtagatcggttagtatctaccgactgggcttaagtggactcgaaccaccgacctcacgcttatcaggcgtgcgctctaaccggctgagctataagccctcagttaatagcctgcataccgctaggtagttcgcaatgcgatttcatcacgtgcttcgcactatctattcatgcattcatgctctcacgcaagcgagcttgcgtcgagcctgtctgcctgaataggcattgctcatggctatcgtggagataaagggattcgaacccttgaccccctgcttgcaaggcaggtgctctcccaactgagctatacccccatgggaatctggcagccacctgctctcccataccgtctccagtatagtaccatcggccgcttgggtcttaaccatcgtgttcgggatgagaacgggtgtgtcccccaagcgcatcgccaccagaagtttcttgatttacctctttggcaaatcaacagtaatgcaacccctacttcttccgtttccttagaaaggaggtgatccagccgcaccttccgatacggcta

SEQ ID NO: 11417 - DNA, 9370 bp, Unknown
  gut microbiota DNA sequence
ggacaatataccttcgctctttttttatacaataagggggaaatatgttgaaattctacgatatcgctgaagactatgtaaaatacctgcaaacaatcgacagacaaattccaaatattcattataatacaaacaataaatttgtttgtggtattgtttttgagattaaaggggtcaagtattatgcgcccatatcacacactgtaaaaaaatttcagacaagcatgctcatatatgataaaggaacgccgatttcatcgattcgtttttcatttatgctgccagcatatgatgaggtcctgatagagaaaaactttaagcaaatagcaaaggaggaccaaaattatgcgaatattttagcagcggaatacgagtactgccgccatcatgttaatgatatttacaagaaggcagaagctgtataccgaattggatgtaataagaatcatcaattaaattacacgtgttgcaatttcaaaaaactagaagaggaatacttgaaatacaaattaaaataaagaatgggataggatataatttctgccgaagataaaatggatggagcgttgtttttggaagagcaattcggagataaagagaaagatgtcatatgttgattataaagcacaaaaaggaacaatacctcaaaagtactatagagctgtggatgaaggggtagaagaatttaaaaaggaacaaaatgtttataagccgatatcgggtgatgaatccagaaataacggatgcgacgtagaggcaagttacttatgccatggaatatggacaaaagtgatgaaaaacagtgagaaaccaatgaccggaagttactttaagtggaaatccggagaagtggaaatgatatttcactttgatattatgaacaatccgagtataaaaggtaaaaaatatagttgtgggctgttcaaagaattggacgctgaattaggagagaatgtaaaggcgatatatcatacgatcggtaatatgactcccattccctggttcccattagctggcggtagttatattgatggacaaaagttacataaatcgttagacgaacgatgggatttatacttacaggtattaaaaagcaattggaaaaaatggaatccggatcctaatgggttaagttttgaaagatatatgatattaacctgtcagcaggtatattacgaagagatatatgaagatatatctaaagaaggagctaatacaaaaaatattaccgtggatactatccggaggtggaatgacagaattactccggatagcaagttaatttctttttctgacccaagggaagatataaataaaataattagtattattaaaatgagatgcagtataatccgcattatgctggaataaaagaggttagaatccttcttttttacgaactaatcttaactctcttctcttaatggcattatcccactccatgcgttccccgtcgttctctaagatcaggccgggaaccggggtgggctttccatcgtcgcccatggctaccatgacgaagtaagcccggttgatggggtgtctggtgccgtcctgctcttcgcggtaggtatccacgcgtacttccatagaggtatgtcccacgtgggtgaccttaccgatcagtacgataatatcattcaaataagcaccggatttaaaatacaggttatcgatggctacggtggtggcatccttgccgcaatgtcttctggcggtggcaccggctacttcgtcgatccattctaacagtcgtccgccgaacaagcgtccgaagccgttgatatccggatgaatgacaacatgcagctgatgagtctcggaatcggagacttttttcgcgggaagcgtttctgtctttatttctatattattttccttattatctgttgtattcatgttctataaccctctcataattattttttttcagaaaaaggatgattacacgtcaagcaaatgtagtatagcacactcctgaagaaaatgccatccgcataggatttttgcttttgggatattctattttgtgcagaaggagattctttgaagaaaggtcgctaactgccggaagcgaaactttacgaaaggggaacgggaatgctgatcagacaattattgcttatagcagcaggagccagttacggtctgctgtcggcggcgggagtgttcacggtgctggtggcggtgggactgatcccaagattcgcagggaaaacgcacacagcccgttatgtattgttgtatgaagaaatggtaatcttcgggacgctggcagggtgtttcgctactgtttttccggaatacagtcagtgggggagctttttgcaggagcggtttccggagaaaatgaggctgtggatggcaacgggggtagcggcacaggcagtctttggattattttccgggatgtttatcggatgcctggcactggctatcgcggagatgctggacagtattcctatttttgcaagaaggatttcgttccggcatggtctgggatgggcgatcttaggtatggctgcggggaaattatgcgggtccctgctgtattttgcaacagaattttacaggacggtgcaataagtatgaaacagcagttggtttatctgaaatgtgacagaaatgcggaggttcaggcacaggatgtatttttgaaggatgtagcggaggtccgttgccgggacaaagtactgtcggcaaaattaaatgccatcaaggtctgccattttccgaaagaaggagaaaaacgctgcgtgatcagctgcctgaagctggtgcgtctcatggaggaactctgtccggaaatagatgtgcaggtggtaggagagacagatgtactggtggaatggatcagtgtggatcggtacaaaggctggcggcagtggagtaaggctgcgctcgtgtgcctgatcagcttcttcgggacggcatttactattatggcataccataatgatgtggggatcaacgaagtatttaccggggtgtaccggatgtgcatgggtgcggaacccggaggaattaatacgctggaagtggcatattctgtgggactggcggcaggtattattgtgttcttcaatcatatcggaggcaggcggttgacgaaggatccgacacccgtggaagtgtctattaaaaattatgagaccgatgtggacaagacgctgatcgagcaggcgggaagagaaggcagggaaatcgagggggatagttagggaagctataagagctaaaggaagatataggaaatgtccggaatgggttgacatagtaagaggtggaggctataatcaatatcgtgatgtaataaatttgtaacaaattcgtaaaaggaatttaactgaaaggtttttatgataaaaaataagaaaaacagacagataagaataattgcaatgggaatggcactttgtgtactggcatctccgatgccggcatcggcggcagaaagcagcgttctgatggcatccggtggtgtggcgtcggttttggaaatggaacgttccctggaagaatacattcagatcgcccaggatgcgcagggagcttcctggggatatacgaatatcggtgtagccaatgtagagtccggcaatctgaatatcagagcagtgccctctacagacggtaagctggtgggtaagctgcccaaggatgctgcatgtgaagtcatcgagacgaaggacggctggtgccatatcaagtccggtgaagtggaaggctatgtaagccgggagttcttacacacaggaccggaggctacgatccgtgcggcacagctggtacatacggtggcaattgccaatacggacggactgaatgtacgccaggaacccaacacctccagcgacatcgtgacgcaggtaggacagggcgaggaaatggaatatgtggagaccggtgccgacggctgggtgaagatctccatcgatggcgaggatgcttatgtgtcccaggaatttgtcacagtggaggagaagctggatactgccattaccatgacggagctgctctacggtcagggtgtatccgatgtgcgcgtagacctggtggaatatgcgaaacagttcgtgggtaacccttacgtatggggagggaccagcctgaccaagggtgccgactgctccggttttgtactggcagtgttcaaaaaatacggtattaccctgagtcattcttccagagcgcaggcaaacgaaggtacgaagatcagcgcttcggaactgaagccgggagatctgatcttctacggtaatggcaaaggtaacattaaccacgtagcaatctatatcggcggaggacaggttattcatgccagcagtccgaagaccggtatcaagatcagcagttataaataccgtactcccgtgaaatgtgtccgggtgattcaggattgataggattcgggattgatataggatagaatttaaagtgtaaaggcattgcaacgtctggtggcgggcaatgcctttttggcatttggaaggatgcttttataattgcgtttccatgggaactgtgatactatttttatatgtctaagaaggtgccggaatgggtacagcagcaaatataatgaaacgaattgggtgatggacatgcgcaaagtagctttgatcacggacggttggagacgtctgttcacatatgccttaccggcgggaatcctgcagaggatccgggagaccggcgaggatgtcaatctgtacattttcaatagtacaggtaactggagccgggatgccggatacaacaaggcagagtacaatatttataatttgccgaacctgtccgattttgacgggattattctggaattaaataatatcagttctccttcggtgcttgcggatgtgatcagcaatgcaaagcgatcgggacggcatgtggtatccattgccaatgaactgggagatttttattatgtggggatcgataattattcggccatgaagcaggtcatcgcacatcttcatgaggtgcatgactgtaaaaagttctggctgttagtgggagcacaggataattatgagagcagctgccgcctgcagggcatgctggattatgccaaagaacataagattaagattcataaggatgatatctggtacggttcctttgattataagagcggactggaagggtataaacatctatgggaccggcacaaggagctcccggatgctgtgatctgtattaatgataatgtggcggttgctgtatgcgaagcagcagcacagatgggatttcatgcaccggacgatttccgtatcaccggatttgataattttgacaaggctggcttctacacacccagcattacaactgtgggacatatccgggaagaagctgcttaccaggggatggatatactcctgcggctctgggcaggagagaatgtacccaaatacaacttcaccgaaacggaaatgctgtggcaggagagctgtggctgtggaaagggcagcagccgggatgcgagagcgcatctgaaggatcagatcatgtacggtgtggagagcgaagaattcgatgaggaagtactctccatggaagcggaaatgatgcagtgcaatacggtggaggagatgatgtattgtatccctcaatgcattccttccctgaaatgcgatgctatgtatcttgtactggatgatcatctgaacgcttataaaaaagaggcggaaaaaagtattcacctggatgcggcaccttcggacgaaggtttttatgtacacggttatccgaggaagatgcagatgacctttgcctatgagagagaccagagactggatctggacagacaggaagtggacggaatcttccccacatttgactatccgaagccgggaaaggattttctgttcctgccgctgcatttcggagagcgcacggtggggtatgtggtcatccgtaatgcggtctatcttatggagaagcagtacttgttccagatcatgaacgcattgacccgttccatggagaatcttcataaaaaagaaatgctcgcatatatgaataaaaaattatcctcgctgtatatcatggataccctgaccggtatgtataatcggatgggataccaacagttgggagagaaagcgttccggatctcgagacggaatggtcgcagactgttgatcctgtttgtcgatctggacaggctgaaatatatcaatgatacgttcggccatgaatatggcgatatggccatctgtgcggcggccagggcattgatgcagtgcagcagccgtgatgcggtgcctgccaggaccggcggcgatgaattcgtcgtggtacagacgtatcagtccgatgaagcctcgagagatctggtttgtcggatccgcagaacactggaggcggaaggaaaagcacagaagctgccattcccgctgaccatgagtatcggaactgtagtgacggatccggacagcaatctgacttttgcggattatgtaaaacaggccgacagcctgatgtacgaagaaaaagtacagaaacgtgctgccagaaaataaaaagtgtatttacaacagaagattattgtgctatattgaaacagtatgattagccgatgctcagattacggacactccgaccttagtcttagtatcaggcgtttaaaaaacaggaggaaaaagaaatgatttctaaggaaaagaaaacagccatcatgaacgagtatgcaagaacccccggtgacaccggttcacctgaggtacaggtagcagtcctgactgcaagaatccaggagcttaccgatcatctgaaggagaaccccaaggatcatcattctcgtcgtggtatgctgaagatggtaggtcagagacgtggtcttttggattacctgaagaagaaggatatcgagagatatcgtgcattaatcgagaagcttggcttaagaaaataatgctgactggtgagcggggtctgccgattacatcggcgctccgctttctctgtgtatgtgatgacagatactctgtcattgcttttgggtaacaagcggtatggaagtgagccccgagaccgctgaaaagggtatgttgggagaaacaacatgaatttttcagtagtttcggtaatcctccagaccgtggaaatatttattaaattatttatatcgtagagtgataagagtgtcccatgaggaacacaaaagataaagtcacgtacgatggataggaggaatttatgtatcaaagttacaagatggatcttgcaggcagacctctggtggttgatatcaaccgtgtaggtaagcaggcaaacggatgtgcattcatgcactatggtgataccactgttctctgtaccgcaactgcttccgagaagcccagagacggtatcgatttcttccctctgagtgtagagtacgaagagaaaatgtacgctgtgggtaagattcccggcggcttcaataagagagagggcaaggcaagcgagaatgctattctgaccagccgtgtcatcgacagacctatgcgtcccctgttccccaaggattaccgtaacgacgtaaccctgaacaacatggtaatgagcgtagatcccgagtgccgtcccgagctggtagcaatgatcggtgctgctatcgctacctgcatttcggatattccttttgatggtccctgcgctatgacccaggtaggcatgatcgatggcgagttcatcatcaatcccaaccaggagcagtggaagaagggcgatctgaacctgaccgttgcttctaccagagagaaagtgatcatgatcgaagcaggtgctaatgagatccctgaggctaccatgatcgaagctatctacaaggctcacgaagtgaaccagaccatcatcgctttcattgacaagattgtagcagaagtcggcaagaagaagcacgagtacaccagctgtgctgttcccgctgaaatgttcgaggctatgaaggagatcgtatctcctgcggagatggaagaggcagtatttaccgatgacaagcagacccgtgaggagaacatccgcgtgatcaccgacaagctgaccgaggctttcgctgagaacgaagagtggctggctatcttaggtgaggctgtatatcagtatgagaagaagactgtccgtaagatgatcctgaaggatcacaagcgtcccgatggccgtgcgatcacccagatccgtcctctggcagcagaggtagatatcatcccccgtgtacatggttccgctatgttcacccgtggacagacacagatctgtaatgtatgtactctggcacctctgtccgagcagcagaagatcgatggtctggatgagaacgaagtaagcaagagatatatgcatcattataacttcccttcctattccgtaggtgagaccaagccttcccgcggacccggaagacgtgagatcggtcacggtgctctggctgagagagccctgatccccgtactgcccagtgaggacgagttcccttatgcaattcgtaccgtatctgagacttttgaatccaacggatccacatccatggcttccacctgtgcttcctgcatgtccctgatggcagcaggtgtacccatcaagaagatggtagcaggtatctcctgtggtctggtaaccggcgagaccgatgacgatttcgtactgttgaccgatatccagggactggaagacttcttcggagatatggactttaaggtaaccggtactaccgaaggtattactgctatccagatggatattaagatccacggtctgaccagacctatcgtagaaggcgctatcgcaagatgccgtgatgcaagactgttcatcatggatacctgcatgaagcctgcaatctctgctcccagaacagaggttggcaagtacgctcccaagatcatctccattcagatcgatcccgacagaatcggtgatgtagtaggtcagcgtggtaagaccatcaatgagatcattgcacgtaccggtgtgaagatcgatatcaccgatgacggtaaggtatctatctgcggtaccgataaggaaatgatggataaggctctggagatggtgaagatcatcaccacggacttcgaagaaggtcagatcttcaagggcaaggtagtaagcatcaaggaattcggtgcattcatcgagttcgcacccggtaaggaaggcatggtacacatctccaagatcgctaaggagagaatcaaccgtgtagaagatgtcctgacactgggcgatgtagtaactgtagtatgcctgggcaaggataagatgggaagaatcagcttctccatgaaggatgtggctcagcagtaagctgagagaaataaaaccgctgtgggcgcaagcctgcagcggtttttacgtggctcgtaacgtagggttgccgtag

SEQ ID NO: 11418 - DNA, 714 bp, Unknown
  gut microbiota DNA sequence
ggatccatccctttttctactcgatgtccatatccaatggtatagcttttgttttttttctcagccgctgttgcatagtaaggggttgctctaaattcttcaaatctcattaataactccatcacataggaaatatcataattctccaccttacactgtgcttcatttaacagaatgcaatcctcaatattagatttccctagcgcctcattctcctgcgtttgaatatagctgtcatcttccgagtcattttgtatcggtgcaggcgtaactataggagttccttcaacagtaggaataggaatatattcctccgtcttaaacaaatctctaattgcctccaaaaaacctacaattttctctacaatagccttatttccgctgggatccgtataattcagatagctgctcacgcagtaattataccggttaagcgtcagcggttctgtctggttgccgaggtagctgtcttcggtgaggaaggtcgctgttaccacacagtagtaccttgctctcagatacttgctctgaatatttggattgtaggattctccgttgtaggtgtattcgttctcatactgcggagcaccaaaggtgatctctccggtgacgctgtaacggtaggactgatagacctgtccctcttcattggtgatgccggagacacttcctctggcatcgtagaggtagtagccggtgctgccatcgaaccgg

SEQ ID NO: 11419 - DNA, 1273 bp, Unknown
  gut microbiota DNA sequence
tatactcatcccctgccctgtggccatattgatcgttgcactgcttaagattgttcaggtcaaaggtcactatgacatacccttcaaaatccttctcgtttttcacaaaataatcataagcatttcgattatataagccggtcatggaatcattcagggcaaactgttccagttcctccatcctgcgaccttttttcagccgggcaaccgtctgtctggcggattctattcccagcaccacaataaagagcaagaaagagcttctgccaaatacacctacggcgttaccggctttataatagccgcccacatctataatagcagcaaaaaatacaagcagcagtgcccctacacatgccttcagcctctgatccagctgccttctgacaattttgctgcagatgaccaccagtaggtatagaatcgtcagaatgatcaacacatgcgtcatccacaggcttctccggaactcatatatctctgttgcattcagtatatgcgtcaggacgatcaatgccagattagcattacagataattctacaaaaccagtcatccctgatctccagaaagctcttcacaaacaggatacaggacatcggcaacagcatgagcgtagcaaatgccagataagagcatccctgcctgttggccaggagcagcgttgccacatccgtctcattggccgaccatgttcccagcaggatggaaaaaatacccagatacaataaggttccgtcgatccggcttccgcagcggataacgatccaataaatactaatatacaatcctatcagtatcaccatcatgctgatgagaaaggcaggcattgcccggcgcatcaccccacgataaatattatagccgccaccgatataaaacgtcttctgccgacctgccgcttccggataacagggggtgaactgtacctgcaagctgctcacattacttgaaaacctgacaatattccaggtccagcccggggtatttccccatatgccgggcacagcatccagccggtagatcagcttcccatctgcatacaccgcaatctcctgatgtgccgaataaaacacgatcgagttcgtctcatcatcgttttgatccaatataaaatcgtacagctccctgccgtcatccaggacgctgactgcttccggcgtacatgcccgcaatgactttacctccggcacactgcctgatgtacagatcatgcacagaagcaccatagcaaataccactgatacgattataataagctttccctgttcctt

SEQ ID NO: 11420 - DNA, 403 bp, Unknown
  gut microbiota DNA sequence
ccaaaacacagaacgcccacagtggacggaatgtcatgccgcgatgtctgtcggagggcgttgatattttcttgaaaagtgctgccgctgtatcacttttcaatagaaaattcacacctggagacgcgacatcaaggcgtgatgttccgttcgccgtgggcgttcgtggggtctatggcaaccctacgttacgagccatgcacccaattcataaatgtgtcgcaaagggcgctccacatttattggcagttctccgcaatgagcctcgctattcataagattgtcagcaaaagtcgctgccaatcttatttcatatcgcggcgttcgccgcatcacggcaaaagtaaaaaccgtgatttgtgagcaagctcccaatcacggttcttattttgcctatgcgcgg

SEQ ID NO: 11421 - DNA, 1868 bp, Unknown
  gut microbiota DNA sequence
ccaactgttcacattgcatttgtatctcacaccgatggtcagggatccgtcagttaccttgatctcaggaatggcgggattctgccagtccgcataagtagtaagcttgaagggagcggttaactccctgccgtctaccagcgcatacaaatccatgtaagcatcatcggacagatcaccgccctgggagaacgcggataattcataagtgccgggttccagatccgtgaagctctgctcgatggagaaatccatatccgcacttcctgaccagaagtggaaagccacttcgccactgtgggcatctgcagcctttacctgataatcggtaggatccgtctctccggaatagttgaccgtccacatggaagtatcgctatcctcaaagcttgggttctgcacataattgatgcggtctaccgtgacagcagcggtgacttccgtaccgtcctccagtgtacccgacactgtgaaattgccgccgttttccgtatcgatcgcagcaacatcgtcggtattccagatgaccggaacctgtgcttcggaccgatcattataaataacacttaccgtatcgggcaattcaggatccgtaccgatattgcatgctaccgtaaccgcgggaatactatccacagccaggggagcggtagcaccgtatttcagatatttgaatacattcagagaggccaggggatgcccagtgaagtcaaacattgcctgattgtcccaggaacatccgccgtagtactgaccggcatccttcggatcataaccggatgcatagctgctggcccagccgctgccgtatttttcccaaaggtcggaattgtcagcatctgcgggaccgaccgggatccaggtaccttcccagtagaataccccctcagctccggcttcgctggctgccgcacagacatcccgcacttcattggcctgtccctgtacgctggcggaataaccttctgccagatcatcggttccttccacactgttggcggagccatcgccgtcttctgcggtatagcaataagcattttcagcgacatatactttcttgccataagtatcccggatatggataatggcatttttcagatcttctattgtgccgtgccagtagggatagaaggagaggcccacaatatcataatcaatttcttttacctgtaatccggtcagcagtgtatccagtttcttcatatcatcaatattcgtgtaatgtacagcaacaagaatttctttgccggaattcgctgccgcttcccggacggccttgctgcctgcggtcagaagttttctgacatttgccacatcggtctcaccggacataccgttgttgatctcgttaccgatctgtaccatacctacattcacaccggcatccagaagctgtgtcaggctttccagagtgaagttatagagagcatcggacttttcttcaatatccatgccttcccatgccttggggacgaactgcttcttggggtcggcccagaaatcggaataatggaaatcaatgcagactttcatgccatattttgtggcacgctgtcccagagcaatggcggtcgccacgtcattattgccgccgccgtaaccgttgccgttctcgtcatagggatcattccagacccggagacggatatagttcacaccggcctgtgccagtgtcataaaaacatcctgttctttcccatcaaaattataatatttcacgccgctgttctccagagccagcacggcggaagcgtccataccacggtaaaagtcatcggaaatgccgtcgaccggctcgacaaaaatggtagactcctccggcccctcaggcaggggaaaagcagtgttatctgtggtgcccacagtag

SEQ ID NO: 11422 - DNA, 40232 bp, Unknown
  gut microbiota DNA sequence
cttttagggaatcacggataaaatgaaggtactctatgatacttaggattctgacatatacacataatattacgactatgctgttcggcatcttcctgtcggctttttttctgggtgtgaagaaggacaaaacgaatgtagggaagttgttgctattggcagtgatttccgggggcttatatatggtctgcgtatctgtgctgggtccggagatggtggatcagatatacccactgatcgttcacgtgccgctattgctgatgctggtgctctattataaattcagaatattaccgtccctgatctctatcttcactgcctatctgtgctgccagtgcagtaactggatggggttgttcgtactgtcggtaacaggaaaagagtggtgctattacgcctgccgtatcgtggtgacgctggtggtattctgggtattgtgccgctatgtctgccagacgacggcgatgctgttgaccaagacgaatcgggaattactgctgattggaagtctgccgctggtgtattatatttttgactatgccacgacgaagttttccagtctgctatataccggcaacagggcggtgccggaatttctcggatttgccatctgtctgtcgtatctgatttttttgctggtgtatttccgggaatacgagatgaagagcaaggcagagcagtataatgagctgatccgtatgcagatgaattcttttcaggcggagatggacaatacaaggaaaagcgagaaaaagatgtcaatcctgcggcatgatacgagacatcatatggccgtcctgaggactctgatccagcagggagattgtgaaaaagcgctggaatatcttaatgaggtcagccagacctatgatgatactgtcattaaggcatattgtaggaatgaaatggtcaattcggtgctatctacatataatacccgatttgaggagcagaagattccctgggatacacaggtcacgatcggagaaaagcttccctgttcagaaatgatgttctgcgcgatcctgtccaatgtgctggaaaatgctatgcatgcagtacaggagctgccggagaggagacggaggattgaactgtctctgtcggagaaggcagggcatctgctgctcatggtgaaaaatccggtgcagataatgccggtattcacggatggaattccggtcacagagcgttccggacatggtctgggggttcggagtatcgtatactatgtggaaaaactcaacggacagtatcagttccggatggaagacgaggaatttgtagtccggcttatcttctgagcacactggagactttctccagtgtctttttctattgagaaaacttcttcctttcggtataatgatgtcaacaataacaggttgtttgcaggaaggagtcattgaacgaatgaaatatacactggattatcagaagtatgcggagctggcaagacgcgtggcggcagaaggaagtgtgctgctgcggaatgaagaggataccttaccgttacgcaggggacagagagtatctgtattcggaagaacacagtttgagcattacaagagcggcacaggctccggcggcatggtcaatgctccttatgtcacgaatatcattgacagcctgaaggaagacggaaccatacaggtaaatgaagcgctggagcaggtgtaccgtgagtggctgaaggagcatccctttgatgtgggagaaggctgggccatggaaccctggaatcaggaggagatgcccgtagatgaagaactggcgatgcgggcagctggacaatcggatgcagcgatcgtggtcatcggtcgtactgccggagaagataaggataacagtgcggcggagggcagctatctgctgacggctttggaggaggagctccttcgtaatgtatgtcatgcttttgagcatacgatcgtggtactgaatgtcggtaatattatagatatgaagtgggtagaccggtatcagccgcaggcagtactctatatctggcagggaggccaggagggcggcagagcctgtgtagacgttctgaccggcaaagtaaatcccggtggtaaattaagtgacacgattgcagaagatattgaagattatccttccacggaaaatttcggagatccggtggagaatttctataccgaagatatttatgtaggatatcgttattttgagacctttgcgaaagataaggtgaagtatcctttcggatttggattatcctatacgaagttccagacagagatattgggattctccgtacagggcacggcagtcacggcagttgcaaaagtaaccaatgtcgggggagtatccggcagagagaccgtgcagctgtatctggaagcacctcaggggaaattaggaaagcctctgcgccagctgactgcatttgcgaagacagaagaactgaagccgggtgagacagaagaactgctgctgaaaacagagctgacggagtatgcttcctatgatgacagtggtgtcaccgggcataaatcctgctatgtactggaagagggagactatatcttctatgccggaaccgatgtgcgaagcgcagcagaggctggcaaggcgaccctgacagagcttcgggtagtgcggatggtgacggaagcaatggcaccggtacaggagtttaagcgcctgaaacctttctttttcgaggaaaaggatcatgccattgcaaactgggaagatgtacctttacgaacgatagatctggcggacaggattcttaaggagagacctacgcagagtgagtatgcgggagaccgtggctggaagctggcggatgtatcggatggaaaaatcacattggaacagtttctgacacaattgtcggacgaagacctgatctgtatgacccgcggagagggcatgtgttccccgaaagtgactccgggtacggcagcagccttcggcggagtgacagaaggactgaagagatttgggattcctatagcctgttgttcggacggaccctccggtatccgtatggattgcggcaccatggcatatgccctgcctaacggcaccttgcttgcctgcacctttgatccggagctggtggaggagctgtatgagatggagggcatggagctgcggaagaacaagatcgatacgcttttaggacccggcatcaatatccacaggaatccattgaacggtcgtaactttgagtatttttcggaagacccgtatctcaccggtatcatggcagcagcacagctgaccggcatgggaaaatacggtgtcaccggcaccatcaagcattttgcatgtaataatcaggaattcaagcgtcatgatgccaacagtattgtatcggagagagcactgcgggagatctatctgaggggctttgagatcgcggtgaaacagggcggcgcttacagcatcatgtccacttacggtccggtgaacggactgtggacagcgggcaattatgatctcctgacgactattctccgtaaggaatggggatatcagggtattgtgatgactgactggtgggcaaagatcaacgaggagggcgagcccggctccggcagacagacgattcccatggtgcgggcacagaacgatatctatatggtcgtagcggatgcggcatccaactccgcgggggacaataccgcggaagggttggcagatggcagactgaccagagcacagcttacacggaatgcggcaaatatctgtggtttcctgttacgttccgttgctatggaacggtttctggacagagaggaagaggaatgcacggagcttcacaatccgataagcaccgagggcgcaggagagagcggacaggtgctggcacgtttggagctgccggagccgaagattttagaggacatagagcttccgttggagaagctgtccacgaaaaagggcacaagtgcggtataccagttgcgttttcctaagatcggaagatatgagctggtattccggatgagttccacgctaggagaactggcgcagctgccgatctccgtgttcctgaacaatacgttacaacagaccgtgacccttaacggcacggaaggccagaccatggaacgtgttgtaacactgcctattcgtcaggacggcgagaaatatatgaagctatatttcggagagagcggtatcgacatgcaccgcatgttcttacgttatgtgggtaagaacgatatcgaaagcttccggaatgaatgatccggtaaactttaacggaatatttatgcatagagccccaaagaatgattgacttcccctgctttttcagatacaatctactcttgtacgtttataagaaaaactaacgaggaggcaggaaaagtgatagcacagatacttgcagtagttatatttgtagcgatgtttgtcctgatcgttctggaagtatgggagagacacgttattacactgggctgcggtctgctgacgctggtgctggtattcggactgggaatgcacagtatgggtgcagtgtgggagaccttgaatttagacagcttttttacaagtcatttctggtatacggcgggacagtccgcggagacttccagcggcattaactgggagacgatcgtattcgtagcgggaatgatgatcatggtagagggaatggcgagagtcggatttttccgctggctctgcatgcgccttgctaaaatggttaagtataaggtagtgccgctgttcgtgacctttatggtattatccggtattctggcaatgttcattgacagcatcaccgtaattctgttcctggcagcagtcacgattgaactgtcacagctgttgaaattcaatccggtgcctatgatcctggcagaggtattctgtgcgaatctgggcggatccgctaccatgtgtggagatccccccaacatcatcatcggtacttccctgggatattccttcacggatttcctgaccaataccggtctgatcgcaggtatttctctggtcgtagttgtattgtatttttacctggtattccacaaggagctgcgtgccagcgaggcggcagcagtcggcagcaaccagacttacccggatccttccgaggcgattaccgataaaaagggctttatcatcagcaccgttattttcctgtgtgcagtagcattgctggtaacccatgcacagactggtctgaccgtatcctgcattggtgtgtttatcactatcgtgacgctgatcgccgcaggcagagatgccctgaagctgatcaagcagatcgactataagacgctgctgttcttcatcggattgttcatggtggtaggcggtctggagcagacaggtatcctgaaagtcatggcgaacttcatcggtgacatcagtaatggtaatctgatgctgatgatcgcgattattttgtggatctccgcaatcgccagcgcgttcgtggataatattccttttgcggcgacgatgatccctatcatcagcagtctgtccgcggcccagggtgtggatctctctatcctggcatgggcgttagccatgggaaccgatatcggtggaagcgcaactcctatcggtgcatctgcaaatgtcgtgggtatcgctaccgcagcaaaggcaggtcatatgatcaagtggggaaaatattgcaaagttatggctcctgcgactataatagtaatagtaatctccatggtaatgatctatgcgagatatctgtaagactataaggagggcagacccatgagtgaacaactgattatctccgtcagccgtgagtacggcagcggcggacatgagatcgcacagaagctggcagaatattacaagctgccaatgtacgatcataacctgttagatgaggtggctgcaagcatgaatgtgagcagcaaggagctggcagagttcgatgaaaagagacgtaacaaattcctgtacagaagtgtgatgggaatgaacagctctcctgcagataatgtggcgagaatgcagtttgactatatcaagaaaaaggcagaggcaggagaatcctttgtgatcgtaggacgctgttctgagatcgtgctgaaggataatccgaatctgatctccatcttcgtattaggagacaaagaagccaagatcgagcgtgttatgcggatctatgagctggatgcgagacatgcggaagagcgtatgatcgagaaggatcgtcgcagaaaatcttaccacaacagccattgtaaggtaaaatggggcgactcccggaactacgatctgtccatcaacagcagtagattgggtgtggaggagactgtggaatctctgaagaattacatagatgcgagaatcgctcataaatagaatgatataagataacaaaaatgcagagactgtctgtggaaaatgtacaagagaaaatcttgtggatgccgtagacagtttctttttattgccatagaaagtgtgtcttaaaaaatgccggacaacatttaagcaaatattaaggatttctgccgcgacaaatacaaaggagtgtggtattctaggagacaaataggaaagaggcttaaggaacgtaccggtgccggtatgtggaaatgaggtacaatatgagtgacagagaacgagattccattcaggagatggaagatatacagaaagggctggaagcctttttacagcaggagatgcaggaaatgcagacgtctggctccggcagtgggaagtccgggaccggaaggcggacagcagagcgtccggctccacagatgtttgacatgactgagaatgacgaggatgaggaggaactggatgtgatcggatccggaagacgagcaagagcggatgattacgcggaggattgggatgatcccgcgtatcgtaagagacaggcggctcgcagagagacgacgcgtaagacttcagcgaatcgtaatagtggtggccgtagtaacagtaatgcagatcgtcgtagacaggcggcatccgataaacctcggcgtagcagaagggaggactatgcggacgaatacgaggactacgaagatcacagagaaaaaaatcgctccggaagaaaagcagggaagcgtgaggagatagacacgaaaacggataagaagagcagaaaaggaaacaaaaaggaagccgggagcggcagaaaaaagaaaaaatccggcttcaagcgcttcctgatcgcagtggcgctgatcctcgtatttctggcagcagggttgtacgtcctggtgggcaaggtctatgccgagatgaattatgaagagatcgaatctgtgtcaagctctcccatgaaggaagaaggcgtcacgaatattctactgatcggtaacgattcccgtgagaacggggaggatggcagatccgatgccatgatcctcctgtctatcagcaataagacgaaaaagatatatatgacatctctgctccgtgatatgtatgtagagataccgggatataaggacaatcgtctgaatgcggcatattcctacggcggtgcggagctgctgatggagaccatcgagcagaattttgacattcatatcagccgctatgtgctggtgaattttgaagcatttgcaaatctggtagatgccgtgggcggcgtggatctggagctgaccggcaaggaagtggagtacgtgaacggctacctggtagaatataatatcctgctgggcagaccggagggaacggactatttcgatgacctgtccggaggtatggtgcatctgaacggaccccaggcgctggcatattgcagaaaccgttatatcggtacggatttcggcagaaccgagcgacagagaaaggtgctgacagaggtcattcataagctgcctaagggtgtactcacgaatccgaagggtctgattgacggtctgatgccgaatctgaccacgaacctgacccagacggagtgttaccggttaagcctcatggcaccgaagattctgacatacgatattatacagaacagtattcccattgaaggcacatataaggatgcgacccatcgtaaaatgtccgtgctggaggtggatttcgaggcaaataagaaattcctgcaggagaatctgtatggaacgggagacagcactgcgacagcggcttctgaaaatcaagactgatttaggagagggctaagggatttctttgtaacagagggagagtgtttatggggcagaggaaaaatcggtttgtggcactggtttgtgcggtcagtgtaatagcgcttagcggctgtggggatgatctgacacagcaggtctgtattcccggggtggaagaactggcgcagccgatcggcggttaccataccggaccgcaggacgatcagcccggggataatatcggagagatcgttctgccaggtgggacggacggtgacaatactgcattgccggaatcgggacagtccggagcttcggatactttgatgggggaacgctgcatgatcacaatctctgcggcaggggatgtgactttgggcaatcatcaggaacaggattacagctattccttccgccaggtgtacgatcaggcggaggatgagggatattttttcgagaatgtgagagatattttcaaggcggatgatatgaccatcgtgaatctcgaaggaccgttgaccacatcggaacatatgcgggaggggcagacctattgcatcaagggagatccggcatatgcccatctgctgaccttgggggatatcgaagccgtcagctttgcgaacaatcatcgactggactacggagagcagggcagccgggatacagtggcggcattagagcaggagggcattgtctatgcctatgataaaaatgtaggcatctatgagatcccggacagtgcggaagcccacggcggagagcggaatctgaagatcggcattatctccgtcaatgaagtggaatggggcgcacaggcggagaaactgattcagaataatatcgaggtcttgcgggaacagaacgtggatctgattctcgcctgttgtcactgggggatcgaaaaagacaattatccggaaaattatcagcagcagcttggcaggaaatgcattgactggggtgtggatctggtcatcggtcatcatccccatgtcctgcagggaatcgaggaatacaagggcagatatattatctacagtctggcaaatttctgcttcggagccaaccggaatccggaggacaaggacaccatgatcttccagcagacctttacttttgagaacggggaaaaggtggaggatcagaacgcccggatcattccctgtatggtaagttctgtcaaaacaaggaatgatttccgaccgacgccggcaacgggggaggataaacagaggatcctgcagcgtatgaacgaatacagcagtgctttttgtgtgacatttgatgaggacggcgggattatagtgaattgaccgatgggaaaggataggaattgccatggaaaaagcgtttaagctggactttatcaatgacaaaacaggaagtctgtatgtgaattgctgcgggtgctctcagacggaagcactgcacagcttcggaccggcatccaagccacactacctgatccactatgtcttaagcggcaaggggcatttccggttccatgacaaggaataccggctggaggccgggtacggatttctgatccagcccaacgagctggctttctatcaggcggatgcgaaggatccctggagttatctgtgggtcggatttgccgggagccgcgcggaagagtatttacatagcatgggactgtcagacaggcatcctattttttcctgtgataaatcagaggagctgtattcgattgtccgtgatatgatggaacacaatacctttggaatcgcggatgatctgcgccggaacggactgctgggagtattcctgtctgtgatcgcggacagcgccggtgtggtagccagagaggaagaggataaggggaaccagtatgtgaaaaaagcggtatcttttatccagagtaactactgtaaccctatcaaggtaacggatgtggcggattatgtgtgtatcaaccgcagctatttatatacgttgttccagaattatctgggaatgtcgcctcagcagttcctcaccaccttccgtatcaccaaggcgagagagctgctggaatccaccaattatccgattgagagtattgccctgtcctgtggatatagtgatgcgctggtatttaccaaggcgttccatgccatgaagggcatgtctccatcaaaataccgcaaggaaagccacaaagagagcacaaaagaacagctccaggaggtcgagggtctgatcgcccggctattgaaaccgtaaagaacgacattaaaaatgcccattcatattcaaatgaatgggcattttgggtgcctaggtttacacaggaattctatttatttaagttattctctacatattccaggatatagaaattatcttccggcatctggcatccgacgatatacagtccgttatcgtcggaacagcggatgatacgaccttccagctcattatgattcggcagagcaaaatcatggatcgtgataaagatttctgcatttttgctttgggtgaatatcttgtctgtagccaggaaggcgaatccgttggcactgatattttccatggtagcagcatattccgtatcggaatttttgaacttaatagtacaggtattattcagatccatacgagggtatttgcgtctattgttgatcctgggtctggtagtaatggtaatcctgaaagcatgttcaccgctttcgggagcaggagaaatggtggctttgtcccaacagtacaggatattacctgcggtgacctgcagcttacaggaagcagacccgttaacggtcagcttcttctgacaggataccagcagtccctccggaagctgctcgatcagttccccaagatattggacatcctcctgaccgaccagctgtaagtcaatcttcattccgggcttgatgtcttcaatacccatgaaaccaccgatacccagatcacacatcatgttctccatgacatcttcgatggtattgatattgtctgctgtttcctgatacttgctgagcatccgttcactggtccggctggagtgtgtgatacaggttgtgatggtatccacgatgttagatacctgttccatgttggataccagctgggtgttggagttctctacttctttaatggcattatctacaacctgaatgtgattgcccagctgcacggaatcagaagcaatctgatttacgttatctccggtctgcgttactttttccagagtgatctggatcagctttaatgtctcttcaatggaagaggtcatctttgcagaggtagcatccagtcgggagagagcatccctgatctgatcagaggaagcgtgggtctcggtgcttaaggtacggatctgatctgccacaacagcgaagcccttgccggcttctccggctctggcagcttcgatggaagcatttaatgccagcagatttgtctgattcgtgatcttctctatggtaccggtctcctgttttaccatttcgaattcctgacggaaattctccagaacattttccagctcagtagacagctgtgacatggtagcagcggtattcaccagactcttcaggtcttctgcgctgacgccggaatgggattgcgttttttcgacgagcgtgatcatttctccgatcagagctaccacattttctacctgggcgcggatatcggaggtcatctgtgtggatgacgtggtacgatcctgcagcatattgttgttgtcagtcagctcgttcatacccagcatgacgatatcggagccatgcttattctcggaagccagctctcttacgacagtgatgccatcgagaatgatattactcgaagactttacctgttctacagtagttacgactctgtgcaggtcagccctgatgctgtcggtcatggcaccgtcggattcattcagatgacggatggacatgacatagcagatgtagcagaggatgatacaggacaattgcagctgataatttttcatatcggaagcgctgttgaagcccagcatatagcgatagacggctgcaccgacgatgatcagggcattggcgataccgcagttaatcatgaattttcggttcttatatagtaccagcaggctcgtcaccggcagaatgtaagtgaaagcgatcggggaagcagtagtacagatgacaaaagtgtagaagatgccgtaaccgatgactagatcgtagcggtagagctccgttgcccagccctttacacgtaacagcacttcgccgaagatcagaggcagccagcacaatgccagaaaaataaggtaagaagtggtgggatataatcccccggacgcatcggagccatagttggcactcagtaaaacagcaaaaacgatccagatcttacgggctttccgattagctttttctttgaaaacattttcgtcgtatgtcatgatacatatcctcctttacagtcctctccggtatgttcaaaaaaatgaatcaaatggtggatcacttccctgctttccggaagctccgggtaaaaagcgctgaacgcatgggtcaggcggggatccttcgggtagttgatcagtttatggggcatctgatgtctgcgcagagccttttcaaaattcagagtataactctgaagattatcgttgtcactggtgatcaggagactgggtggcaggctggtcacgatgtccgggtgctccggagatacatagggggcaaaagcactttttttataatgccggccgtagagatatctggggaggaaaagtccgatctgatccaggcggttcgtatagaacattccgctgaccaggccaagtgcccggactggcaggtcagaaggggttactccggcagcctgtgccagtgcagtgcttcgctgcatggcgattccataagtcagcagacaggcaccgccgctgtcgccgcaggcatatatgtgggaaatgtcaccgccgtattccgtcagatgatcccggataaaatccagtgccagatgcagatcagccagctggtcatagaagagacagtccggtatcagccggtactcaatgctgaataccagataccccgcctcacaaagggaggcacaaaagggacgattgaactccttgttccccatgaggaggcctccgccatgtacgttgacgatgaccgggagaatctctccgtcccgtcccctgggacggtagacatccagacgatgggccggaacatgcttctcatcatagaaaatatccgattgtaggaaaacgtcttcaggaagaggatactctttgcccctggaagcgtagctttgctcgaatgccgcccgctgcttatagaatatttgacatataaagcttttcatgtgtactcctgattctgactgtatatgtttcaataaaagagaaatatttgtcgaaaaaaagcgatatgcagtctttaaaagaataccacagaaatgaatagattaaaatagaaaatgcaacattctattatggaatgttgcattttgtcttgcactacatatttcggctgaccatgggaaaactttagccttttttataaaaaatcgttaatacgttattttcatatcactatagcaattacagaagccgcatgtcatagctgtatgtcacgaaatacggcatctttgtcatcctgttcaattcccagataatgttttgtgatctgaaaagaagaatgattgtagatttccatcagcaatgcgggtggtgttcccattttccatgcatggtagccgaaggtcttccgcagggaatggcaccggatcacatcttcgatccctacggcttctgcagccttacggacaatgcggtaggcctggtatcgggagagcggggaatcagcttttctgggactggggaagaggtagtctgtgtcggctatggaagtctgtgtttttcggtaggacagtaatgtttcctgaagttctctgttgatcaggattctggtttctttttccgtttttttctccgtgatcaggagatgggtgtaaaagcggctgtgttctgtgcaatagacatctccccaggtgagatgaaggatgtcgttgatgcggagagcggtgttcagaccgatcaggatgagagtgtaattccgggagttgggctgtttggtaaggtagtactctttgaaatcgtgtagaagctgtttgctgcggataggttgtgtcgtgctcataatggcctccttgatggaataaatgaattaggaaaatgcaacattccataataaaatgttgcatcagtgcaaaccagcaggcaaggaaggctgaataaaaacagggaggttatcaattatgctgcgtctgaccgttagtccggaagaatacctgatgatcaatgacaatatcaagatcgtgttcctgggaggaaccaagaatcatcttcgcatcatgatcgatgcaccgaaagaggtgaacatcgtgcgaagcacggtattagagaaccagatcacagatccggaggagagagcgaagcttcccaaatattatgcggaagaggagcacccggagaaataccgcaaaaaatctaatgtgatcatcacaaagggaaatgcggacaaataatttcatatggtaataaccggaggaagagcggctctgtcagggcccgacagggaagctcctactccggttactataaaaactaaaaacaagtatctgggagaaaaggatttctcaataacaatacagatacgcacactgccgcaaaaggaattgggcagtaatacaaggaggtaaattattatggtagtacaacacaatcttacagctatgaactctaacagaatgttaggattaaccaccgcttctcaggcaaagtccaccgagaaactgtcttccggttacaagatcaaccgtgcagctgatgatgcagcaggcctgtccatcagtgagaagatgagaaagcagatcagaggtctgacacaggcttccctgaacgcacaggatggtatttccgcagtacagaccgctgaaggtgctctgaacgaagttcaggacatgctgcagagaatgaacgaactggctgtaaagtctgcaaacggtactaattctgagacagatagaacttatattcagaatgaaattgatcagttaacaacggaaattgatcgtgtatctgaaactacgaagtttaatgaaacctatctgctgaagggtgataagtctggcgataaggcgaccaatttccagtacaaggaagtagaagtaaccaatcaggatctttactatgtagaaaatggtaaagttaatactttgaaaaaaggttcctacaaatctgctgtagatattgcaaatcatgattattataccagcaaagatggtgtacaggttggtcagaaaattaccgctgcagagcatgatacatacgcagaaactactaaagtaaacgtgattactgaagatgtatataccaaagatacatcaactggaaatttcgtttctgcaaaaggtactgtaaaggatgcaacgggcaccacaaaatactacactttgactaaaggaacggatggcttgtacgaagcagctgaaaaagcggatccaaccgctgaagagtatgataaggtaaaggctggagctaccgtatacgacaaagatggtaatgaatacaaagaaggtagcttagttaaggatattacgaagtactatgcatctattaaaccaggaatcttggcaggtgatagtaaagtaacagatgttgctaaagttactaccaagggaacaacacagtttactgataaagatggtaatgaaatagctgcaaatggtcttggtaattacattaacaatgatggaactcttaaggctaactccggtctttacattaatggaaaccttgcaacacaggatgatgttgctaagatggttgatttttctaaaacctttgatacgggagctttaacacttaaacttcatgttggtgcagatgcaactgacaataatcagatttccttaaagattgataccatgagtgctgatggactgggtgtaaagaacctgaaagttgatggtgcggatgatactaatgccaagaatgcagttgaaacaatcaaggaagctatccagaaagtatccactcagcgttccgcacttggtgctgttcagaacagacttgagcacaccatcaacaacctggacaacgtagttgagaataccaccagcgcagagagccagatccgtgataccgatatggctactgagatggttaagtactccaacaacaacatcctggctcaggcaggtcaggctatgttggctcagtctaaccagtccaaccagggcgtactgtctctgttacagtaatctctgtaaaaggttcataactaacgtaatacaagagaagccggtgctgatgcaccggcttcttttaatgttacatcttccaaattaatttcataggaatctcatagtataagcgttttttattttgtcaaaaatggaaaaaaagaatgcaaaacataagagttcatgttaaattttattcagaagaattttattaaaatcagtttgaataaattgtttttaataaatatcgtgcaatgtgagattgattcgttggcgatatggcatatataacatatactaaaggataaataatatttgacattataggaaggatggcagagaatgaaaaccttaaatgaaatgctttctgaggaaatgaagaatgacgaattccgaaaagagcatgaggcaattcaaccggaacttgatgtgatcagagctatggtggatgcaaggaattctcagatatctcaattgtaaataatattattgacagtagttcggctgaccgatatattaataaataggagggaagcagatgataattaatgatttacttgaaaaagaaaaaatgtcgaggtatcgcttgagcaaggaaagcggagttgcaatgacaacaattactgatatctgtaatggaaaagcagaccttgataaatgcacagcaggaactctgcataaaatcgccaaggtgcttaatgtaacggtagactcaatattggaaaataatagtgcagataatatagattatagatgttcgtttgaaacatttaaaagtaatacatgccatcatgtaaaggatatgggtgatatagattttattatcgaaacacttgagacggatgaagtaagaaagctttatgaacgcagatggtgcagagaagctatgtatctactggctatgattgattacttgtccaggatgaacgatttacctctttgtacaaattataatgatattcgttcccagaagcttgaaaaattatatttttctgcaggtgttgaagcggcatatgcagcgacgggagatgaacgtataaaagaaaaggcacttgcaaatgcgataccggaatttatacgatttaatattgtagaaaatgaggtgcgaaatatctgctgataaaagagaaaaagagaaataattttcccttgcatctcccccataaatagtataaaaaagccccagtgttgcaaacaaaatattacaataaaacgcacaacggggtgcatgccgggaggcatgcgccttttttgagtcagccctgaattttatgcacggtacctgagtcccttacgccgcaggattgatatccgctgtcggcatcttcgtaggttagagagcagcaagcaatgctttctccgacgaaggtgttttgagtggaaaacgaaagcttttgttgaaactgctaaaaggtaagtggtagaattatttggtgtttttcgtcttattgggaggggcaaattgatttgttacgataaattatggttaatgatgaaacaaattaagccaataattgaaagtaatgatttttcagattatgaatccaatgtaactgacccggaaatactgaaagtgctttcggattatcggattaaacgagagaatgctgagaaagagatgggcagtcctaaattatgaaagtggtgaagtaaatggaattggagcttagcatagaagatttattaaataagcgaagagtggaatctgataggatcgaatttaaagcatcgtggaatccggatgatatttatcatagcatttgtgcatttgccaatgattttgacaatgttggtggcggatatgttttgattggtgtcgaggagaaaaacggtgttgcagttcgcccggtaaagggtttggaagaatatgagttggataccatacaaaaggaacttttgggttataataatacaatgattccggcatattttccacgtgtgatcattgaacaagttgatgggaaaaatgttgttgtattgtgggtgacacctggagtgcaaagaccgtataaggcaccagagcatgttactgctaagaaggataaaaagtattattactatatacggtatgcgacaagctcggttcgtgcaaatgcggagcaggaacgagaattaattaatatgacaaactacgcaccgtttgacacgaggcctaattttgaggctacagagtcagacatatcggttgcgttgttaacggaccatctcaatacaaccaaaagcaagctggcaaagcagattggaaaacgtggtgttatggaagtgcttggagacatgcagcttcttgtaggaccaccggagcagctatgtatatctaatgcggcactgatgatgttttgtgagcatttggacaaattctttccatatacgcaggttgaaattacaaaatttccggaaggtagcattaaaaatccaaataattttattgaagtgccggttatcaaaggctctgtgccgacaatgattaaaagaactatggaaaagctacaggacatggtgattgaggaaaaggtcacgaaagtagattatcagatggaagccattcgccggtacagctatccgtatcaggcgttagaggaagctgtggtcaatgctttttatcatcgtgattatcaatcctatcaggcaataatcatagagattgaaccagattgtgttcgaattattagttatccaggtattgaccgttcaatctcgcaaaagacaattgctgagggagaacgattcaaatctcgatattatagaaacaaacgattgggagaatttttgaaggagttagatttgacagaaggaaaatctacaggaattcctactatacaagaggaacttagagataatggttctcctaaagcgacatttgaaacggatgatgaaagaagagcagttactgttgagatacctattcatccggatttcttaatggaacaaggtgaaccccaaaatgaaccccaaaatgaaccccaaaatgcgacatcagtggaggatgctattttgcagttgatacgaatgaataagtatgtaacacgagaggaaatggcgagtcagatagaggtttcactcagtacggttaaacgttcaataaataaattgaagactagtggaataatcgaatatgaaggcccgagtaaaggcggatattggagtataaagtgagcaggaaaataaagatactttagtgggatttcaggaaaagtatccgggagtgcttaatggcgataatcttgctgatgttttgaaagcagcaagagcaaagaagcaagagaaaaaagagaagtaattttcccttgcatctcatctgtaaatagtataaaataaacccagtgttgcaaacaaaatattacaataaaacgcacaatggggtgcatgccgggaggcatgcgcccttttttacgtcagccctgaattttatgcacggcacatgagtcccttatgccgcaggattgatatccgctttcggtacgttcggagaggctgccggtgcattcgttgcatccggcgcgcccgtggcttccggcgtagccttaggctttgccttctccagggatgcctttaccgcttccagcagcaccagcgaagtatatctggtctctgcggaataggtgatctgctccggatcctgcatttcacagagctggtcattcagggattccatggtggactcgagcagtggatacatggtagtaagtgtttcgcttggatcggcgaggctgacggatgtgatggcgtggtcgctcacgatgacttccacattgacggtctcattgccgaggatcagctccgtggtatagattccggggatatatgtattgccggtatcggcaacggccccggtggagacatccgccacattgtccggcatttcggcagtagcagtatcgtcaggggaatccggtgtcccgtaggaggcatccgtatccttgcccggcagcaacagcattaacagtaatatgacaaacaacacccccagcgcggcgaagattccggtatagagcagttcttttctgcgaagtacgacgatctttgtatttgcactcattcttaagtctccttggaatgatgggatgatctttataaatagtatgcgcaggacctcccacgtagtaccgtaaatgaggagaacttcgcattgacaagacaaaacaggcattgctatagttagtgtaagtatttttcacggatgcgtccgccccgtggaaaaggagcagacaggcggcgcagaaacgagggtaacgatgaacaattataccaaggaagatatcatccgtcttgtggaagaagaggatgtggaattcatccgtctgcagttcacggatctgtttggcaatctgaaaaatattgcagtgacagccagtcagctggatcgtgtactgaacaataaatgcatgttcgacggctccgccatcgacggcttcgtccggatcgaggaatccgatatgtatctgtatccggatctgtctacgctggagatcttcccctggagaccccagcagggcaaggtggcgcgtatgatctgtgatgtctatcgccccaacggccagccttttgaaggcgatccccgctatgtgctgaagcgtgcggtacagcaggctgaggatatgggatatacgttcgaggtaggtcccgaatgtgaatttttcctgttcaataccgatgaaaataccatgcctacgaccaacacccacgaacaggccggatatttcgacatcggaccgttagatttcggtgagaatgcccgtcgtgacatcgtcatgaacctggaggatatgggattcgtcatagaggcatcccatcatgagatggctccggcgcagcatgagatcgatttcaaatacgatgaagcgttacatactgcggacaatatcatgacgttcaagatggcagtgcgtaccatcgcaagacgccacggtctgcacgcaacatttatgccgaagccgaagttcggcgtcaacggttccggtatgcacatcaatatgtctttgcagaaagacggtaaaaatattttccaggatgcatccgatcctaacggtctgagtaaggaagcttattatttcatcggtggtatcatgaagcatatcaaaggaatggcagcgatcacgaatccgctggtgaattcctataagcgcctggtacccggcttcgaggcaccggtctatatcgcatggagcacaacgaaccgcagccccctgatccgtattccggctaccgcagacggagagggtacccgtatcgagctgcgcagtcccgattccgcagcaaacccttatctgacgctggcagtctgcttaagcgccggcttacagggcatccgggagaagatcctgccccccgagagcatcaatgcgaacatttttgcactgaccgccaaagagcggaaagagctgaacatcgaccagctgccgggcactttgctggaggcagtggaagaactggagaaggatacctttatccaggatgtcttaggcgaccatattgccggaaaatacatcgatgccaagcgcaaggaatggcatgagtaccgctcccaggtatccgaatgggagattcaggagtatctgtataagtattgataaaatcctttcttttgtaatgaatgagtaaaaacacagaagaaaggaggtgggcgaatgacgaacattattgtcgtgctgccgaagctggaagaagccaagggagtcaaaagtatcctggtccgcagcggcttccaggtcacgggtatctgtactacgggtacccaggcgatcagccaggcggacggactgaatgacggaattgtgatctgcagttataagctggcggatatgatatatacagaacttcatgagaatctgccggagggctttgagatgctgctgatggcatcccagaatctgatcagcgaatgctacggcaacggcatcgtatgcctctccatgccgttaaaggtgcaggacctgatcaataccgtgaacctgatggtagaaggtgtggagcgccgcagaagaaaacggcgcatgcagccgaagacccgcaatgcagcggatgaaaaagcgatcaaagatgccaaggagcttttgatggcaagaaatcatatgacggaagaagaagcccaccggtatcttcagaagaccagtatggacagtgggacgaatctggtggagacggcacagatggtgctgtcgatgatgacagagtaacaacaggaggaacagcaatacatgaaatttacgaaaatgcagggctgtggcaatgattatgtatatgtcaacggctttacggaaaagctttcaccgcaggagaagcctgagatcgtaagaaagttaagtgacaggcatttcggtatcggcggagacggtgtgatcttcattaatccggcagaggaagcggatttcgagatggagatgtacaatgcggacggcagccgctcggagatgtgtggcaacggtatccgctgcgtggcaaaatacgtctacgataagggattgacggaccgggaagacattaccatcgtcagtgccgggaaaataaaatacctgaaacttaccgtggagggcaggaccgccacggacagagggtgtgtaacactggtacaggtgaacatgggacagccggtcctggcacctatggaggtaccggtgatagcggaagcgacacagcagacctcggtggggccagccgtagtggatgcaccgatcacggtggacggcgaggaataccgtatgacctgtgtctccatgggcaatccccatgccattgtatttatgaacggggtaaaggatctcgacattgagaagatcggaccgaagttcgagcaccattcctgcttccccaaccggaccaataccgaatttgtagaaattctggatcggaaaaatgtgtttatgcgcgtctgggagagaggtaccggggagacgcttgcctgcggcaccggatgctgcgctacggcggtggcgtgcgtgctgaatggtttgacggacgatgaaatcacggttaaattattaggcggtgaattgcacatcagatgggatcggaaggcgaacctggtctacatgacaggacctgcgaagatcgtatttgagggtgaggtcgacccggactccatcgactgatatagaaaaggacaatagagaggagaacgtactatgtttaaagtaaacgacaactatttaaaacttcccggaagctatttattttccaccatcggtaaaaaggtaaatgcgtattccgcagcacacccggataagaagatcatccgtctgggaatcggagatgtgacgcagcctctggcacctgccatcattgatgcactgcacggtgcggtggatgagatgggaaaagcggagacttttcatggttacgctcccgaccttggctatgagttcctgcgcaatgcgatcgccgaaaatgattataaggcaagaggctgcgatattgcgccggacgagatttttgtatccgacggagcaaaatgtgactgtggcaatattcaggagatcttcagcctggacaataagatcgcggtatgtgaccccgtttacccggtatacgtggactctaacgttatggcaggcagaaccggcacttacgatccgaagtccgagacctggagtgatgtgatctatatgccctgtctggcagagaacggattcgcacccgagctgccgaaggagaccccggatctgatctatttatgcttccccaacaaccctaccggtgccaccattaccaaagcgcagctgcaggagtgggtggactatgccaataaagtaggtgctgtcattctgtatgatgcggcttatgaagcatatatttccgagccggatgtgcctcacagtatctatgaatgtgaaggggccagaacctgtgccatcgagttccgttccttctccaaaaatgccggctttaccggagtgcgtctgggcttcaccgtgatccccaaggatttaaagagcggggatgtcagtctccatgcactgtgggcgagaagacacggcaccaaatacaacggagcaccctacatcgtacagcgtgccggtgaagccgtatattctgcggcaggtaaggcacagctgaagaagcaggttgcttattacatgaacaacgcacattatatcctgaacggcttaaaagaagcgggatttaccgtatccggcggtgtgaacgctccctatatctggctgaaggcgccgaacggcatgaccagctgggagttcttcgattatctgttagagaatgtcaacgtggtaggtacccccggttccggattcggaccaagcggtgagcattacttccgcctgacggctttcggaagctacgagaataccgtagaggcagtggaccgtctgaagaagatccggctgtaggagaaaaaattttatttccgggcataccggctccggtactggcgcggtgtcatgccggtctttttacggaagatctgtgagaaataagactgcgaagaaaaaccgacactggtggctacctgcgctaccgacagattggaggataccagaagctctttacaggcttccagcctccggtctgtcaggtaattgatcggagactgtccgacacattcggtaaaggagtgtgccagatagaatttgttgatatgcgtgatctccgccagggaatccaaagtaatgttctgggaataattggagtcgatatagcgtttcgccagagcacattccttggataattggaaggaggagtcggagatgacagacaggttctgcttccgggaaatatataccaggagcacctgaagcagtccgtgacatacctgttcaaaaccgggaagcttgtcgcggaattcctgcatcatcagctgggcaaagttgatgaactgttttttatcagatccgtagctgtagaagctgtagcccttcgggttgtcctgccccgcaccggaaaaggaaaatgcgagcccttccacaccgaatacgatatattccatgggatcgttgggaagggttttctccgtgtgctctacataagggttgatgatgaccagatcgtccgtcttcacaggcaccttttcattctctatatagaaggctccctcgccccgcaggacatagaacagttctgaaaagtgatgtgtatgcggaagggactgccagtcaccttcgtatttggagatggagatgtaacgcagctggaactgttccggagaactgtttgcggagccgatattgataaattcattactcataaatagataccttctttatcttatttttattgtgcactttttcaaatctatcgtattttttatattaaatatataaaaagaacaacatttcacaaaaacattcgtaaaaaagacgaaaaattaaaaatatgtatgatctggataagcatattatacataatcatttcaaaaaatccactattttagtaacaaaatagcaataaacataataaaacaagcaacaaagaaattgatatcaggtccggaagccgatatactttagtcatcagctacaagatagtacaaaagcgatggggaggaaaccatgcgatgacaggaagactgacgctgccgactgatgcagacatcattgacgaaacaatacggttaaaaaatcttctgggcgcagacgcgttaagagactgtgacggaaccgagatgccggaagcacttttgtcagagccggtgaagaaatatgcgacttattataccacgagaaaggataatgcgtgggcgatgaagcatccggaggagatccagcaggaatacctgatcagcaaccgcatcaccgccagaggggaaacactccgcatccgtctgatggaaggcttccatacggagcagcttaaggtcaacacgctggacgatccgaagcgttggtgggaagtgatcgacagaacgaccggtgaggtagtgccgacggatgcatgggaatttgatgaggcatccggtgaagtggagatccgtacgatcccctatcatgagtatacggtaagcttcctggcatttctgatctgggatccggtgcacatgtacaatttcatcacgaatgactggaaggatacaccgcatcagctgacttacgatgtgagacagcccaagaccaaacagtatgtgaaagacaagctgagaaaatggtgtgaggacaatcctcatatcgacgtggtccgcttcactacatttttccatcaattcacactgaccttcgatgacaagaagcgtgaaaaatatgtagagtggttcggatacagcgcaagtgtgagcccctatatcctggaacagtttgaaaaatgggcaggctacaaattccgcccggagtacattgtggatcagggatatcacaactgcatgttccgcgttcccagcagacagttcctggatttcatagagttccagcagatcgaggtatgtgcgctggcgaaggagctggtagacattgtacattcttatggcaaggaagcgatgatgttccttggagatcattggatcggaacagagccctacggtaaatatttcgcaggcatcggactggatgcagtggtaggctctgtcggaagcggtgtgacactccgcatgatctcggatatcaagggagtggattataccgaaggacggctgctgccttactttttcccggatgtgttctgcgagggcggtgacccgatcggagaggcaagggataactggcgtaaagcaaggcgtgcattactcaggtctcccctggacaggatcggatatggcggttatctgaagctggcaagtaattggcccggtttcattgatgaaatacaaaatgtagtaacacagtttcgggagatccatgaaaatatgcaggggacagcttcctatgtggcacctttcaaggtggcgatcctgaactgctggggcagtcagagaaggtggatgtccaatcaggtacatcatgcgatctggcacagggaaacctattctgcagagggagtactggaatgcttaagcggaatgccttttgaggtcgagttcatttcctttgatgatgtcaggaatggcatccctgaggaaatcaaggtcatcattaatgtcggggatgcgtacaccgcattcagcggcgcggagaattggatcgacgaaaaggtcctgaccaatatcagacgctttgtggatcagggaggcggcttcatcggtgtgggtgagcctaccgcttatcagtatcagggaagatatttccaattgtccgatgtgctcggtgtagaccgcgagatgtgcttctctctcagcacggacaaatacaatgagaaaaatgacgatcactttatcttagaggatattgaaggagccttggatttcggtgagggcaccagccgcgtctatgcacagggcggacattatcagatcctcgcgatggatggggaatacagccagctggtagtcaatgaatatggcagaggacacagtgtatattttgcaggtcttccgtattctccccagaactgcagacttctgcttcgggcaatctattatgcagccggcatggaacaggagatgaaacgttactatgtaacgaatgtggataccgaagtaacggtattccagaagaccggcaagatcgcagtgatcaacaactcagcacaggcacagcacacagagctgtatatcaaaggaaaatgtgcgtatgtgctggatctgaagcccggcgaaatgcgttgggtggacgatatggaagacaggtaacttatggaaggcaaaaagcgtttcatattttataaggtagtactttacaagtataaggaggttatttaagatgaaaaagaaagtattaagcgtgctcttagtagcggcaatggctatgtccatgctgaccggatgtggcagcaagcctgccggcaatgatgcgcagagcgcagcatccagcgaggcatccaaggaaacagaggcagcagcagaaacacctgcttccgcagaagacgagacactgactgtatggtgttgggaccctaacttcaatgtctatgcaatgaagcaggcagagaaggcataccaggtggatcatcctaacttcaagttagacatccaggagaaggtatatagcgatatcgagacagctctgatcacagcggctgaagccggtgattacagcactttacctgatatcttcctgatgcaggattattccttccacaaaaatgcaaccaattatcccggaatcttcacagcactggatgactgcggaattgatttctcccagttctctatgggtaagctggctgactccactgtagatggcacacattatggtattccttttgataatggtgctaccatcatggcgatccgttccgatatggtagaagcagcaggccttaaggtagaagatttcaaggataccacatggtctgagttcatggagctgtctaagaaggtaatggctgcgaacgatgttcccatgctgacctgctccggtggttctgagatcgtgatcgaaatgttacagtctgcaggcgcttctcctatggtagatggcaaagtatccctggtagacaacaaagcgctgaagaaagcgatcgagacctacaagcagctgatcgatgaaggaatcatggctgattataccgactgggatcagtacattgcttccatgaacaagggtactgctgcaggcgttatccagggctgctggatcatgtcctccattcaggcggcagaggatcaggcaggcaaatgggcaatcgtaaacatgcctaagttagatgatgtagaaggcgcaaccaactacgctaactgcggtggtgcaagctgggcagtatcttctaactgcaaaaataccgatctggcatttgatttcctgaacgctacctttggtgcggatgtagacttatacgatgatctgctggtaaatgcaggagcgatcgcaagttacctgcccgcagcacagtctgagacctataatgagggcaatgagttctacggcggtcaggcagtgtacaaggatatcgtagagttcgccggacatgttcccggaattgactacggtgcatactactctgacatcagaagcgcactgacagatgcgatcaccaacgttgtccagaagaatgccgatatcgatacagagatcaaaaacgctcaggataccgtagagtttaatatcgctgaataatcaccagagtatggaaactggatagtaccgggggtgcagcagtgcgttcccggtactgttgtaggagagaaacatggaaaagaagaaagcaaaattaagtttggaaaaaaggcataatctgactggatgggcattcctgctcccggcatcgattttaatatttgtattttgtttctatccgatgtcacaggccatccttctttctttccggaagacaggaggagtctttaatggtgtagcgaattatgccaggatcttcaaggataaaacattccagcaatgcctgttcaataccttcttttattttgtgattcaggtaccgatcatgcttgtgcttgcactcatgctggcacagctgctgaataatcctaagataaaagggaaaggtattttccgcactttgatctttcttccgtgtgcaacgtcactggtatcttattccatgatatttaagtcattgtttgctccggatggagtggtcaacagagtgctgatggccatcggactgtcttcagtggactggtttcagagcacatggccggcgcgctgggtcattgtgatcgcgctgatctggagatggaccggatataatatggtattctatctggcaggattacagaatatcgactattctgtgtatgaggcaagctacatcgacggagcgacaccgttccagcagtttatgaagatcacgataccgttgttaaagccgaccattctgatgacggcgatcatgtctacttcgggaacactgcagctgttcgatgagtctatgaacctgacagcaggcggtcccggaaaatctacaatgacattggcgcattacatctacaatatctcctttgtggagacaccgaaatttaattatgcggcagcgttgtctgtatgcatacttgtgatggtagcggttctgtctgcaattcagatgaaggtgggtgacaaacgtgactaaattcaaacaaataatttcctacgcgatcttagtgatagcaagttttctgtcggcatttccgctgtattatatgctgtgcggtgcgaccaaccagagtattgatgtggtaagaggacggctgatcccgggtacctatctgatcgagaatttcaagaccctggtcgacatgcagaatctgggacttgcgatgtttaactccttccgcaatgcgatcgtgatcacggttgtgacactgctgatctgttccattgccggctatggatttgagatctatcatgataagggcaaggatattctgatgagtattctgctgctggcaatgatgcttccgttcgtagcgatcatgatccccctgttcaagatgtttacctcctggaagctggtaaacacctggatcgcactggcactgccatccatctcgacaccgtttatgatcatgcttttcagacaggcggcacgttctttccctcatgatattatcgaggctgccagactggagggtctgagcgaaatacagattttcttccggatgttcattccggtgatgaaatctacctatggagcggcgatgacggttacatttatgaatgcgtggaacaattatctgtggccgacgatcattttacaggacagcaaggcgatcaccatgccgatgttagtagccaatctgaagagtggatacagtgtggattatggtatgctgatgctgggagtattgatctgtacacttcctacagcgatcatcttcctgtgtttacagaagagctttgcaaatggaattacgggagcagtgaaataatgcaacagaaaatgccaaaacaggaaactatgacacaggcgcatatcaggaaggctcagggagccttccttttggcgcatagaatgggcctgatcgaggatccctccatggagggactaaaggccagacgtaagaagcacaacgaagagctgcggagaatggaacaggaaggacagcgcttctacggaccgcattatttttccgcaccggcgtatctgcaatatgagctgacccgcctgaagctggattttgtacagccgtgtgagaaggtccgggaaggcggcttctgcccggatttcacggagcaggagaaacgggatttttacgaacagaacagagatctgttcggacgctatcatggggatcattttacctatgaggaggtgtcacagatcattgagaaacggttacgggaggatgcatatgacaagcttatccgcgacatattatgtgagtcagagaacaggcagtgatgaaaatgacggacggacgtgcagtacggcgtttgccagtctgtctgccattcatcaaagaagcctgcagccgggagaccgtgtcctgctggagcggggcagtgtgttttacggacaatatctgcatgtgacagacagcggtacgaaagaggcaccgatcgtgatcggagcatacggcacagcagatgcaccgccgcggatcgatgcctgcggacaggggatctggtatcaggattatgggactccgctggattcgcctacgcatgtgtatcacggctatgtatcttctgcagtgcttttgtacgatgcagagcatattgtggtcgaggatctggagatcacgaatgaaggcagcatgatcccgggagagcgctatagcctgggtgagaaaatgaaccgtaccggtgtggctgtggtggctaaggacaaaggggtacggagcggcatcacacttaggaatctgtggatccatgatgtccatgggaatgtctacgataagcacatgaacaacggtgggatctatatgacagcgctccgtccggaatgtgaggaactgacgggtgtggcacggtatcgggatatcgttattgaaggatgcttcgtgcaccgggtcagccgctggggaattgcagcaggctatacttatgcccatgataagttccggggagcagagcttaaggaagacgtttttctgaactatgggcatgaaaatatgcagatacggaataattatgtaaaagaggccggtggggatgggatcacgccgatgtatgccctgcgtcctctggtggagcataatatggcagactctgtggcctgcgagatcaatgacaggatctattgcgagccgggcgaccggatgggaaaagtggcagccgggatctggccctggaaatgcaaggacgccctgtttcgctataatgaagtcacagacaccagactcaatcaggacggcatggcatatgatgcggattccggggacggaacggtgtatgaatctaattacagcaggcagaatgagggcggatgtgtgatgttctgtctgcaggaggcgatccataataccttccgcgataatatcagctatgatgatctcggtggtacgatcagcccgtcagagaatccggatgccctgcttcaggacaatgtatactatgtgcgcaggggtgttccctttgtacgtaaaaatatggacggaggcagctttacacaggtgaatgaccgggttgttgagctggactttgctccggacaaataaaaacagatatggtgataaatggtttgacggacgagaaaagaactgttaaactattatgtgcggctgcttagagagaagcagccgctttttgccataaaaggagcagggaaaacatgtgggaaaaacagaaaaagatcatacaatggagcagtcttgcactgatcctgctgacagggatcattgtatggcgggtcaattatgagattgattttatgatggacgatgaatggtattccacgttgttgtatgcggatacgccgatccgcaatctcggggatattgtccatgcgcagatctggcattattttaactggggcggcagaagcatggctcacgcgctgctgcagatgatcctgttaaccggtgagagctgggcggatattctgaacacggcaatgacgtttatcctggcgtggctgctctgccaggctgccggcagagttcgtatgccatattattttgcggcactgggaatgctgtttggactgaatgccaactggaaaatgagcatgttctgggaagcgggtgcagcgaattatctgtacatgacaggatttatcctggcgtttctgctctgctatctgaaatatgaggagaagaatctgtgggggatcacggtctggatccttccgctgggactgatcgctggctggagcaatgaaaatatggggccgacggtctggatcttaagcctggtggtaatgctgctccgccgcagagaacaaaaaaagattccggtatggatgtatctgggaaatatcagctgcctcgcgggaagcattctgatgatcgtggcaccggggaattttgtccgcagcggggagacggcggagagcacccggggaatactgtggaacctctatctgcgctgctacagcgaggcaagaggagcattggaatatctgtttcccgcgttgctgcttacggcggttgtccttgtgatatgcaaggggattttaaaagaaaaaataggaagagataacgtactgcttttgctgggagcactgttgtcgtggggagcaatgatattgtcgccccattatccggacagagcaagctttggaacaatggcactgttgctctgcgtgatattgtctctggcgggaaaagcggtggacaggcagaaggaaaatgcctggatgtattacagctgtgcgatgctggtatggctgaggggcatgtattatcttgcggaattcctgggattatgctggggatggatcggataaggacaggcggaacagtctgcacagattagatagattaagatagatggaataaggaaggagccggagcatgggcgaaagtatattgaaactgcagcagatccggaaatcttttgatcatacggaagtattaaagggagtggacctggaggtggcacagggcgagtttattacgctgttaggagcctccggatgcggcaagaccaccacactccggatcattgcgggactggagctgccggattccggaagtgtgatcctggagggaagagacattacggactgggaacccaataagcgggacgtgaatacggttttccaaaattacgcattgtttccgcatatgaatgtggcggataatgtaggatacggactgaagatccgtaaagtgccgaaagcagagatcgcagagcgggtgaagcaggccctgcggctggtacagctggaagaatacggaaaacgtatgccggatcagctgtccggtggccagaggcagcggattgccatcgcaagagctgtgatcaacgaaccgaaagtattgctgttagatgagccgctgggtgcactggatctgaaactgcgcaggcagatgcagctggaactgaagcggctgcagaaacagctgggtatcacgtttatttatattacccatgatcaggaagaagccattaatatgtcggaccgcatcggtgtcatgcacgaaggggtactggaacagctggggactccgaatgaggtatactatcagcccaggaccagctatgtggcggattttgtgggcaatgcgaatattctgcatctgggagccgagacgctggcgatccgtacggagaacattctgatgaatggggaagagggctgtgtccatgaggcatccgtggtggaaaaaagctttgccggcggacaactgcggatcctgttccgcttgcctgacggacagcttctgacagccagccgctatgggatcgatcatgatctgcagccgggacagacggtaaagatcgggtgggatgcgaaaaatgctgtgaaggtaatagacaatgatgaagacgaaaaaaagtagcggcaggcgggatgccgggaatataggactgctcatacccatgtatgtgttcactgtgctgttcgtggcgctgccgatcctgtatatgttcctgctgagctttttacagcgtgcgcaggtctggggtgtggattttacatttacactggataattacaaacgcatattggaaccgttgtatctgaatacttttctgcaatctctgaagctggcattcacgtccacactgctcgtggcgctgatcggctacccttatgggtattttatggcacagatgaatgcggtatggaagcgcagaatgctgctgcttatcatgatcccgttctggaccagtgggctgatccgcctgtatggctggatcatcgtgttccgcagtaacggtgtactggataagattttgatgggactgcatctgacggatcagccgctaaagctgctctacacttatccggcagtcgtagtgggcatggtatatgctctgctgccttttatgatcctggcagtgtattccagtgcggagaaactggatcattctctggtggaagcctccagggatctgggagcatcctcatggaaagcgttttggacagtcagcttccggctgaccctgcctggacttttgtccggagtggttctttcttttatcccatccatgggtctgttcttcatcgcggatattctgggaggcaataagatcgttctggtgggaagtgtgatccaggagcagatcaccaagggacgtaaccagccttttgcggcggcactgtcagctgtactgatggtactgacttccgtgatgatccgcctgtatcgtaagattaccggaacctcgcagttagaagggatgctataagtatgaagaagaaaaaatggccctttatttatgtggctgtgatcacgatcctgacctatattccgatcctgttaacagtggtgtattcttttaatgcctccaaactgacctctgtgtgggaaggcttttccctgaagtggtaccgggaattattccgggacagagatctgggagaagcactgattaacagcctgatcctggcggtgctcagttgtactttcgctgtgctgatcggtacctcgggtgcactgggaatgagccgcaggaagagaaaactgaatgaggctgtggcttatgtgtctaccctgccgatcatgatcccggagatcattctgggtatggtatttttgtccgtattttccctgatgggtctgccattcggtatggtcacgctggtgatcgcccatactacattttgcgtgccgtatatttttacgatggtaagggcgaggctggtgggaatggaccattccctggaagaagcggccttggacctgggagcgtcggaatggcaggtattccgggacgtgatacttccgcagatcctgccggcgatcctgtcgggagtactgctggcatttgccatgtcttttgatgatgtggtgatcagcatatttgtcaccggaccgaaggtcaatactctgccggtgaagatttatacgaaattgaagaccggtgtgacaccggagatcaacgcacttgcaacagtcatgctgcttgtgatattgttgtgtctgataggtgcgtatttactgggacgtaaatgtcaggcacccgcaggagaaatacccggagaaaaatgatcgggggactgcccacgatcatcatggaaaaatagaataggatgcagaaatctgcatcgaggaggagattatgaagaaaaaactggcaatgctgttggcagcgaccatgctggtcatgctgtttaccggctgtggcgcaggcgggaaagaggataagggagaactgaatctctatacctgggatggcatgttccctcaggagattctggatggttttgaaaaagagaccggtatccggatccattattccaactttgattatgatgaagacatgctggcaaagctggaggagaccaagggcggcgattacgatctggtcattgcggatgactatatcatcgagctggcgattcaggaaggtttggtgcagaagctggatacttccaggatcagcacttacgataatctgaaccctgtatttatgtcccagttctatgatccgcagaatgaatatacggtaccttacggtgcgggcattccgctgatcgtgtacgatccgggactgacggatgtgaagattacgggatatgaagatctgtggaatccggaattagaaaacaatgtagcactgactgcaaattaccgtgtcattgacggaattaccctaaagaccatgggagaatcctttaacacagaggatctggatgtgatccgggcagcaggagataagctgctgactttggctcccaacatccgtgtgatcaatgataataatacgcaggattatctgatcagcggtgaagtggcagcagcatttttgtatacctctcaggtatcaacagctctacaggccagaccggacctggaggtggtatatccgaaggaaggtctcggattcggtatcatggcggggttcgttcctgcgaaggcacccaatgcggatgcggcatatgcatttttagattatatcaaccagccggaaaatgcggcaaaatgttttgaatatatcggttattactgcacaaataaagctgcggaagagtatatttccgaggatatgaagaaaatgatcgtactgccggaagatgctgcggagggcgagatcgtgcagaatatctcccaggaggcagaggatctgcatgcggagatctggaatcagttcaaaaatgcatgcaactaaccttccgttcagcccgcgccattcgctgaatggatgaaaaaagttcttgacagatttctttcgtgcgcatattataaacctaagttgaaaaactattttgtaaatgctatgaaagagactcttgccaagggaaacgacaggaatacagcgtcaccgactgagagcgctgtttgcggaagctggcgaagggaacactccggagcaggtgatctgaactgcagaatatcacatgcagctaggatgacacgttgcacgcgttaagtgacaagagtggataggcaaaggcgcctgtcaattcgggtggtaccacggattagatgattcgtcccgggatatgttttaacatgtcccggggctttttgtattcaaaaataagctgtacagggagcgcacattcgggacactatataacaggaggtgcgatatgtacagagatttaacaatgaaagagatcagtgaacagcagatcggacagactttgcaggtggcaggctgggtggagaacatccgtgaccatggcggcgtatcctttatcgatctgcgggatatgtacggtgtattacaggtggtcatccgtaagtcggagcttttaaagggcatcaccaaggaaatgtgcctgtccataaccggtctcatggagcacagagacgaagagacctacaacccgaagattccttccggcaccatcgaactggaagcacacaagatcgatgtgctgggaagagtatataaacagcttcctttcgagatccagacgtctaaagagatccgggaagatgtgagattaaaatatcgttatcttgatcttagaaatgcaaaagtaaaggacaacattgtatttcgttccaaggtgatcagttatctgcgccagaagatgacggacatgggatttttggagatccagaccccgatcctgtgtgcttcttctcccgagggtgccagagactatattgttcccagcagaaaatttaaaggaaaattctatgcgctgccccaggcaccgcagcaatataagcagctgctcatggcttccggttttgataaatatttccagatcgctccctgcttccgtgatgaggatgccagagcagacagatctcccggagagttctatcagctggatttcgagatgagcttcgtgactcaggaggatgtcttcaaggtaggcgaggaagtattgcatgacacctttgtaaagtttgctcccgaaggcagcaggatcaccgagacaccgttccccatcatcagttacaaacaggcaatgctggagttcggctgtgacaagccggatctgcgcaatcctttgagaattatggatgtgacggagtttttccagagatgtacgtttaaaccttttatcggcagaaccgtccgtgccatcaaagtacatgcggagatgtccaaaggcttccatgagaagctgttaagctttgcgacttctcttggtatgggtggacttggttatctcgaagtggcagaggatatgagctacaagggccccattgataaatttatccccgaagagatgaagggagaactggcagaaatggcaggactttctgccggagataccatcttcttcattgcggacaaagaggataaggcgaactactatgcaggtcatatccgtaccgagctgggcgagaagctggatctgatcgagaaggatgcttaccgtttctgctatgtgaacgatttcccgatgtttgagctggatcccgagacgaagcagatcggattcacccacaatccgttctctatgccccagggcggcctggaagcattgaatactatggatccgctggagatcctggcttatcagtacgacatcgtatgcaacggcgtggaactgtcctccggcgcagtacgtaaccatgacatcgagatcatgaaaaaagcttttgccatcgcaggttatgacgaagagacattaaagaccaagtttggagcactgtatcaggcgttccagttcggagcaccccctcatgcgggaatggctcccggtgtggatcgtatgatcatgctgcttcggaacgaggataacatccgtgaggtgatcgctttccccatgaacggcaatgcacaggatctgatgtgcggggctcccggcgaagtgacggagcagcagctgcgtgaggtacacattaaagtgagagattagtgcggaaagaacttccgggcactcagagcagagactttttcgtgaagaagctcggagggtacgtgtaaatttgtggctgtacagggtact

SEQ ID NO: 11423 - DNA, 3970 bp, Unknown
  gut microbiota DNA sequence
ggagattagtatggcgaacgtgatcagtgacgagaccatagagtatgtaggcattctggcgaagctggagctctctgaagaggagaaggaagcagcgaaaaaggatatgggcagaatgctggactatatcgacaaactaggcgaactggatactaccggtgtggaacctatgtcccatgtatttccggttcagaatgtcttccgtgaggatgtggtgaccaatggggatgagagtgaacagacactggccaatgcacccggcgagaaggacaacatgtttgttgtaccaaagacatttgattagggtgttaaaaaaggagaatggatatggatattttatccctgacagcagtagagctggcaaaggcgatccgggaaagtaagactacggcggtggaagcgacgcaggccgttctggatgagatcgcagccggtgaggatacctaccactgctatgtgaccgtagaacgggacaaagcattacagcaggcagcggaagtacaaaagaaaatcgaagcgggagaattgacaggccccctggccggtgttcctttcgctatcaaagataatatgtgtaccgagggaacactgaccacctgctcttctaaaattttagagaattttattccaaccttcagcgcagaggcagtgctgaatctggaaaaggcaggggcagttattctgggtaagaccaacatggatgagttcgctatgggaagtaccacagagacttcctattacggtgtgacgagaaatccgagaaacccggagcatgttcccggaggttcttccggcggttccgcggcggcagtagcagcgcaggaatgttttgcggcactgggctcagacaccggcggctccatcagacagcccgcatcctattgcggggtggtcggtatgaaacccacctatggaacggtatcccgttacggactgatcgcttatggttcctctctggatcagatcggaccgctgaccaaggatgtgacagactgtgccactgtgctggagacgatcacttcccatgatcccaaagactctacttccatgaaacgggaggatacggattttacctctgcgctggtagcggatgtgaaaggaatgaagatcggtattcccagagactattttggagaaggactggatcccgaggtcagggatgcggtactggcagcagcggaagtgttgaaagcgcagggggcagaagcggaggagttcgacttaagtctggtagactatgcgatccccacttattatacgatcgcggctgcagaggcaagttccaatctcgagcgtttcgacggtgtaaaatacggttaccgtgcacaggatgcggaggacctgcacaccatgtacaagagaagccgttcgcagggctttggccccgaggtgaagcgtcgtatcatgctgggatcctttgtattaagctccggttattatgatgcttattacctgaaggcactccgtgtaaaagcactgatcaaaaaagcttttgatgaagcttttgcaaaatacgatgtgatcttaggaccggtggcacctaccacggcaccgaagctgggcagcagtctggcggatcccatcaagatgtatttaggagacatctacaccatctccatcaacctggcgggactgcccggtatcagcgttccctgcggtacggattccaagggcctgcctatcggcatgcagctcatcggtgactgcttcaaagagaagacactgatccgtgcagcgtatacctatgagcagagcgtgaagtagaacaacggaaaatatacacatatataaagtaacaatgcagatacggaaaggtatttattatggcaaaacaatatgaaacagtgatcggtctggaagttcatgtagagcttgccacgaagacgaaaatattctgcggctgttccacagcgttcggtggcagacccaacacccatacctgcccggtatgtaccggtatgccgggatctcttcccgtgctgaataaacaggtggtagaatatgcggtggcagtaggacttgcgacgaattgtaccatcacacagtattgtaaatttgacagaaaaaattatttctatcccgataaccctcaaaactatcagatttcccagctgtatctacccatctgtaggaatggctcggtggagatcgaggtggcaggagaggacggcaacacctatacaaagccggtgcgtatccacgagatccacatggaggaggatgccggtaaactggtgcatgacgactgggaagattgcacactggtggactacaaccgttccggcgtgcctctgatcgagatcgtatcggagccggatatgcgcagcgcggaggaagtcattgcctatttggaaaaattacgtctgctgatccagtatctgggagcgtccgactgtaagcttcaggaaggctccatgcgtgccgatgtcaatctgtccgtgagagaagtgggagcggaaaagttcggaacccgtaccgagatgaagaacctgaattccttcaaggccatcgccagagccattcagggagagcgggagcggcagatcgatctgctggaggccagcaaagaggtcattcaggagaccagacgctgggatgataataaggaatattcctatgcgatgcgttccaaggaggatgcacaggattatcgttacttcccggatcctgatctggtaccggtctatatcagtgatgagtggctggaaagcatccgcagcaaacagccggaattccgcaccgagaagatgaagcgttacaaggaagaatacgatattccggaatatgatatcgatatcatcaccggttccaagcatctggcagatatcttcgaagcttccgtggcactgggaagccagcccaagaaggtgtccaactggctgatggtggagactatgcgcctgttaaaagaaaaagagatggagccggaggatatccgtttctcaccggagcatctgagcaggctgatcgcgctggtagatggcaaggttatcaactcttctgtagcaaaagaagtattccaggtgatgtttgaggaagatgtagatcccgaacagtatgtggaggagaagggactgaagaccgtcaatgacgaaggtgcattgcgtaaagtcgtggaggaagtcattgccgcgaacccgcagtctgtggaggattaccacaacggcaaagaaaaagccatcggcttcctggtaggtcagaccatgaaggcaatgaaaggcaaggcagatcccgccagcgtcaaccagatgctgaaggaactgctgtgaattgagagttagtgaagaagccacgaacgcccacggcgaacggaatgtccttcctcgatgtgaggtctcccggtgggaattttctaacgaaaagtgagtagcggttctaagccgtacgggcacggctccagttgccatccatggcaacatccgcctgtcgcgaacgtcctgttcgctccaccctgtctttcaacacttttcgagaaaatattaccacctcccgacaaacatcttcggaaggacattccgtccaccgtggcgttctgtgttttgggtctatacagaaaaactgagttgtgagatacaaaattcgctgcaaataacgcataaaaagctgaatatgggtctatagggaaaaaactggctctgagatactcattttgaagaaattgagtatctagaaagcaaatttttcgctatagacccatattgtctagtttttgttttttacccgtccccaaaagtacctacagggaaatttatcttctatagacccatgaagtttttcaaaaaacattagcccgcagttagggggagctgtttgcatgtgtttcctacttttttgcacatacctaattcttgtttttgaattattcgcatgtatttcttgatttttcgcacatactagattcttgtttttaatttccgcacatgtattctcaaatgctctgcctaaataattgggatgtttttcataaccc

SEQ ID NO: 11424 - DNA, 578 bp, Unknown
  gut microbiota DNA sequence
cttgtcgttccagcctgtgaggtcaactttgtgtgtcttatatctgccgcttggcaagcgtatgcgctcgccgttttcgtcaaggtcatattcctttttggacttcgccgcccatgcgccgcgctcgtcaagggggcgcatggtaagcatgatatgacaatgggggttgccgctgtcagtgtcgtgaatggcaaagtcaacgcacattcctctggaaacaaattgagaggaacagtattcccggacaagccggatctgttcctctctggataattctatggggagtgctgcgtcaatctctctggcaagctgggcgttcccggctttctcgtaaagctccacactgttccatagggtagcgcggtcagagaaagagggcggggcatggggcggcaataggatttccgtatggacaacgccgcgcttgcgggtgtagtcatgggtcattccgtcccactcgtttgtgattttctcgccgcttcggtaggcggctgcggcaacggctgatttgcccttgccccggctgacaatgctgatattacaatgatagatggctatgggtatcacctcccggatag

SEQ ID NO: 11425 - DNA, 409 bp, Unknown
  gut microbiota DNA sequence
agtcatccgggtggtatttcactaactctcaatttacaccatttcaatagaagtaactttatatcccagcttctccacagcctcgcgcagttcctcttcggggatgtccgcgccgagttttacgatcgcttcgcccttcttgaagcttgccttggcattgacctgggccataccgttgagggcattctcaatgcggttctggcagtttgcgcaggacattccttcgatctgaagttttttcgttgctacgatggtgtctaagtgtttcggcttgatcttcacatcgccgcctccgccgcagcatccgccttctcccttaaagtgctttttggatcccagtaatgctgccacgactactattactaatataccgcaaataatataggttcccatattttcacgctcctat

SEQ ID NO: 11426 - DNA, 2047 bp, Unknown
  gut microbiota DNA sequence
attttcaaaatcgcctctacgaggcttcctttttgctgcaatatctgtcaaaatttcatgcagattcgtattatcctgccacccatataaataaaaccggtgcagggtacacacgatccatccagatctcctgcccccacaccggttttttacttatttctaattatttctaattttttctaatttctagcatacctgttccgcacactcgcacggtctgatcgtcacgttactcaccctctggtctacgaggtatccacacgacttgagtcccgcccggatcacggaattccatttttttgctgaaagatgatgtatcgaaccgtcatccagctcaatggtacaggcattttccatcatacaattttcagagtaagctaccttatacatgttcttacggctgatggcaccgatctcctccaggagattgaccatgcggtatacggttgcaactcccagcttgtcatcctcttccaatgcccggtagaagatttccttacagctggagcattcattctggaggataatatcaatcagccgaagtcgctgcttcgtaatacggcagcctttttctttcagcttggtcaatatgatctctctctgcattttcgtggtctgatagcttacctgttccttagtgtccacaatgacctccgcagtggctgcaatcgccaccgcactgaatggattttccattctttttgtcttttatcattttgcggacaatcaatgcgactacaccggccagtatcgccaatacaactacggttcccatagactgcctccttactcttattttacttatgcaaccttcctgctgtcaaccttcagagtggtgctctccttgtaaggacggaagagcagataaatgaagccgatgatcagaaggaatgctactacagtgccgataccgaaagcaccggtggtgatcagcgtaccgatctgatatacacacagggataccacatatgccagaccgcactgatatccgatagcgatccagaaccatctggtattgttcatctcacgcttgatcgcacccatagctgcgaagcaaggtgcgcacagcaggttgaatgccaggaatgcatagccgcttgctacagtgaaggtagctgccatgttagcatatacggaaccctcgcctgcgctgtagaggatacccatagtacctacgatgttctcctttgctaccagaccggtgatggatgcaacagttgcctgccagttaccgaagccctgagggatgaagatccatgccaggcactgaccgatcttgcccaggatactcatatcgatctcatcctcagccagcatgcggaagccgtcctcggtgaatccgaaataagtagtaaaccatacaacgatggtggacagaaggatgatggtacctgccttcttaatgaaggaccagccacgctcccacatgctgcgcagtaccgtacctacggtaggccagtggtaagcgggaagctccataacgaaaggagcgggatcgccctcgaagatcttggtcttcttcaggataataccggagcagatgattgctgcgattcccaggaagtatgcggaaggagcaacccatgctgcgccgccgaagatagcacctgctaccatggcgatgaaaggaagcttagcaccacaaggaataaatgtggtagtcataatcgtcatcttacggtctctgtcgttctcgatggtacgggaagccatgataccgggaacaccacatccggaaccgatcagcataggaatgaaggatttaccggacagaccgaacttacggaagatacggtccatgatgaaggcgatacgtgccatataaccacaggactccaggaatgccaggaagataaacagtaccagcatctggggtacgaaaccaagcactgcaccgacaccggctacaataccgtcaaggatcagacctttcagccagtcagcacatccgatcgcatccagaccgctctctaacagtgcaggtacgccgggtacccagataccgtagtctgcgggatcgggagcttctgcaccgtctgctgcgtat

SEQ ID NO: 11427 - DNA, 7315 bp, Unknown
  gut microbiota DNA sequence
atgactgcttccactggttccgtttcctgcacctgctccacaaccgtttcctctgcttgtacagagatgggattaattcccattcctgacagcaccatagctcctgccagcagcagtgctatcagtcgttttctttcctttctgcctttactaccaaacattttccatacctccgttcactccggttataagcgtatacaatgtaaacgcttacaacgctatgtactatatactagcactgtctggtcacaatatcaaatccattttgtgcagattgattatttttggaagtatttcatagattgtttgagcaatttttagttattattttttcgctggttactgattttcgtaaaaatgcacagtttttatattttgtttctatttttataaagtaaacgctttcaatataaaaaatttgaatatagatcaataaaataggttgtcttttcagacaacccataaccatctctctattttattccacgccccgcaacacaactttccccacatattttcggacgaattccgccatctgttccagttcctcccgcgagaaagcaccgaacagttccgcatcgcccggcttatcagcattgctttctgctgtctgtgtcatccggtacaggcatttatcattctcctgataactctgcaagtagtatgcaggacacccttcgatccatctgccgatctccttaaattctcccacggtatgaatcccctttaccacagtagttcggaattcatagggaattccgctgcttttcaggataccgatactctcctcaatgcgagagatatccatatgtggcagtcccgccgcccgagcataattatccctggaagccttaatatccatcgccacataatcgatcaggtgctcctgtaacaattcccacaatactcctggcatatacccgttggtatccagcttaatgggatactccagctccttgatcttttgcaggaacttgcgaagatcccgctgcagagtcggctctccgccggtgatacagacaccctggaggatcccctgcctttttttcagataagcaagcacttcctcctccggaacagacggctggcatccaggatccagtaccagttccccattgtggcaaaacggacagcgaaaattgcagcctcctgtaaaaacagtggctgcaatatgttccggataatctaataaagttgtcttgttaaaaccatgtatttccatacagcattcccttcgtccccatagggactgtatgactctttcttacgtcctcgatatcgtagaatcccggatcaccagttctccgtcgaatacacagtgctggtgtttcgcttttttcccgataatgtcaaacagaatccgggcggtctctctcgccatgctgtctaccggctgttttaaagtcgtcaatgacgggataacatatttcccgatttccacaccatcaaagcctgtcagggaaatatcttccggtaccctgtatccggcatcagacaatgcttttccagcaccgattgccagcatatcggagattgcgaagatcgccgtgcacggaatctgcttctccaggaattccttcgtcaccatgtagccattctccagggagtaatcctcaaggtcactcctcatgggcaggatcagttcttcccttacttctattccgttatccttcaacgcctttttatagccttccaaacgcaacttaccgatggaagcatccgttttgcgggcacagacgatcgcaatatccttatgcccattcttacacagatagtccaccatcttgtagctttctttggtatcatccacggtcacggaagaataggtattacggctgaatccctttggcagcattccggtagtactcaagataaacggtacatgaagctgtgccagtttttcctcgctgtgaaccagataaccaccgagaaaaataatgccccgaagccttttttcctttacaagcttcagtgccacctccacttcatcatcgtcataatcgacatgctgcaaaaccatggagtaggacttttccttgatctcttcttccaataccttgatcatctggctgaagaaagagttattaatacctttgaccagtactgcaattgccttggcatcctgacgcttcaggtttctggcactgttgttgggtacgtagttattctctttgatcacccgcatgatcgtttctttggtctcaggattgatgtccgggtggttatttatggcacgggataccgtgctgacgccgacaccgcagattctggcaatgtctctgatcgtgatttcctccatggaatgcaaacctttctaagcctacagacttatctgccgtacagcttcgtcatgctgcggatccgccctgcaagctcctttgtaaaatctccgttccccattctccacatccagttggtgccaagcgtggaaggaatgttgatgcgggcctccgatcccaaaccgagataatcctgcatgggaatgatcgccatatccgctacgctggacattgcggcacgcacgaattcccagggaatctgctctctgggaatcggctctccgtccgcatttttcagacgcagatagtcgtcacagagctttttgtcagctcccttcaaggtgtcataccaccccatcacagtatcattatcatgagttcctgtatatactacgcaattatgtgtataattatgcggcaaataatcactttcctcacgggaatcaaaagcaaactgcaaaattttcatacctggataaccggatttcttcactaattctatcacagatggtgttaaaaagccaaggtcttctgcaataacttctttttctcccaatttttccttcatggcacggaaaatatcgtatcccggaccctgttcccagtgaccgtgctccgcagtgggttccccatagggaatcgcataataagcatcgaatccacggaaatgatcgatacgtaccacatcatagcgctcaaagcaggctgccagccgctgcatccaccaggcataaccggtctctttgtgatgttcccagttatacagaggattgccccacagctgtccggtggcagaaaatgcatcgggagggcatcccgctactgctaccggctcacaatcctcgtcaaactggaacagctccgggttcgcccaggcatctgagctgtcaaatgccacataaatgggaatatccccgataatcttgatgccgttatcgttggcataggtctttagtttctcccactgtacctggaacagatactgctggaactggtaaaaagcgatctctctcgcatattttctgcgatatttgtccatagccgcaggagttctcagtttgatatcatcctcccaggctgcccaacagataccacggaagccgtccttgactgccatatataatgcataatcctccagccagtatgcattcttctgtacaaactcctgaaatcttgcatcttcttcaatatgactattatcaaacgcttcttttagcaggcggaagcgactcttgtagattttaccgtagtccacggaatgaatgtcggtaccgaaatcataagcattgcactgctcagcggtcacatagcctctcgccaccagatcctcaggatcgatgaaataaggattccctgcaaaggtggagaaggactggtaaggagaatctccatagctggtcggacctaacggcagaatctgccagtatgcctgaccggcttcttttaatctgtcaataaatttgtatgcttctttggaaaagcagccgattccgtatttggaaggcagactgctcaccggcagcaggattccactttttctcataacataaatctcccgttgtaactttttcgtttaacccttaactgctccggctaccacgccttcgatgatgtacttctgacaggtcagatagaagacgatgatagggataacagacaataccaacagtgccatcatggcacccagatcctttgcaccgtaagagcctaccaggtattgtactacaaccgggatggttttgtaattagtactcagaccgattaccagatagggcagcaaatagtcgttccagatccacatagcgttcagaatcgctactgtgatagcagtcggcttcaggatcggcattacgacgccgaagaaagtctgcagcggattacagccgtcgatcatggctgcctcttcgatgtctaacggaatagatttgataaatccgcagaacataaatacggacagaccagatccgaagcccagatacagaagcaccattccgggagggttatttaagtgagtcatattcgccagcttagacatcgtgaacataaccatctggaaaggtacgatcatggaaaatacaaacatataatacaatacgttggtcacaccggtttttactctggtcaggtaataagcggtcatggaagtaaacagaatgatcgctgccacagaaaataccgtgataaaagcagaccatccgaaggctgtgaagaaacctgttttttcaataccgttcacatagttggtaagccctgcaaaagtctctgcggtaggcagtgcgaaaggattgttactgatgaacagttttcccttaaaggagttgatcagcacgaagaaaataggggtcaaaaatgcaactaccagcacatacaggatacaaaaaatgatcacattagaagtttttttcttagtcattattgctctacctccttacgtctggtaagtaccagctgtcccagggcaatgactgccactacaatgaagaacagtactgctttggcctgaccaacaccttcaaatccgcttctgccatagaaggtattgtagatatccagagccagcatagctgtctttttgctgggtgctccagccgtcaatgcaaggttctggtcgaacagcttaaagctgttggacacggtgaggaacaaacatatggtaatagatggcataaccatcggaattttcactttgaataatgtctgtaacgaagtagctccatcgatctctgctgcttcgatcagatccgtaggtacattctgcagtccggctacataaatgatcatcatataaccgatcatctgccagttcatcagaatgatcagaccccagaatccataggtcggattcgccaccagtgttgtctcgtattttaacaatactgcgttgatcatctgctgccagatatatcccaaaatgataccgccgatcaggttcggcatgaaaaatactgtacggaacaggttggttcctttgatctttctcgtcaatgccagtgccaaaatgaaggcaaacacattaatggtgacaatggacactacggagaattttagagtaaatccaaatgcgttgacaaaatctttgtccgcaaaaattttaatgtaattatataagcctacaaattgcgcgtttgtaattgtcttaaatttgcaaaaggacagatatacgcccatgacaaacggtatgataaaagcaaaggaaaacgcgatcagggtaggcagtacaaaaatgggaaaatatctttttaatgtcttttgcataagcctgtctccttttttacaaacacaggggccgtggtaccaccaccgccccctgtgtctgaagttatataagatggattaagttattgtctttttgtcgatggagcttagttagctgcggttgcggccttttcagctgcccatctttcaactacggttgtctttacagtatcccagtcgatggaaccggaagcatactccagaagagctgcgccgaagtcatccttgaactgctggctagggaaggaagtgaagttccatgatacagatgtcttggaggtatctgccatgtaacgaagaacttcctgtgccagaggatcggtgggcttttcgtcatcgctaaaggtattgaaaggagcgatgaatccaaggtcgttggttactgctgccttaccggtctcagaagagaacagccattcaacgaatgcgatagatgctgcctgatcctcagcagaagcttccttgttgatgcagaagaagttctcagtaccggtgcacagtccctggttctcttcaccttcaactcctgtatagataggaaggaacttaacatcctcagccttaacggtgttaccttctacgccattgatctggctccaaccccagttaccgttctgtaccattgctgcctgacccagagcgaactcagccatggagtcgtctacagacttgcttcccagcaggccgggtgctgtgcaggagttgttgatgtacagatcgaaaatgttcttgaagttatcggagtaagtgaactccaggttatcggtatcggtgatacccttgtccttgaactcgtagtatacagggatgttagccagatgagtctgccatctccagtcttcaccgggagtcagggatgtggaagcgaatacgccttcaatgcccagctcatctttcttagcctgcatatcttctacaacctcttttaacttagcgaagttgttgatctcatccatgcttgctgccttagcgccatccagtgcgaagtacttctgcatgatagcgtcgttataaatgataccataaccctctactacgtaagggattccgtatacaccaccgtcttcgccggtgattgccaggctcttatccattaaccagctgtacaggtctgtatcctttaagtctgcacagtagtctttccagttctgataaccgataggtccgttgatctggaacagggtaggtgcttccttgttagcgatctcagacatcagggtctgctcataagtaccacttgctgcggttacaacctttacaggaacaccggtctcctcggtatattccttagccaacttctgccatacttcgtcaacttcaggcttgaagttcaggtagtatacagatccgtctgcagctgctgtcgtttcaacaacttcggtggttgctgcatctgtcttgctgtcggtagcaggggtggtagctgctgcatcaccggagtttccacaaccggtcagcatggaagctgccattactgcacaaagtaatacgcttgccaatttcttcttcataatcttacctctcctttatgtttgtacgggtcatttcataattttttcatgttcccgtaagtgtttcggaatcggtatcggtattgttaccggtaacgtttccgttgctgtaattagaagatagcacattcacgaatcagttgcaagagatttcctgtaatttatcggaagtttgtatattgttgtcaaatccgcagcatcgtttttgtgcatttttaccgcataatgaagtattgcaaaatgcttatggataattttaattgttctgtg

SEQ ID NO: 11428 - DNA, 18530 bp, Unknown
  gut microbiota DNA sequence
actcggatgctagctacaactgtggattttctaaaggaaagtggccaagtgcttctcatcataacggggccgcctacagacgccatccatggcgtctaaaagccatgctcacatggcttggctaacgcgaacatcgtgttcgcgttgcccctgcagctcaaccactttccaagaaaatctcacagtctccgccgcatctacgcccgagggagcagtccttttctgctggtttatgaaaaacatcccaattatttaggcagagcatttgaaaatacatgtgcagaagttaaaaacaaggatttagtatgtgcaaaaaagaaggaaatacatgcgaataattcaaaagtcaaaattaagtatgtgtaacaagtcggaaaatacatgccttaaagcaaaaaataatgatccgacatgtatgataaccgggaaaacacatgcgcaataggctaaaatgaaaaataggtatgtaaatcgctttaggaaacacatgtataaaatttaaaaataagaattaagtatgtaaatgactttggaggaatacagaaaccagcaacacgagatagacttagtagtttttcatgggattttcaaaacacagaacgcccacggcggatggaatgtccttccgaagatgtttgtcgggaggtggtgatattttctcgaaaagtgttgaaaaacaggatggagcgaacaggacgttcgcgacaggcggatgttgccatggatggcaactggagccgtgcccgtacggattagaaccgctactcacttttcgttagaaaattcccaccaggagacctcacatcgaggaaggacattccatccgccgtgggcgttcgtggcttcttcactaactctcaagttatcatgaaaccccggtgcattcacaccggggctatatgtctattatttcaatttccagatgtctctgttgtactctgcgatggttctgtcggaggagaagaatccggccttggcgatgttcaccagcatcatcttcttccacttctgatgatcctcgtaatcggcgaatgcctgatcctttaccttgatgtaatcttctaagtcaagcagggtcatgaaccagtctttgttcagcagctcgttgtacagacgctccaggttctcctttttgcccactttgagcacttctttgctgacaataaagtctacagcctctttgatcacagggctcttcttatagtagtccttagagacataatctgccttctcgtaatgcttgatgacagtgtcgctgtcctgaccgaagatgtagatattgtcatcacctaccagctcgtggatctccacgtttgcaccgtcacttgtacccagtgttacagcaccgtttaacatgaacttcatgttaccggttccggatgcctccttggatgccagagagatctgctcggagatatcgcaggcagggatcagcttctcggcatagcttacgttgtagttctctaccataacaagcttcatgtaagggctgacttccggatcgttattgataatgtcggacattaccagcaggagatgaatgatatcctgagcgatcacatacgcaggtgcagcctttgcaccaaaaatgaaggtcagcggtgtagaaggcttcttgccacccttaatctccagatatttgtgaatgatatacagtgcgttcatctgctgacgcttatactcatgcagacgctttacctgaatatcgaagatggaatcgggattcagctccacgccttccttatccttgatataggataccagctcggtcttcttggtcttcttgatatcatagatagcatccagtaccgcctgatcgtccttatgctctaacagcttctgtaattcttcggcatccttcttgtaaccgtcgccgatggtctgggtcaggaacgcagccagctcatggttacaggacagcagccatctgcggaaggtgataccattggtcttgttgttgaacttttcagggtaaatcttgtaaaaatgattcagttcgctctgcttcagaatctcggtatgaattgctgccacaccgttgacgctgtaaccgtaatggatgtcgatgtgtgccatgtgcactctcttatccttatcgatgatctgaactttttcgtccttatatttctttgccacacggtcactcagctccttgatgatgggaaccagctgaggaactaccttttcaatataagccagaggccacttttccagagcttctgcaaggatggtgtggttggtatacgcgcaggtgcgacttacgacgtcaatggcttcatccatggtgaagccttcctcagtggtgaggatacggatcagctcagggataaccatagtaggatgggtatcgttgatctggattgccacatgttcaggcagagtatgcagatcatagcctttttcctttacttccttcaggatcagctgggcaccgttgcataccatgaagtactcctgatagatacgtaacaggttaccggcctcatcggaatcatccggatacaggaacagagtcaggttcttctcaatggcttccttatcgaaagtgatgcctttctttaccaggctctcatccacggtctcaatatcaaataagtgcagcttgttcagtccgttctcataacctaccacgtcaatatcatacaatacggaagtcaccttgcggtcaccgaaagctacttcaaacttagtgccggtgttgttcagccaggaatccttctggatccagtcgttcttctcagcattctggagatgatccttgaatacctgcttgaacagaccgaagtggtagttcagaccgataccgtctccgggaagtcccagagtagcgatggaatccaggaaacatgctgccagtcttccaagtccaccgttaccaagagagggttccggctctgcctcttcgatgtctgccagattcttgccgtttttcttcaggatatcgctcagctcctcatagatgcctaagttgatcaggttgttggataacagcttaccgatcaggaactccatggaaatgtaatatactttcttgtctccggtgattgcaggagtctctgccatcttctctttggtcaactgcagtactccggtgtacagctgtgcatcggtgcaggcaccgatattttttccatacattttgccggtgatctcgtttaatgtctgctctaaattcatctttaaccccatttccgcacgtttccccagggaagcgcactatttttctattctctctgttgcggttttccctgaatcagcggatgccatttcctccgtttttcaggaaaaatagttttgttgctctcttacaatacacaggataccataggaaaacgttttccgcaaccctttctttgattttcctggatttttgtgcaaaatagcttaacagataatgtccttatagtacattttcacaatactgtggggcatgactacctgatgtccctcgccgccgttcatcagctgatgtacttcttccacggctctgctggagatgctgtagaaatcctgtctgatagtattcatctgcttaccgacatatcccatcagggtgatgccatcgaaaccgcacaccggacgaaaaatgtccatatcgatcagggcgttcatggcgccgattgccatcaggtcggaggcacagactaccacgtccttatttttcgcgtatttcagtgccacgtttctcgctgtcagctcactgaaatctccctgtctcaccatcatggtcagatccaagtctttcaccaggcgcttcatgccttttaatctctgttccgtgacataaccgtctcttctgcctgcgatgtacaacacacgcttgcaattatcgtccagcaccgtctttttcgccacatcgtactgggcctgttcctgatcgatactgatgtatgtggtcctggcattcacaatcggtgcatccactaccacacaggcgaactgcttttcccggatgagtttctgcagcactttatcttctttggacatgccatagatcacaacgcccgagatactttgtgacagaaaagatctggtgatctcttccgctgtcattccagcgatcatagaaggaaagatcgtcacgacttccacattcagttctttcgccttatccaatgctcctaccagatactgcatgaagatctggtcaatggcctgggtctgtctgttcggatccaataccaatgcaatacgtccaaactgtttggatgataatgctgctgcgatggaattcggaatataattcagttccttgatggcatcctgtacccttctcttcgtctcttcactgacattcgggtagccatttaagaccttggatactgttgaaattgccactccggcatgttttgccacttccttgattgataccataaatcccccgttccggccgcagacccctgcgcccgtttttctccgttaccgcgacggaatgcggtcttgttccatttgacgtttgctcatatattctctatactataagttaatggcagtttcgtcaatgtacagcatttacgaaatatggcgtgaatttttggaaaaggttttccaaaacagattaaaataggacagcgaaagcgccggaaaggcaacacatatcatggcagtcatcaaaagtgtggaagaaaaatatatgaaagaagccctgaaacaggcaaaaaaagcctacgctctgggagaagttcccatcggttgtgtcatcgtacacgagggaaagatcatcggccggggttataaccgccgcaatacagataaaaatacgctggcgcatgcggagatcacagcgatcaacaaagccagcaaggtcatcggcgactggcgcctggaagagtgcaccctctatgtgacactggaaccctgccagatgtgcgccggtgccatcgtgcaggcccggatccccgaagtcgtcatgggctgtatgaatcccaaggccggatgcgccggatccatcctgaatatactggaaatgccccagtttaaccatcaagtgaaggttacccggggcattttggaagtggaatgcagtcagatgctgaaaacctttttcgaagaactccgcatccgcaacaagcaggaaaaggaagccaggaagtccttaagcagtctctcgtaacgatgcttcttctcctttatcctgtgtatgtccgctctttttgaattttctgagtttcggcagcttgcagagcagaagtcccgtctgatacaatccctccggtgcatacaggatcataaatacacaatatgggaatacatatctgctcttggcttcccacaggatactgaacagaaatccgccgaacacagcaatccagggtagccacagtgatatcggaacctcctttttcttccaccacaagattcccagcatgaccaatgccataagtccagccaaatataggatactctggtaataatttgtaagcttccatatagttcttcccagttcaccgtaatacagactctccagaacaggagacaattccgctccttcttcaaaactttccgtactttccaacgctgcatacatcggctctatccactggccctccagcttatttttgaaaaagtcgaaagccattcccggatcctgtgaaaattcttccaaccgttcccggatatattcttttccctgctgcgcggcaagttcctgttgacaatcgtaatctgtaaatgttgcctgctgataccggttatagacccccgctctgccttccgtctcctgtaatcccatagcaacccacaaaatactgggaacaccgactccactgggatatcccgaccggacttcatagattacatctactgccttcacagacaatgctgccgtcagaaggatcgctgttcccgccataagatatcgtactttctcttttctgagacttaccagcagaacatagactgccacggcaacgagaacgatccatgtatttttccgggcaagtaccgccagccccgctgcgaaggatgccaatgcaatatatctcttctgcccggaatgttcataggctgccacaccataaaacaatatgattccgaagctgatgctgagcacatcaccatagatataaggaagataaaataaaagaggaaaacaacccagcatcatcacacaatacagcatacggaataccggtctgtccgtgttcagcttcagaaacccatagcccgccagtatcgtaagtatccaccatacgatatgaaggatcttggccggtctgtagttaaagtcgccgaacaaggtaaacaggatctcatagaggattgccaatcccttctgctgctggtacattcccacatacccgccaatgctcagcatgctgaaattgccatctctgcaatatgcagcaaacgccgtagtattaatctggtctcctacgggataatagggattcttgcatacatagaatacccccagaataaacgcaatgacgctcgtcacaattaacatacacaggcagatcttttcctgctgggacttatcttttttcatcaacactttgtcaattcccatggtacaaagcgatgcagctaaaaaaaacgcgatatgagcccaggtcttgtccccgaccagcactcctctggttctgccatccacagcaccataataggaatatttgcaggcccaatagctgagaagcatcatcattgccagagcgcacaccaataagattccgagcagtgcatgatatagtttttggtttttatctgtctgtaactgcctggtattcattttctttcgatatccttttctcccagagtattatcattttatcttgttattattgtaattttccgataattgcacatcgttacgtcaattgtagcacgcgcagacatattcttcaagtcaaagaggcttgacaaagccgccggaaacagatacacttaaaaagccgtatatgtcgggttgccatgcagcggtgatgaaactcggtcttacgcaatggaaatctacgaaccgtgtcaggttgggaacaaagcagcactaagtagaaccttccatgtgccgtaaggaaactgggtggagctgctgtcatggtccggcgtatgcggttttgacatttgtagctatgaataagaaggaagtacagatatggctgtagagactaccattttttcaaataatagcgccgatacctggttccgtgacatcatgtccgactgtgtgctatgcccacgtgcctgccatgtgaaccgtctcgccggtcagaccgggtactgtgggcagaccgctgaactcatggcagcgagagcttccctgcattattgggaagaaccctgtatttccggtacttccggctccggaactgtctttttctccggctgtaatctcagatgtgtcttttgtcagaatcataatattgctttgggtaaggccggacgagtcattgctccggagcatctggcggaaatctttctgcaattgcaggaacagggggccaataatatcaacctcgtcaccccgactcattttctgccgcagatcgttattgcactggagcaggcaaaacagcaggggctacatcttcctattgtatacaataccggcagctatgaatctccggaggcactgcgccatctggaagggctggtggatatttatcttccggatctgaaatatttttccccggagctttccactgcgtattcccatgctccggattattttgaagctgcctgtgcagccattgcggaaatgtatcgtcaggtggggaatcctgtcatcaacgaagataccggattaatgcaacggggacttatcgtacgacatctgcttttgcccgggcagacgaaggattctaaaaagatcctgcgctatctccatgagacctatggagatcatatttatatcagcattatgaatcagtatacacctctgccacaggtagcggacattgaggcgctgaatcgtaccgtaacgccggaagaatacgaccgggtattgcgatttgcagagcggatcggcatcgaacgaggttttcgtcaggaaggaacggccgccagtgaaagctttattccggaattcgatgaaaggggactgtgatcctctcacagttccaccgagatcatataatatccgaagtctccttcccatgccggttctctggctccttcaaagctctcaaagccaaacattctcgcgacctgtttctcccgttcgtaaaagtttcccggaactcctatgtaatactttgcctgcccggctgtttcctgccgcaacaacagcaaatgtctgtaattgtaatatccatgcagtaaaaagctgttatgagtcatctgataacagcgttcccgcagaactacaaagtcttccggtcctaccgacaagaattccctggcatcccggaagggatgaatgtgtgggtaaatgctgcttaactgctcccatttggtatctttcatgtgcagggtgtgttccgtaacggcagcggattcctttaccttttgtgcttgccgttttcctgtctccatgggaatggctgcttccgctgttacctctgctttcttctctatcagcttcggttcttcgcttttcatcacgttttccggctttggcacagatttctttttgctatctccggttccttcgaatttccctacgatggcacaattcctttccagcggaatgcgtatcccaagtatctgctccctctctttttccaatggaatccttttctcacaagaagctcttccttgatctgtcgtcatttcgcacagctgatgttccccgctttcccattgcaaatacagcggtatccccttaccggacacgatttcctgtccattcagctgcactgtcaaaatttcttctttatccaggctttccagccttgcatatcccgcacttcggattcgctgcccattttcctgtaattccaaataactgatctgtttccgatatgacataaaaatccccccgcataaagtttctatctaactttatgcagggggttgtccttaatattcctggttgtccagatatttcatataattaacgaccatcaatgcgatcttgaaggtcaatgcatcatcgaagctgcgcaggtccagtccggtgctcttctggatcttctcaatacgatacaccagcgtattgcggtgtacgaacagctgtctggaagtctccgacacattcagattgttctcaaagaacttgttcaatgtattcaatgtctcttcgtccagatcgtagggtacattgtctccgaagatctcttcgatgaagatcttgcacagattcaccggcagctgatagatcagtcgtccgattcccaaagtgctataggcaatgacttttttctctgcatagaagatcttgcctacatccagtgccatcttagcttccttgtaggacttggagacatccttcagttcctgtaccacagtaccgtatgcaacttttacatccaacaatgcttccgcattcatcatggccacaatagtctctgccagttcatgcagtgtctccggtgttgtggtgttttctacggacttgatcaggatcagactggattcatctacagcagtcacataatcgcccgcctggggtgagaacatgctcttaagcacttccgatacaataccgtccttctcatccttcgtctcgatcagatacaccgctctggggcagctgacttccacatgaagcttcttcgctctgttgtagatatctaccaacaacaaattgtccagtaacagattctggaagaagttgttccggtcaaaacgctctttataagcaatgacgagattctgaatctggctgacggcaatcttgcctaccatatacacatcgtccgtcattccgcgggcaaccagcacatataaaaattcaccttcatcacgaatcttcagaagatgatgcactccgatcacctgactgtccgcaggggatgctgcaaagcctgtgatcagatcggtcgtaatgtcatctctctccatggtagatgccacttcggatccgttcaggtcatagactccgaggtcaacttttgtgattgctttcaattcatcaatgcttgtctgtataatctggcctgtaatcatattgtccacgcctttctgtaatatttcatatccgcttgctctactcataaccaaaagcccctccgcaagcagtctcgccttttatctatgtcccacaatccttcccctctattcgcatatcgtgggattggcatcactatatatgtttagtataaaggatttgtgcattcggtgcaagcaaaatgctgaaaaaagaccctgtctgtaatcacagacagggtcttgaagtttctgattaagactagttggtaataacctgctcggtctctttgtcgaatacgtgaatcttctcaacatccagagcgaacttaacggtatcgccaggtcttgcagtggtacgagaatctactcttgcggtcatagggaactcgtcaagatcgaagtacagatatacttctgcaccaagtaactcgtaaaccttgatggtagaggtaaatacgctctgaggagaggtctcgatgtacatctcggaatcatatacatcctcaggacggataccgaaggtaacaacctttccatcgtaaccgccatcgatcagcttcttggacttagcgggaggaagaggaatgctgtggcctgcgattaccaggttagcgatgtcgccttctaccttaacagtagcatctaagaagttcatctgcggagatcccatgaatcctgctacgaacaggttgcaaggcttctcatacaggttctgaggagtatctacctgctggataacgccgtccttcataacaacgattctggtaccaagggtcatagcctcggtctggtcatgtgtaacgtagatgatggtggtgcccagtctctgatgcagcttagcgatctcgatacgcatctgtacacgcagcttagcatccaggttggacagaggctcatccatcaggaataccttagggttacgaacgattgcacgtcccatagcaacacgctgtctctgaccaccggacagagccttgggcttacgatcaagcagcggagtcagatccaggatcttagctgcttccttaaccatcttgtcaatctgatccttgggaacttttctcagcttcaggccaaatgccatgttgtcatatacggacatatgaggatacagagcgtagttctggaataccattgcgatatctctgtccttaggctctacatcgttaactactctgtcaccgatcttcagttcaccggaagagatatcttccagacctgcgatcatacgaagagtggtggacttaccacatccggaaggacctacgaaaataatgaactcctgatctgcgatctcaaggttgaaatccttaacagcttcaaaaccgttaggatatactttgcagacattctttaaagataaacttgccatttgaaaatactcctttcatatttacaatgttactttctctcattgtgaaacgatatgtctcgtttgaatctgaaatcagtataacgaaattcacgaaaatgtgccataccactatttcacaaagattttgaatcatattgtatgaattgcttataaacttttctttttttaaaaatgcttgtcagattgaacaaatctgtttctatttcttggacattttccacaaggtggtctctactgtgtctctttttccggctttttgtagaacgtaagctgattttttccatgtctttttgacacatataacgcattatccgcggatttgtacagattttcaaaggtattgccgtctccggggaacactgctgctcccacgctggccgtaacagaatacttcacatattctccgacttcaaactggtggaaaaactgttcgatcttcttcccttcccgttcgatcatggtaatatcacggatgtccttgagaaataccatgaactcgtcaccaccggtacggcccacaatatccgttgcacggaacatggactgcaggcgcactgccaggttccggagcacttcatctccgaaggcatgtcccatggtgtcgttgatcttcttgaaattatctacatcaagaacaaacaataccccctgcttatccggatattgttccatatattcacggatcttacgctctgtggccatcttgttgttcagatcagtcagtagatcggtgtctgccttgtcttccaggactttgctgtgttccgagacctttattcgtaccagcacattgatcaccgtgatcacaataagggctgctgcgatcgatatgctgatcttgacgatcagatccacaataggaccacggaaggactgctgaataccggacagataggattcatcgatgcctaccaccagattccaggctgtgtccgcaatgggaaaatgacagagaatcttacctacgccgttctcattgacatgcagtatcccattgtcgcccttctgctgttgtctgtcaaacagtgtccagcttccaaggctctctgctaccccttttaaggaattccagaaatcgttttgtaaaattttcgttccttctgtcgctccatagcatgccataatggttccgttgcgatcgaccagagagaaaaatgccctatctccgtatacggaattctcaaataaatcagacatctctgccggctccatataactgagcaggtatccgtttacatttccggaatttgtaataggacatacatagatgaaagccatctgtccgttgattccatccgatctggtaaacagataatgcggtgtttcaccaaggatactatcatagtaattcagctctgtcatatcgatctgccgtctgtcattcagaaagcccgtaccgttggatgcacagtatacaaccatatatgcatcactggccttcatcagtgtatccagcttctcattcagaaacgcatcacttctgtccgggcggctcgccatgatcgacgcaaccgcatccgtgatatttcccagcgctttcagtttatcctctaccccggcagcataataaagtccgatctgttccgcctgatcgtccacaactgtctgtattgctgcatccatcttattattaaagtcatatatgctcaggaccagtgcaatgactaacaatacacatggcaggacccattggaggaaattttcccatatttttctcttctgcatactctgaacacctcttatctgctgtctttagagtctccgccatcagaccccggcccggcaggcgaccttgctacttatcctctatcttaatgctttcatcgatctcatcatgaaatactctttcatcctcttccggtgatacttccggtgccggctcctgttctgacacaagctggtcttccagtttctggaaaaacttattatacagcattgcggacgcatatgccggcagggaaaaaccaaacaggaagatgatcggtatcagtcgtaaagacaccagatatatgatcagcgggaaaaatgccatcacaaacatcacaactgtcttgggcagctgcaggatgctcataataaaagcatttctgatggttcccatgatcgtattgtcgaatttggcaagtaccgggaatacatacaatgtcgtgcagatcacaagcactgcagcagccatgatcagaaccaccagcacgctgctgaactgtattccggatttggtaataatgtaataatctccacccagtactgctgctatcagcaggatcatcagccagatcagagtagcctggcggaaatttgtcttaaatgatttgaaaaagcttctggtaatataactttcctcattgcgcacgatctttagtgccacataatgcatggaggtaaatgccgctcctgcagtaataatgggaatacagcagatcagagtcagaatgttcagccacatcaggtctgccattttattgagtacattcattaacggactgtccaggtcaaaaatcttcatttacgtcatatccttttctgtgttttataaaaatttttccatcggtgttacgcggatcccagaaaaagcttcctcctcatgcactgcatgaaatcccagtttccgatagaaatccacggcatacggagctgccttcagcgacatataccgttcccccgcctcttttttcagatattcgcacattcttcccatcagactccggccaacacctctgtgatgatattcttcgtccacgaaaagaagcgacaaatgattgtagttccgcacagaagccgctccgatgatcctggcgccatccaaagccaccatcatctgatatcttccctgccggaacgacttatagaggtgttcatccgtaatgaattcatgaaaattacggattccctcctctgtataatccaccgcctcatatttcaaaaaagtcttccagatcatatgcatggcagggatccagtctttgtcctctgcccatctgatctcatagccattcaccatatctgccatactgcaccgtctctccgattcaggatcagggaagcctctgttctcaggcgacccccggaatctccttgcagatccactgccagatgtcctccattgccacctcagcgtcgtcttcattcaggagttcatgtctgtcattctcgtatagcttcacggtaatgttcttcactccggctctcttcagagagtcacatgccttatgaacacccttaccgtaatctcccacagggtcttccgctccggataccataagaatcggcaggttctggggaaccttttccagattctcctgcttctgcaatctgcggatcagttcaaacagagtctgaaaaccgttcacggtaaaggtaaatccgcacagttcgtcttcgatatagcggtccacattctccgtattccggctgagccagtcactggaagttctgggagaatcaattcgtttgttatagcctccgaaggcagccttatcaataaaatggctgacatgcttcgaaccgcagaacagcttctgtattccagccatggcttttgaggcaaagatcagccccgccgactgcattcccgtacctacgatgaccgcaccgcctattccgctgccgtaacggcacagataattcctggcaataaaagatcccatgctgtgtcccagaataatataaggcacctgcggatattgttcttccgtgatcttcttcagacgatgtacatcccggactactaccgtcgcaggatcctgctcgcaaaagtaaccgaaagacccaccctctgaaacagattttccatgtcccagatgatcttcaccggtgacaaggattcctctcttcgtcagaaattctgccagattctcatagcgttccacgtattctgccattccgtgcacgatttgcacgatgcctcttacgttaccgtcatcgggtgtatatcgcactgcatggatacggttctcaccgtcccgggagtcaaagtagaattcttccttgatcataagacctccttggttgcagaaaatcataggacgcataaaacaaatgtcaatttacagccatatgcttctgcgtcctattcattatatatcattttatataaaattttaagtcctatattgctttttttgtaaaaaagtaaccattacatccgcactgttcatggtcgaactgttttagcagatctctgctcctgccggcatatttttctcaggtgttaccaacgcgaggttgccttcagcgtcttctgcgcacaggatcatgccctcagacaatactcctgccagtttcgcgggcttcaggttcaccagtaccataacctttttgcctaccatttcctcggggctgtaatgcgccttaatgccggagacgatctgacgtacctgactgccgatctttacctggctgcacagaagcttcttggacttaggcactgcctcacaggagatgatctcacctacctggaactgcatttttgcgaaatcgtcatattcgatctctgccttgggctcgatatcaatggcttcctgctctgctttttcagcttctgcatttgcttcttccgcttcatgctccgctgctgccttgatcatggcttcttccagttctgcctcttttttcgctacatccttcatatccagacgtgcgaagaggatttcgggctggtcggttactttgctgccgctctcatacagaccgaactgctccagctggtcaaaatctcgcagagaggtgttcagctgttttgcaattctctctgctgtctcgggcatatagggctctaacagggaagctccgatgatgatgccttccaccagattatacagtacggttgccaggcggtctgccttggcttcgtccttcgccagtacccatggctctgtctcgtcgatgtatttgttgcagcgcttgaagataccgaagatctcggtcagggcatctgccacacgcagttcttccatctttgccacaacttttgcataggtaccggtcacggtctgcttcagatccgcatccactgccgcatcattctcggtcagctgagcgtttttattctctaccacaccgccaaagtatttgttgctcatggagatggtacggttcaccaggttgcccagggtgttggccaggtcggaattggtacgctctgccaccagctcccaggtcaggttgccatcgttttcaaaaggcatttcgtgcagtacatagtagcgtaccgcatccacaccgaaataatctacgagatcatccgcatagaccacatttcctttggatttactcatcttgccaccgcccatgagaagccagggatgtccgaatacctgcttcggcagaggctcgcccagtgccatcaggaaaataggccagtagatggtatggaaccggatgatatccttaccgatcagatgcaggtctgcgggccacagcttcttgtactgctcggtgctgttgccgtctgcatcgtagccgataccggtgatgtagttggtcagtgcatccagccatacatagatgacatgcttgggatcaaaagtcaccggaataccccaggtgaaggaagtacgggatacgcacagatcctgtaagccgggaagcaggaagttgttcatcatctcgttcttacgggatacgggctgaatgaactcaggatgctcattaatgtgcttgatcagtctgtccgcatacttgctcatgcggaagaagtaagcctcctccttggcaggctttaccacaccgccgcagtccgggcacttgccgtctaccagctgggactccgtccagaaagactcacagggagtacagtacattccctcataggcccccttgtaaatatcaccctgatcgtagagacgtttgaatatcttctgtacctgcttctcatgatcctcatcggtagtacggatgaacttatcataagaaatatttaacaggtcgcacagtccgcggatgacaccggcaatcttgtccacatgctccttgggtgtgataccggctgcctctgccttcagttcgatcttctggccgtgctcatcggtaccggtctggaagaaaacatcataaccttcttttctcttgaaacgtgcaatgctgtcagccagtacgatctcgtagttattaccgatatggggcttggcggacgtataggcaatggccgttgtaagataatattttcctttgctttccataaatctggttctccttttcttaaaaataaaagcccgtctcctgaaagaacatgaagttcttcaagaagacgagcgttatctcgtgttaccacttctcttcgtctgtacctcacagcacagacctcttcgggtccgtaaccctatccgctgtaacaggcggatcctgtcgcagccttgcttctaccgttcctattctgttccggtatccgttcggtgcgccgctcagaagccatcttctctatctgtccgttccattcctctcagccttgcggaatgttctctgtaaaacttctatgataaatactctcttcctcattgcatttgcgtattcttacagtagcacaggaaatccggactgtcaatgcagttttgtctcattactgctcattacagctcctctttttcccccagtatcaaaacagaatatgccggaagtgtgaccacagttccttcgcgttcggcgatctcctctccggtataaagttctccaagcagtaccagatcctctgctgcggtgttaccaacggtaagtccggacaggtccacacttgcaggctccgcagaagtattgcccaacagtaataaagtactgtcttcatagcttcttgtcagtgcaaagcattgctcgccggaatactgctccagataagtggtggtgcctctggcaatagcgggattctggttccggatacggattacctgttttacataattgtaaatggaatccggatcctcctgctgttcttccagactgtcgaatttcatctgaaaatcttccatatccgcaggtcccttgcacatgccttccgctttgtcatccttgctccagtacatgggagcccgcttattctcatccttgccggagcccttcattcccagttcctccccatagtagaggaaggtgcttccactagacaacagattcagggcattgccaagcttcgtct

SEQ ID NO: 11429 - DNA, 341 bp, Unknown
  gut microbiota DNA sequence
catcacctgtctgtggtaccgtcaccatgtgatccttactgtacacgatttccaccggtttgcttgcatagtctgtttccttctctccgttcacattctctgcaatcagataaacatgataatcggttccgcattccttattcctgtattcctctggaatcgaaaatactgctttaccgtcctgacccacattcggaatataaattgcttccccggcatcataataaccgtccgctgtaaggatgtctttctttgtgaacagaaccgatacccatgttgcattatcaatgtccgcccctgtaagtctatagggtactgtcacctgctcttctgactgtgca

SEQ ID NO: 11430 - DNA, 10397 bp, Unknown
  gut microbiota DNA sequence
tacataatttttgcagtcatgacacaagaaaagctccctcgcaggaagacgctttgtctacagcctgaaatctgggacagttcctttcccggatttttattatttaaggtaataatgctatgaaatacatgcataaagcttgaaaaaaagatttgagtatgtataattgtcaaagaaacacatgcgcaggaaacgaaaaacgaaatcaggcatgtatgctagcagggaaaacacatgcgtagaaactaaaaaacgaaatcaggtatgtatgccggcagggaaaacacatgcgtagaaactaaaaaaagaaattaggtatgtatgccggcagggaaaacacatgcgtagaaagcgaaaaacgaaatcaggtatgtatgcccgcagagaaaacacatgcgcaggaaacgaaaaacgaaatcaggtatgtaaagaacaaaaataaagcagaaaatgtgaggaataccatgcagataacagcaatgaaaaaagatgatttttacaggcagatgttcaaactgaccatcccgatcattatacagaatctgctcagtgcagcggtaaattccgcggatgtcattatgttaaactatgtgggacagtccgcaatatccgcagtatccctggcgtcaaatttttcgaatgtcctgtttatggtatattacggactggggacgggagccactctcttgtgcgcccaatattatggaaaggggaacctggaagcaattcatactgtagaaggaatcacacttcgtttctctatggcaatctcaggtattgttgcgctgattgcatttttcctccctcagaagatgatgcttctctttactcctgatcaggagctgatcaccatcggtgcctcttatctgcggatcatgggcatcacatacctgtgctggggcatcacggaagtgtatcttgccatcctgcgaagcgtaggccgtgtgacggtcagtatggcgttgaatatgctggctttcgtattgaatgtcattctgaatgccacatttatcttcggactgttcggcatgccgaagctgggagctaccggtgttgccattgccacagccctgtcccgactggtggaactggtggcatgtttcattgtatctttcttgagcaaaaatgtaaaactgcatccgaagtacctgttcgttcacagtaaggtgctgacacaagatttcatgcgtctgtctctgcccgcactttgcaacgatgtgtcctggagtgtggcgttttccatgtattccgtgatccttgggcatctgggaacagatgcggtggctgctaattcactggtcgtcgtagtgcgcaatattggtacggtgttctgttttgccattgccagtgcaggtagcatattgctgggaaatattatgggacaaggcaatctggagaagtcgaagagttacgcttcccggatgttgaagatgacggtaatcgccggagctataggcggcctgatcgtactggcaattacaccctttgtgttacggtttgctacattgaatgacacagccatgcattatctgaaatacatgctgctcatcaatacttattatattatgggcgctgccgtgaatacggcgctgatcgccggagtattccgtgccggcggagatacgaagttcggactgatctgcgatacgatcgatatgtggtgttatgcgatccctctgggattcttcgccgcatttgtactgaaactcccggtgctgtgggtctatttcctgttatgcaccgatgaatttgtcaaatggccctgggtcattaagcattaccgcgagggcaaatgggcgaagaatattaccagagaagaagtatgatcctaagttaaattacatggccttttcctgctcttcctgaatttcggggaagacagataacatgggctttacatcttcttttttaatgatacgtgccacgtaatttctcgtgatcttcattactacgggagacagggctatgacaccgatcaggttgggaatcgccatcagaccgttgaaggtatcggacagatcccaggcaagacctaagttcatggtgcagccgatgaagatcatcagtacgaatgcaatcttgtagacaatggtggatttcgtaccaaataaatattcacatgccttggatccgtagtgactccagcccagtacagtagagaaggcgaacagcaggatcgcaatggcgatgaaggcgggaccgaagctgccgaatacggtagcaaaagcctgacccaccagagcggaaccggacacatccaccaatacggcaccggtgtccagatcgatcagtccggaggacagaactgcgaaagccgtcagtgtacatacgaccatagtgtcagcgaatacctcgaagatgccccacataccctgacgcacgggttcttttacattggaactggaatgtaccataacggaggaaccaaggccggcttcgttggagaacacgccgcgcttcatgccccaggtcagagccagcttcacaccggaacctacgataccgccgcccacggcgcgcagaccgaatgctcctttgaaaatagcggtaaatacggcacccacgtgaccgatatttgcaaagaagatcaccagtgcaccgatgacataagcaattgccatgaaaggaaccagcttctcagtgacggcagcgatgcgctttaacccaccgacaatgaccagtgcaccgatgatcaccagaacaatgccggtgacggtagcgggaatggaaaaggcggaggtcatgttggcagcgatggaattgacctgactcatgttgccgataccgaaggaagccaataggcagaaagcagagaacagcacagccagtacggcaccgatctgtttgcagcccttataggagccgaggccgtcctttaagtagtacatggcaccgccgctccactcccctctggagttccggcggcggtagtagatacccagcacattttccgagtagttggtcatcatgccgaagaaagccacgacccacatccagaagatggcaccgggaccgccggcgaccagggcacttgccacaccgacgatattaccggtgccgatggtggcagccaatgcggtgcacagcgactggaactgggaaatggactgatctccggcctccgtatgtttcgttacatgcttgtcgtgaaagatgccgcccaccgtgtttttgaaccagtgtcccagatgggataactggaaaaatttcgtcaggatcgtcatcaggataccggtacctaccagcagtaccagcatggggacaccccatacgaatccattgacggcactgttcacattcgtaatgaactctaccatatacattctcctctctgttttcaggtaaaagaaaaagcgcagacatccgaagatgtccacgctgacatagttacctgatttttgtttcgatttatttttcatagtataacataccattttctgtgatgcaattaaaaatttatgactatgcaggaacaaatattaccgacgtagcaaaaaagtattgacctaaagttagctccaggtattatgataaactgtccgaaatgaaacattattatgcagacaggacatatgcaagatttcgggcagaatgagcaagatcgtcaaatagaaagattatggaaggagcagaagaaatgtatcagaatgaattaactttaaataatggtgtgaagattccacagctgggactgggaacatggttcattgatgatgacaaggcggcagatgccgtgaaggcagcagtaaaacttggttacagacatattgataccgcccaggcttatggcaatgagcgcggtatcggggaaggtatccgtacctgcggtgtacccagagaggaactttttgttgtatcaaaagttgcagcagagcacaagacctacgaatctgctgcaaagagtattgatgagacactgagcaaaatgggactggactatctggatatgatgatcattcattctccccagccctgggttgaggtaaatcggagtgaggatcgttatgtggagggaaacagagccgcatggagagctctggaagatgcttacaaagcaggtaaattaaaggtcatcggtatctccaacttccagatcggtgacatcgagagtctgcttcagacagcagagattaagcctatggtgaaccagatcctgctgcacatcagcaatacaccgttagaactgatggagtactgccagaagaatgggattgccgtagaggcatattcccccatcgcccacggtgagattttaaatcaaccagagatcaaagctatggcagaaaagtatggagtaacggtaccacagctttgcatccgctatacattgcagcttggtgcaatttctcttccaaagacagctaatcctgagcatatgaagacaaatgctgaggttgattttgaaatcagtgcgcaggatatggaagtattaaagaacttcaagaagattgaaagttatggagcaagcagtggattccctgtatatggcggaaagatgtaatgataacaggaatccgaatagtgttttaagaatggagtagatgattattatacaacgcttgatgaaattaatgtaccaataacagtcagtggacgtgtaacagcaggttatgaagttgtcatcgatacaaacggaaaacttctctgaccggatgcaacaggtatggcaaaaccatatctgattgtaaccagtgagaaggtttcaaaggaatatctcgattatctggacagacagaatatttcatggattgcctgcgtaaaagagcatgtagacctcgcgcgtgcaacagaaatccttgcagagcagtttggcgtagagcgcatgagtattgtcggcggaccgaaaattaatactgcatttttagaagttgaacttcttgatgagatcagtctgttgagcggagccggaatcgatggcagatgcgtggctgttgctatgtatctgcttttctttttacggaattatctgttgttttgagttgacacatactgaaattaagtataacatcaggtaggatatcccaccatgattctatggaggtgacatgatgtcactttacaatttaacaaaataatgaaaggagtatttttgtgaactatacagacatcataagcaagtggaaggagaagaaaatagatagcatcgaaaaattagatcaacagctcagcaattttcgtatcacttttgcttataactctggaacaatagaaaatccacagataacatatcatgctacaagagaagtctttgaaaatggaaaggtaatcaatttttgtggtgatattcaaatcatctttgaaattgaaaatcaaaaaaaatgttataattttcttgtacctaaaattataaataaagaccccattacctctgatcttataaaaaaaattcattatcaacttatgcaaggggtctatgacgaacaccgttggcaaaaaggtgaacgtcctggacattataaaatacatgattatgtaattggcaaatcaaatcagggtgcgctaccagaagaagttccggctgaaatagcggaattatgtgacgaaattttaaatatccctgacaagggtgataacattttaaaaacagccgcatatattcattgtaaatttgaaaatattcatgcatttgccgatggaaatggaagagtagggagaacccttatgaactattatttgatgatcaataactatccacctttagtagtatactcagaaacaaaagaccagtattataaatccttagatcattatgacaataccggtgatatcactccatatcttaattatatgaaaaaaagcttggagaaaacatgggttttgggtgagttaaagtgacatcatatctattcctctgctccgcatatttactaattcctgaaacgttggcaaaagaactttttcatacctcatacttatcattgatgtataaaactttttccgtacatcactaatacatggaatttcataaatcatactttttattttttcaaattctattaggttttctccttctgataaaaaatccttacatcctaccactactctgtttttatacactccaagttttgtttcatgaacaggcattcctatcaattcatatacatgagatcctatatactcagaaacaggagcattactgtaacccatttttatatttttaagttgcttatccttcaaattaccgggaaatttcaaaatataattctgtccttcgtaaacaacacctaattttcttccagcagctccactatatacacgatcatttataggacaatcttcaaaatttatcatttctatcaccttaatccatacctcctgaaaatagtgtctaactgctttccactgatgctgccatgtatacaacactgcttcacagtcgcttccagtgtttccagacagcaatcatatcctacaaaatctccactatgataatagctctccagttcttcaatatccctttgaaggactttaggcaattcttccctgttaatcacataattttcatcaataaaaataaaatatcactccttctgctccagacctacaaaaactcaattctgttggtatattaaaagtcaactgtttacgacatctatccggttctattcttttagggatttttccattattctccatacactgtaattctcctccggatattcttcatcaatccacttccaatcacatacacaccttaaaaaatctttgttgtcctccaactccagcatccctaattgcagacagccatacatactttcatcgccaccgtaagataaacaatatgtggattctctattacctacaatcttcccctcacgattgttaaaagcatcatttgaaatggacactaataactgtatcaccttttccggtaaagtacgtttaaaatagatcacacttttttgcatcctctaacctctttccctctttacagaaaccaatttcttaaccaccagcttctcggcatacaccggtggcatcctaactccagactaccagttttccaatgtacacagcggaatctccaacaacacgcgatcgtacagcactactataccatccattgattggagcgtcaaatcgcgaaagcccagcaggtataacaggacaccaaaaacgcccggacagacaaaaagaacgccagagaaaccggaaataacgatacgggagtttaacacttcttttttcttcattttaaaataagaggtacaaaaaacaagagaatcatgctataaagtttttaccgggcggtgtcgatactattcatataggaaatacagataccatggatggacaaaagctacggatggctgcttcaagagaaggcaaccatctttttttatggcagtgatcgctgcggagagggagataaatatggcaattacgggaatcggttacggaaggacactgatgtatgagatccagaagagggtaagcgaaggaactttgcagagcgcgtcagatgtggcatctcgttttgcagagagtctggaggaatctgcggaggaaaatgacaaggcactggctccggtgacacgtggtgtacggttgaaccgtcgtatcgaaggcaaagacaaagtgccctatggggaaatggcggaggacggtgttattgaatataatggggtggtcttcgtctgcgattatgatcataaccgtctgacgctgggagatacctctaatgagaaagattgtatcaacattccgctgtccggcggtggaagcctgctggttaaccggaataacatcgatgccctgtccaaggccatcggtatgttcagcccggaggatgtgaaccggatcctgcgcgcactggcacaggataagaagatccaggagatgaagaaggaactggatgatatggagaacggtgacgatgtagacagcaatgaggaaacttcggagacgaccgatgcggacaaagtagcgggaaaggatctgtccggaaccgccggagagtcggaaaaagaggatttgagtctcagagaacagatccgggagaagatgcaggaaatctatgacaagctccagaacggtgatacagagaccaaatttcagattggaaatcaggaattcagtatcaaagagtgggataatttcctggaaaaattcgacagtgtacaggatgccattcgggaggccctggaagagaaaatcgaaaagcagaccgaagagcgcttagaagaggaggatttagagaagacttctgatagaaagcccgatatcagtcaggatttttccgatattcccggggagattttccgtatacttttttgaacagatccttgaaataattgctgtcgttgaagccatattccagagcaatatccgtgatggaactgttggtggtaagaagcgccgtctgggcgtgtttgagccgtacatagtttaaatattccttgaagcccatgccggtgatcaatttgaatttcttgctgaagtaagtggggcttaaggaagccacggaggagacctcttccagtgtcagtggcttgcggaaattgttgtaaatgtattttgtggcaagcaggatgtccgcatcccgggagttcagcagatccggttccttttcattcatgacggaatgccgcatcagcatgagcagaagctcttccagatagcaacgctcaaaatgttcggagtattggtcgaagcgggaattctcggtgagcatacgggtcagcagagagtgcagatattcctggtataccgtaggaacgctgcccatgaaggaatgcagctgcagcccctgcccggatatggaagtgaggctgtcggcagaccggtccgataaatgcagatattcttctttgaaatagatcattacgatctcgcagacctctccggcggaatacagagagtgatgcagttctcccggagcgatgaagaccagatctccggcttccatctgatagaccgtatcttttaacaggaaacggcagcttcccgaccagagataaaaaatttcataaaagctgtgataatgatcgggctgcaggggagaaaaatcacctctgcggcctttttccacgatgatccggtcaatatcctttctgccgcgtctgccttttttcgttgtgatatccatagctgctccttcactttttaaatctattgacattgatacagtcagaataccacaaaaaaacagtgctttcaacataaacaagctataaaaacagcagtaaatattaaaaaattacgctattataataattgaaaaaggaacccgcctctttcaaaaatacttttctctctatccccctcggtacactcccccctcgccgaggggaattttttgcgcaaaaaatcacagaaaacaggcagtctcgttacaatggattgcgcattttccaaaggattgttaccataagggtacagatcggccggcatacggtgctaaagcaaaggtgctaaagcaaaggtgctaaagcacctgagagtttgtagagtacagaaaggtatagggattagtatggataaaaagaaaacgggcaatctgatccgggaagccagacaatgcaaaaattatacccagagtgaactgggaaggatgttaggggtgaccaacaaagcggtatcccggtgggagaatggagaaagttttccggatattggcgtattggagtccctgtcccatctgttggaactgccgattcaggacattgtgaccggagagcgggcgggagaccgggaggaggcagtgacggaagtcgtgagactggcaaagctccaggagcagcggaaacgtgaaaagaggatcctgtatctgatcgtgctggggcttttgatctatcactgtgtcatcgggatctgtttattttccggaagagggttgtttgggggaagagatattgcctgccaggtggccggaatctccatggcggggacactgacgatgctggggcttgtataccggtatttcggaaaggaagaggatgtgaaaatgattccctccagtcaattaagcagaggacttggaatagcatcccttgcgatgctattgtggagtgttggaatcatgtatttaagcttcggaatggtccgggcaggaagtgttccccttggtatggaactcagctccctgggaccgtttttgaacaatcagctttgtgcgggctatgccctgaatgtaatatttctggcagtggaaatgtaccgtctgctcatggagcggacggtactgcatccgggatgtgtgatctcaccggcggtcatctatctggatttcttttacatagacattctgggccggatggataccctggacagcgtctggaaggcactggacagagggacggtactcattttgctggaggcagtgtcgggaattgtatttctgtttatacagtcccaccgttctcgttctcacgcatccgatagcccacaccaatctc

SEQ ID NO: 11431 - DNA, 3031 bp, Unknown
  gut microbiota DNA sequence
gcggatgttcgccatgttgactcgcaggatctggttattattgtccatgtagggtccccagatagcattcatgatatagctgtaggtcaggactctgccggaattctctgctaaaagtgtaagcagctggtattcgatctgggtcagatgtacctcttcgccccgcaggcggatcagacgtttttcgaaatcaatctccagatccagtgccttatacacatgaccgggagtctgggcgtggctgtgccgcagagaagtgcggatccttgccatgagctcgccggtgccgaaaggttttgtgatataatcgtccgcacccagatccagagcggagaccttttcctgctccttggtgcgggcagatatgatgatcaccggaacatcgctccaggaacggagtttctgtaatacctccagcccgtccatgtccggcagccctaagtctagcaggatcacgttggggcagaaagaagtgctgagactcagtccctctctgccgtttaaggcatgcatgatcttgtagccttcccggtccatggtggcggtgatgaaattactgatacttctatcgtcttcgattaagagaactttgatcttattcatatctgtgatccatatcctttccggtattttcaagagttctgtcttatgtggctgagagtacacttatttttctgaagcgacagctcccaccttgggcagtgtgaaacagaattccgcgccatccgcatgattccggccactcagcgttccgtgatgggcggtgatgatggtcttgcagatggacagaccgatacccatgcccttgcgggaatccgagctccgggaattgttgtaggtgcccgtctcgaacagattctgtaatttttcttccgacaatccttttccgtagtctctcacaataaaagatacatgctccggatgatcctccacgatgaaatcaatgggcaggatacttccggaatgaacgatggcgttttccagcagattgatggtgacctgctcgatcagcaccgcatccatggggatcatcagaaattcctcggggatcttgacccggatggcggcatcgggatagcgttttttcagtttctccaaagcttctcccaccacttcctccaccggttcctttgtggtattgatgcttaagctgtctccctggatacgagtgacggacagcagattttccaccatattcaacagccagttggaatcctcatagatattggtcatgatcgtacgctgctcggtggagcttagatcgttctgactttccagaaacagggagctgttgccgatgatgccggtgagcggcgtgcgcagatcgtgggagatagcacgcagcagattcgcacgcatcttttccatttcggcctctgccagccgcttttcccgctctgcgatcatctcggactggatggtcatatgggaggtcatggtacacaggatcagagtgatcccgctcatcagcaggaaggtgatagggtagccggtcagtgtgaaattaagcgtataatacggataggtgaacagataattgatcgctattacggaaaaaagggtgcaggcaatgccgtagccgtagcccaccgtccatctggcgatgatcaccagtgccagaatgtagaacagtgctacattggcatggttgtccggtactatatgctgatataaaaaagaggcaagagtggcgcacagcatgcaggcggcacagatcaggatactgatggcgtgtctggtaaagggtggttttaagcggaagcttttccgcggtgattttttatcggaaaatgatcggaacacggtgtgatcctccatgaaatattgttagctgttttgtaaatttattataactatagtaccattactttgcaatgcaaggtgtaaagaagtagttaaggatatatgaaaaccggtatattttcccctaaagctacggcaaaaggcaggtatcctcaggaaaatccaagacacaaaaataggaacatatactttcgttaggttgacatcaggaaaaacattagattaaaatgtagtatggcggcggtcctgaaagggcggaccgtctatgtggacaggagaggaataggttatgtttctgacaggattggcactattgccggccatcgcactggtggtatggatctatagacaggataaggtggagaaggagccggggggattattgtggaaaatattcctgtttggtgtattgtctgtgatccccgccatgatactggaaatcattctggatgaagtatttctggtatttatggatgcagatacgctgtgctacgtgatcctggataattttatcggggtggcactgatcgaggaactttgcaagatgcaggcggccaaatgggcggcatggaagcatccggcattcaattataaattcgatgccatcgtgtactgtgtgacttcggcattaggatttgcagccattgaaaatattctgtattgtctgggcggtgacattgggacggcagtgaccagagccctgttgtccgtgccttcccatgctatcgatggcgtgatcatgggatatttcttcggtgtggcgaaggaggcagaacttgcaggcgataaaaaacgcaggaaacgctacctgaagctcagcgtgttcatgccgatgatcgaacacggtatctatgattccgcattgtctctggatgcggactggatcttcgttttctttttcctgtttgtgatcgtggtggatgtctgggcctataaatttgtgaaaaagcagtctgggcaggaccgggagctgtctgcataaagattgcgttaagaccccgtgaaaattttataaattcacgaaaaacggtaggatcgggtctttgcttcatgttaagataaagaaaacataaagaaaggaaagaccaatattgaagttattaaatccaaagatccggcaaaaatttgcagaatccttgaaggcggtcctgccggtagtagggatcgtgatcgtattaagctttactatagcccccattacctccagtatcctgttgtgttttctggt

SEQ ID NO: 11432 - DNA, 957 bp, Unknown
  gut microbiota DNA sequence
atgatgttttttacgctgggtgcggagatgtctatgacccccatgggagaaaaagtgggtgccagaatgacccagagtaaaaacattctgctgatcgtagtgttatcttttctgctgggagtggtgatcaccatttccgagcctgacttacaggtgctggcgacacaggtgccttcggttccgaacatgacgctgatcctggcagtggcggtgggggttggaatcttcctggtcattgcccttctgcgtatgctgatcggtgtggcactgccgccgctgttgacctttttctacatagcagtgttcgttcttgcatttctcgtaccggagaacttccgggcagtggcgtttgattccggcggtgtgaccacgggacccatgaccgttccttttatcatggctcttggtgtcggtattgcgtccatccgtaatgaccaccatgcggcggacgacagcttcggtctggtagctctgtgctccatcggtccgatcctggcggtcatggtgctggggctgatctataagccgaccaatgcggattaccagccggtggcgatcccggagatctctgattctgtggaactggcgcagctttttgcccatgggcttccggattatatgaaagagatcgcactctcattacttcccattgtattgtttttcggtctgttccagatatttgccctgcggctgtcggggaagacactggcgaagatcctgatcggtctggtgtatacttatatcggtctggtgctgtttctgaccggcgcaaatgtgggctttatgcctgccggcaattacctcggtcaggtcatggcagccagatcctaccggtgggtactggtgccggtgggagcactgatcggttactttatcgtaaaagcggagcccgcggtctatgtactgaatcatcaggtagaggagctgacggacggtgccatctctgccagatccatg

SEQ ID NO: 11433 - DNA, 13822 bp, Unknown
  gut microbiota DNA sequence
cactggcgatgatccgcgtgctgacggggatcccgattctatggtttttgatcccgggctatggtgtggcgatcggactgtccttttttgtaccgaagatattcacagcgatcgccttcgactccggtggcgtggcgagcggtcccatgacagctacctttttacttccgttagcgcagggcgcctgtgtggcggtggacggcaatttagtcgcagatgctttcggtgtggtagcaatggtagccatgacaccgctgatcacgatccagatattgggaatggtatatcagttaaagcagcagaagagcggtgcaggcgtatttgccggtgcggcggatgcatttggtgctttggatgagaatgccatcattgaactgtaggaggtgtgcccatgagtgaattatatatgatggtcaccatcaccaatcgtcagctgacgaggaaattcgtggaatgctataaagaaaacggcgcacaggtcggcagtgttaccgtcggcatgggaaccgcggcgaatgagatcttagattattttggactggacggcatggagaagagcgtattgttccatctcgtcacagatgctgcctggcggcagatcaaggctgctctgcgtaagaaaatgcagatcgatctcccgggaatgggaatcgcatttatcattcccgtgagcagtgtcggtggcaagaaagcattgaattacctgacctgcgggcaggaattcgtaaaaggagaggagtccacattgaaagagacgaagaatgagcttctggtagtgatagccaatcatggatatacggaactggtcatggatgcagcgagagaagtacatgcggcgggcggtaccgtcatccatgccaagggcaccggaacagagaatgcacagcagtttctgggcgtgacactggtgccggaaaaagaaatgttgttcattgtggtaaaaagtgagcagaaaaattccatcatgcgtgctataatggaaaaagcaggactggagagtaaagcacaaagcatagtattctcccttcctgtgacagatactgcaggcatgcgcctgatggaggagatgggagagacatgacaaacggattatccggacccaggaagcagtttctggacgtgctccgggtactggcaacctgtgcagtggtgctgatgcatgtactgacaggtgcgacagatgtgacagatgcgtcgatagtgccggaataccggtcattattgctgtcagttatggatctggtgacctggtgcgttcctatatttttattgatctcgggatatttgttcctgaatccggaacgtacattgacttatccggtcatgattaaaaaatattgcaggaggattgcactggcgatcctcctattcggcgttccgtatgcagcttccgagctggtagtggcggagcggaccttccggatcaggatgatcccggaggcactgaagatgactctgatgggacatacctggtcccatatgtggtatctgtatctgatcctgtttttatatctgatcacgccgcttctgaaaaaagtgctgcgtgtgctgccggtgtggggtgttgtagcaatgatggcagtgattttcttgggaagcagtgtggcaccgtttctgaataaggtactggatgtcaacagtattccggtattgccggatggcggtgtgtatttcctgtattatctgtgtggatatttcttcgcggtgagagaagtatgtgtggacaagggaaggaatgtatggctgacagctgcagtagcggttctggctctgggaatgatcctgagcaggacactcgccggattctccatccagatggcatacaattatccgtttacagtactgcttgcagtgcttctgttcgctgcaggatggaatgggagtattcaaaaacaccggatcccctggcaggaggcgggagccttgagcttcgccgtatacctggtacatccggtgtatgtgaacctgctgtataaattcgtaaagatcacaccctttacggtgttggagcaatgcggcgtgcagtctgttgccgcgggacatgtggcattgatcttgctgttgactgtattctgtctggtagtgctggcactggcaacggctactgcgtgggtgctgcgcaagatcccggtgttaagaaaattcgtgttgtgatcagaagtgaaatataggtggcaaatctggttttgcattacaaatatttgataatagcataccccttgccagcagaagacttctatgctagaatgtgcacaaagcatagaagttttctatttctacagatatcttgtgaagttctgaatagcgagtcggaaagtccatgcttttattccaaatttacaacattctaaaataacagcggggttttgaccgcgatatacgtactttgtatgggacataggtatgtctgtttttgctactataatctcataaacatagaatgtctgaacagactggcacttcaagttgtcatagggagaatttatgatagaaattaaaccagaagcgaaaaagacggatggtattacaaattcgttttcagctcacgaaagaggagtatcagaacttgagatgccaaactggcatttcaagtttcgcacaggacgaaaataattatggtggtcgtaggactcttccttatgtatttacagaacagggaatctctatgtttggaattcaatcatcaagcgatagttgctgactttggctgtgatcaagaaggagcctcgaccagaggctccttcttgatttggcttatgatgctagtctgattacttccgctgccaacgtccggaagcaccgcagggcagtaccagtccgctctcggtgacggggaggccgatctcttcggcttccacatgaccgccgaactttttcgtcagggtggaattcatcatataggacagcacggcgggctgcaatcctgtagtgtacgaattgatcaggaagaacagcgcatcatcggataaaagctgtgcggtcagtcctacgaaatcccagatattatcttctattttccagatctcacccttgggacctctgccgtaggaagggggatccatgatgatgccgtcgtatttgttgccacggcggatctcacgctctacgaacttcatgcagtcgtccaccagccagcggatgggagcatcggcaagcccgctggcagcagcgttctcctttgcccagccgaccatacccttggacgcatccacatgagtcacagcagctcctgctgccgcggcggatacagtagcaccgccggtgtaagcgaagaggttcagcaccttcacgggtctgcctgcctcatggatcaggccggagaaccagtcccagttcaccgcctgctccgggaacagaccggtatgcttgaaactgaagggcttcagatggaaggtcagaggatccgtcttgccggaggcttccttctgaaaaggcagggtgtaatgaatcgcccattcatccggcagatggaagaactcccattctccgccgcccttcgcacttctgtggtaatgaccgtttttctgcttccagcccttatgatcgtggggcgtcttccagatgacctggggatccggacggacgagaatataatctccccaacgctctaacttttctccgctggacgtatccagcacttcgtaatctttccaatgatctgcaatccacatatagaaacctttctgtgtgtatactttgtaactaacttttataggacataataatagaatataataccggaaagactttttcaaggaatacttgctattgaaccgcattgagccatttaaagtcctcttcggtcgattcatgacatatttgggtcgattcatgcagcccctggttccgctgcgagaaagtgtggtacgttatctttaagataatggggatcactatgcccagcggaaagaggtaaaacggtatgaaaaaacgagtattgagcatgttactggcatttattctctgtttctcaacactgcccatgacagcattcgcacaggaggctgtacaggaagcggatgcggtgacagagcaggaggaacagcaggaagcagcccctgcggcagagccggaagaacagcaagtagcagtccctgcggcagagcagaaggaagcagaagcagtggcggcaccgggggaagagactccggctgataagagcaccactgcggcaactcccggtacggaagatcccactgcgggcgaagcccccgatactgtgaaatccactggtgaaagcattagcgataatgatgccggcacgcaggacaccgcggcagacgatgagaagaaggcagcagtgcagaaggtacaggcacttatcgacgctctgccggagacagtgacggtggaaaatgcagaaagtgtcagtgcgcagctggaagccattgacgaggctatggagtcactgaccgaggaacagatcgcagaactggatatgacacgacttcatgccatttctgaggcgatgaatgcactgataatggtggcggaacagcatacgcactttctctgtggtaaggatacctgtaatggggtaggcggacatacggagacgaacaaagtcatctttacagcatggaataatgaatctaagctgcccgagattaaaggtaactactatctgatgaaggatgttacattgagcgagtcttggacacctgtcaacggtgtagtactttgtttaaatgggcataatatcaccatgaaatatgatactaatgtcattgtaccaaaagctgggagtacagtcacactctgtgactgcgaggacaaaggacaaatcactcacagcaatgggtataaaggttctggtgcgtttgtggcgggtggaagtactttcaacatgtacggtggtagcattactggaaatacagcacgtacgggtgcaggtgtaaggatgtataacaacggtacctttaatatgtatggtggcaatatcaccgggaacgaagccaaaaactttacttcaaatagtgaaaatgtaggtataggcggcggtgtgtgcatggagaaaaacagcactttcaatatgtacgctggaacaataagtaataacacaggtgaatatggcggtggagtgtatagctatgatgggagcgttttcaatatgagcggtggtactattgaaaataacgaagctactggcaagaatacggcttttggcggtggcggcggagtgaacattgttggcaacactttcaatatgagtgatggtacaattaagggcaataagacgagcacatatggtggtggtgtgtatgtgggttcgaattttaatatgaccggtggcgagattaccggtaatgaagctaataaattcggaggcggtgtgtacgtaaaatccgcatatggtaatatgggtcattttacagtatccggttccgctaaagtctctggtaacacaacgagtaacgtctacctgcctgatggtgcgacgatggccattggccaaggaggatttgacaacactgccagtatcggcgtgaccccagagaatttaccgacagtgggcagctatgttgccatagctacaggtgctgcgaatggtggctatagggacggcacatttatcaatgaccaaaaccaaaatactggtgactgtgaatttcaacaggtgggcgatcagatcctgcttgtcaatggtatgctgcatcaacatcctatctgcggtaatacctgtgaccatgacagcgaacacgccaacgtggcatggaagggtgtctctttacttagtgaaattacaacaagcggttattactatttgacgtgtgatatcaacctgaacgagacatggcaacttcaaagtggtaacgtggtactctgcctgaatggtcataacatcactgcaaatgcgaatgtagatgtaatcaagatatcaaatattgcacagtttattttgaccgactgcatgggtgggaagatggagtacggcaagattacccataaagagggaaatgaagggcgtggtatatatgtcaatagcatcttcaccatgtacggaggggagatcagcggaaacacagctgatgcaccttctgcttctaataaaagatacggcggtggtgtatatgtgtatgatgggtgttctttcacaatgaatggtggaaagattaccagtaacacagcagagttttatggtggcggtgtgtatttaagccgtaaaagcaatttcacaatgaacggaggtagtattactggtaatagtgcccaaataagtggcggcggtgtggaattatgtggaggaaattccggcgacgatagcacattcaccgttagtggcaaagcagtgatcaacggcaactttacgcaaggtagctctataaaagccaacaatgtcgcttgtaacggaacgattatcaacgttgcctctcccggactggatagtgaggcacatattggtgtaagtacaagtgaaattagcgagggagactataaggttgtggcgcaaggcaaaagttcctaccaaatgaaggatacggatgcggaacgctttcatagtgataatggctatgcatcgaaattaataggaaacagcattgtttttatgaatggtacgttgcacgagcatgccgtttgcggtaagacgggctgtacagaggaagatcatgacaataccctgtggatacctttgacttatgacagcgagaaccagagactgcaatatggtggaaaaagtttaaagaagtccacgtataataataaatatactctttcagcgggcaattattatctgtttgctgatattacactcgacggatctattgagattagcggcgatgtaaatatctgtctgaacggacatacaatttctacaaaattatataatagtgtctttgatataaattcgcacaagcttgcggtttgtgattgcagcacaggtcattcggggaaaatagaaataatagataatcatagcgaaacaaagtcgttcgttgtagggttgaatgctgcacagctttgtctgtatggaggtacgattcagggaggcgattatggagtatatagcaatcgttctagtgtgaagcttttcggaggcagcattaccggcaatacaatcggagtagatggttcgtcttacgattcgctaacaattggtggtgatgcaaaggtcattgacaatacaacgaagaatctcaacctgttcggcaaatcagtcatccgtattgataaaagcctgacatcgaatgccaagataggcatcactacagctgctaaaccttcagcgaatgcaaacatcaagattgccaccggtgcgacgaatcctaaactggattattccaagatttttacatccgatgcaacagatcagaattatgtagtcaccaaagatgcaaatggcaatctgtacctgggaattcatcagcacaaatggcaagccactgcagaaggcgctcagattacattcaaatgcagtgcggatggttgtaagttggaaagtgattttgctacaacctatacggttactgcaccgacggatttggatttgatctacagtggcagcgagaaagtcgctacggtaacaaaggatgataagtattctgatggtttgggcttgcccactataccagctattacctatcaggaattaaaagaaacaggatatgttggtattgaaggagcacctaaggatgttggtacatatcaggcttcgattacgattgataacgtaacagccagtgtaacctacaaaattgtgagcaagaaagttgcatatccgaccattgaggttactggaacatatacatatgatggcactgaaaagactccggctgtggttgtaaaggacgaaataaatgagattccttccactgagtacagtgtttcttgtgagaataacatcaatgctggcaacgctaccgtaaaaattacggatgtagatggtggcaactataatgtcagcggaagcacaacatttactatcgacaaagccacgatcacagtgacaccgacggctggtcagacaacaatctatggcatgtcagatcctacgctggaatataactcatcaggtgccatggctggtgagacaccggattttacaggtgcattgtcaagaaaagctggtaaagatgcaggaagctatgagattaccagaggtacacttaaactggcagataatggcagcttcaaggcagctaactacgagctgaagcttgccgataccacggtacaattcacgattgtgccgaagactctgacagcagaggatttagagttcattacagatactccgattaccaaaaaatatgacggcactactacatgtacaacagctaaagtgcagattaaggacaacgcaaaagcagatccaaatgatgaagtgcctacagttacaggtacctatgcttacaatagtgcaaatgtaacagaagccaataaggtgacctttacgtctgatatgacaagcaatacaaactatatccttccgaaagatctaaaactggaacatgaagcaagcattaccaaggcagatcaggcagcattaaccataacttctacctctgcaatctatggaactgatctgcaattgactgttaacggtggcagcggtactggcgaggtgacttacacagtagaaaacggtactggtgcagctacaatgatcgatggcatactgcatcctgtcaaagtaggtgaggttacagttcaggcgacgaaatccggcgatgataactattactatgtccagagcgctagcacaacaattaccattgctaaaggaacctaccccggaacagtcagcaagacggtaaatattatgcgaaaccgcagcgatgtccaggaggacactttgtacgcagaagactttttcccggagggacaggcaccggagtacgctcagactattggtcctagacaggataggggtgaaattgtgaccattaatcggattatacattcatttagaggatatggactttcctataaaagtaaggcaaacattacctccacgacggaccagacctgcacagtaaccatttcttccgataactacaatgacattacggcaactctgatcttccatcctacggacaagatgacagttacgatcgaaggtctgaactataggaacaagacctatgacggcagtgcgattcagccgaccggtacattgcaggttaccggcggcgacgttcctacagacgaactggaagtgctgtatgagggtacaagtgcgaatggtacgaactatagcaacagcaatgcacccaaagatgcaggtacttacaaggtgacctataaagtagctgacagcaacgagaattataccggcgaggtgacgtacccctttaccatttctccgaaggctgttaccgcggatatgattggagcgattgctgatgagacatacaccggcagtgatattacaccgcaacctgttgtgacggatggcaatactatactgacttccggcgcagactttgacttcagctacggcgagaatatcaatgccagcgagaatacagcgaccctgaccatcaccggacaggggaactacacgggaaccgcaagccggaaattcataatcaagccgaaggacattagtagtgcgacaatccggctgagcaacaacagttttacttatgatggtatagcgaagaaagtggaaattgcttcggtaacacttggtgaaaatacaaatattttgactttgacatcacccacggattatgacatcaaagcgggtaatacgttcattaatgcaaatgatgccatcactctgaccatcgctggtaagggcaattataccggaacagcgaccacgacctggaagattaccagggcgactcctgcattggataactttgacgtgactccggatctttcccggaagcagacctacgatggcaaaccgaaagaggtgacagcgaagactaagaacggtgtaatcggcatgggtgatgtaacggtatgctacgagggtatctccggtactacctattccagaagtgaaacagcacccaccaatgccggaacctataaggtgatcctgtccgtagcggaaggcaagaactacaccgcaacagagattgaggcaggtacactgaccattgagaaggcggatcttacagtagaagacgttacagaattcttcgagtacacgaagaagggcgaacagaccatcaacttagcggagcttgtaccgggagcaagaagttatacacctgatgcatttaccaatgacaacggaattgtgtccggagatattactatagatgcgaccggccttatgaagtttgcgttgtctgaactgacgaaacacaatattgacaaaaaggtgaccgtgcccgtgacaattacatcggagaactataaagatgttagagttaatgtgatcatttacatctctccggaataccggatcatcgatggcgcaaacagttcctggacacagaatacggacggtactgtcgtgatccgcggaaacggtgaattttccaggttccatgctgtaaaggtagatggaaaagtgatcgatcctgctaattacgcagcaaaagaaggctctaccatcatcaccctgaaggcagaataccttaagacattagctacaggcagccatacctttgctatcgtctggaacaatggtatcgccggtactaactttacggttgcagcgaatacctccggcaataacagtggtaataacagtaacaataatgacagcaatcatggcagtcataacagcggcaataatgacagcggtaatacggcaggtacggctgccaataccgccgccgcttcggcgcaggaactggacaaggttccggcgaccggagatgcttccggcatctggctgacgctctttgtgatattcctgaccggactcgttggaatgctggcaagaagaaagaagaactaagaataacgtaaataatatagaagcctcgctacagagatgatacctgtagcgaggctttttgtcttgcaatcttatttttcatttaatattgacactatacttagcttttattataatataaatgaaccactgaactcgcgaatgcgatgtaggtggtgttttattttggatatattactaatccatacatatttgtctcatttgctttcaaatttagtttttccgcttcctttaacgtcaccataacccgttttacaaagagtttgtcaattacagttcccactcgtttgggtaactcttctttccgaatttcgattttgaaatataaatgtaaaaaaatgaaacgaaatcacatatttgaataaaataggattctgatgaatttttttccataatatcctcgatcatattgctgatcggatgattgacaaacccaggcaaatatttggattggatcggattaaatgcacgtatagctctggctgtctttctcataggtgctattctgccctcatccgtaatcactaaataattccattgcccatcgctgtcattctcgatacgttgtatattatatttcaatgcattttcaagaacgtgatagttattatctttaaattttttcttatcaataatcacatttacaatctttaaatccatctttgcaattgttaacgtaaatgcttttattatgtcttgttttgtttcttttgaccaatgatactcacgatatggatttttatctgtcaaaaaatgttttgtatgcatctcttctgatacatgaaagccatatttatctttcaattctcttctcaaaatacgcattttttcaaaattttgctgccagctctctgcaggcatatacaaacttgttaaaataaaatggtctgatgaatttattgttactccgtcatcccctgtttcatcaaaatatgctatatatgttttcatcaattcccctttcatattttagacattttaatgccattcatttttaataatgaaaactatggtgattcaccaaaatactgaaattaaataagatttgaaatagaaaatttacttatagattgagaatagcaaactattctcagcctgtcaacatgacaaaataacattcaaagcagactttcacacatcacagcgataacaaactaatctgttgacgataagccatttcttgtatataataaatcgtatcactgtatacaatttagaaaatgtacaggaagaaaaatttgaggaggctattatgacaggaaatacactgggctgggtaattgtggcatttgtgctgtatttactcatgatgatcgctatcggagcgttctatgcaaaaggaaataacaattccgaagattactttttaggaggcagaaagctgaacggcttcgtcgctgcactgtccgcgcaggcatcggacatgagtggatggctgttaatgggactgccgggagctatttacttaaccggtgtcggaggtgacggctggatcgccatcggacttttcatcggcacgacgctgaactggctgttcattgccacgaagctgcgcagatatacgatccgtgccaacaactctgtgacactgccgacttattttgaaaaccgttttcatgatgagaagaaggtattgatgacggtttcttctattactattgtagtatttttcctggtatattgtgcgtccgcactttctgccggcggtcagctgtttgagtcggtgttcggtattgattatcatgtggcgctgaccatcggcgcactggtagtactggtgtatacgtttctgggaggattcaccgcggtatgtgtgacagactttatccagggcatgctgatgctggtcggtattctggcagtaccgctgttcgcttatcattttctgacaaccggcggcactacattgtcagccggtctggaagccagcggcgccgacagcaccaatttcctgaacctgatgaagaacggtgacggcagcaataatatcgtcagcgtgatctccggtctcggctggggattgggatatttcggaatgccccacatcctggtgagatttatggcagtccgggatgagaaggaaatgactaagtccaaggctactgccatcagctgggtagcattatccctgggatttgcagtatttatcggtatcctgggcagagcttatctgccggagctggtgaacggcaacaacgagaaggtatttattgagatgatcaagaaggtatttactatggagatgcgggctccgttcattgcaggcttgttcctctgtggtatcctggcagcgatcatgtccacggcggattcccaactgttggtcagcgcctccagcgtagcggaagatatcttcaagggactgctcaaaaagaatgcggatgacaagaccgttatgaatgtgagccgtgtcacagtactggtagtagctgtgctggcttacatcatcgcatggaatccgaacaacaccgtcatgggactggtatccaacgcgtgggcaggtttaggtgccgccttcggaccgttggtagtgatgtccttatattggaagagaaccaacttccccggagcggtagccggaattgtcacgggagcacttgccgttatcatttgggattatattcctctcgtgggcggacagaccctgggcaaagctaccggattgtattccctggtagtaggcttcgggctgggacttatcgctatcatcgcagtcagcctcgctactaaggctccttccgaagaaatgctgcaggagttcgaggacgtgaaggcaaaccggctgtaatcgatcatttacgaagtaaatattgacagacaaaaatactgatggacagcgaagatatctgcctgtcagtatttttatgtatttgtgctgacgagggtatggaattcagaaacaagctatctgtacccaacagaacttgttggcgagggtatagaattcagaaacaa

SEQ ID NO: 11434 - DNA, 24273 bp, Unknown
  gut microbiota DNA sequence
gagacaaaatcaggtcgaatatacccaccggccttcgcagacgcgggtatgtgagataaaatcaggtcgaatatacccaccggccttcgcagacgcgggtatgtgagacaaaatcaggtcgattatacccaccgactttcacagacgcgggtatgtgagactaaaccaggtcgattataccctccacctttgtacatcggggcacagataaggattttaccgtaataagccccgtcgctggcagaatatcggggcacagataaggattttgccgtaataagccccgtcgataccgggatatcggggcacagataaggattttgccgtaataagccccgtcgctggcaggacatcggggcgcagaaaggaattttgccgtaataagccccgtcgataccgggatatcggggcgtagataaggattttgccgtaataagccccgtcgatactggaatatcggggcgcagataagaattttgccgtaataagccccgtcgctggcaggatatcggggcacagataaggattttgccgtaataagccccgtcgctggcagaatatcggggcacagataaggatttttgccgtaataagccccgccgctggcagaacatcggggcgcagataaggattttgccgtaataagccccgacgtcatctgagagcatccaggggacggtttcacttgtcataaaaaataatgggcaatattatactaggcaatattatatataagaagaaactcacaaaaatacagtggcgaacctgtgcaaaacagcaaaaagaaattgtatcaaaaaaaatacaatttttttaaaaaaagtcttgcaatgcccataaattcaatgtatactaatccttgctgtggcatgatagctgtgaagcgtgaggttgccggttcccagtaatggagatcgggttttccgtggagcgaatgtcaagttagaaaactgacggcaagtcactgtaccaattaacatctgccttgagcagtaacaacgtgtaagtttatggccggagagaagaaagcgttgcacaaaggtcgcagacacacacgggaaagtgtacagtcaccgcttgtccgtacaaaaagtaagtatttacttacaaaagtgcgaaaaggaggcgactttttttatggcaaatcaggtaatgagaattacattgaaagcttatgaacatcagcttgttgatgcatctgccaaaaaaatcatcgaaactgttaagaagaccggatctcaggtaagtggtcccgtgcctcttcctaccaagaaggaagttgttaccattctgagagcagtacacaagtacaaggactccagagaacagttcgagcagagaactcacaagagactgatcgacatcatggctcccactcagaagactgttgatgctcttcagagactggaaatgcctgccggtgtttacatcgacatcaagatgaagaacaactaataagcattcaaagtaaagccaaacaacaaaacctctacttagacgtaagaacacagcgcgatgaacaatcgccggggaaatacgcacagcgtatttctaagcgtttcacagaaacgctttggtccgctatgtagaacacaggaggtaaaaatgaagaaagcaattttgacaacaaaagttggaatgacccagatcttcaatgaagatggcgtgctcgttcccgtaaccgtgcttcaggctggtccctgcgtggttactcaggtaaagaccgtggagaatgacggctacagtgctgtacaggtaggcttcgttgacaagaaggataaggttgttaacaaggatgccagcggcaagaagcagatcgtacacagacatggtgttaacaaagcagagcagggccacttcaagaaggctggcgtaagctccaagagatatgtaagagagttcaagtttgagaacgctgaggagtacacccttggtgcagagatcaaagctgacatcttcgctgcaggcgataaggtagatgcttctgcaatttccaaaggtaagggcttccagggcgcaatcaagagatttggacagcacagaggacctatggctcatggttctaagttccatcgtcatcagggttccaatggtgcatgttcctcccctagccgtgtattcaagggcaagggaatgcctggacatatgggttgtgtaaaggtaactgttcagaatcttgaggtcgtaagagtagatgctgagaagaatctgcttctggtaaagggcgcagtacccggacctaagaaagctttagtaaccatcaaagagaccgttaaggttgaggcatagtttaggacgaaaggaggaccaatcagatggcaaacgtatctgtttacaatatggaaggcaaagaagttggtacaatcgaattaaacgatgcagtgtttggtgttgaagtgaacgagcacctggtacacatggcagttgtacagcagcttgcaaataatcgtcagggaactcagaaagcaaagacccgttctgaggtatccggtggcggaagaaagccctggagacagaagggaaccggtcatgcaagacagggttcaaccagatctccccagtgggcaggcggcggcgtagtattcgctcccgttcccagagattactctttcaagcttaacaagaaagagaagagagcagctctgaagtctgcactgaccagcaaggttcagggaagcagcctgatcgtagttgatgagctgaaattcgacgagattaagaccaagaacttcaccaatgttatgaataacttaaaggtagaaaagggactggtagtgatcgctgataacgatattaacgtagttatgtctgctagaaacgtagctgatgtagataccaccctggtaaataccatcaacgtttacgacgtaatgaaggctaagacagttgtcctgaccaaggatgctgttgcaaagattgaggaggtatacgcataatggctgatattaaatactatgatgtaatcctcaaacccgttattaccgagaagagcatggccggcatgggcgagaagaagtacaccttcctcgttcacaccgaagctaacaagtctcagatcaaagaggctgttgagaagatgttcgaaggtaccaaggttaagagtgttaacaccatcaatatggatggcaagaacaagagacgcggaatggttaccggcaagactgccaagaccaagaaggcaattgttcagttaactgcagatagcaaagagatcgagatcttcgcaggtctgtaagaataaagctactgcttaagattcaagtatgcggcacttaagtgctcgcgcaaaaaatcatcgtaaaggagatacagtaatgggaattaagacatacaacccctatacaccttccagaagaaacatgactggttctgacttctctgagatcaccaagacctctcccgagaagagcctgtgtgtttccctgaagaagaactccggccgtaacaatcagggtaagatcactgtaagacatcgcggcggcggttccagaagaaaatacagagtaattgatttcaagagatacaaggatggcattcctgcaaccgtaatcggtatcgagtacgatcctaacagaacagcaaacatcgcgctgatctgctacgaagacggtaccaagtcctatatcctcgctcccgaaggtctgaccgacggaatgaaggttatgaacggtgcagaggccgaggtcagagtaggtaactgcttgcctctgtccgagatccctgtaggtactcaggtacacaacattgagttatatcccggtaagggcggccagctggttcgttccgccggtaacagcgcacagctgatggcaaaagaaggtaagtacgctactcttcgtcttccctccggtgagatgagaatggttcccctggtttgccgtgcaactgttggtgttgtaggtaacgttgatcatagcctggttaagatcggtaaagccggacgtaagcgtcacatgggcatccgtcccaccgtacgtggttccgtcatgaaccccaacgaccatcctcatggtggtggtgaaggtaagaccggtatcggtcgtcccggccccagcacaccttggggtaaacctgctcttggtctgaagacacgtaaatctaagaaggcttccaacaagctgatcgtaagaagacgtgacggcagagcaatcaaatagttaaggaggaaagatcatggctagatcactgaaaaaaggacctttcgcagacgcaagcctgttaaagaaagtcgacgctttaaatgcatcaggacagaagcaggttattaagacctggtcccgtcgttctacaattttcccttccttcgtaggacatacgattgctgttcatgatggtagaaagcatgttcccgtatacgttactgaggatatggtaggccacaagctcggtgagttcgttgcaaccagaaccttcagaggccacggcaaggacgagaagaaatccaaggttaaataataattttattgacctggagctaaaaatatgctatcttatatagatggctgggagagctatgcgctctcccgagggtcttccctcgaaattatatattaagaggaaagaagacaggatatttttgtgcgcagcacttaggatacacacgggtgcgttgcgcggtttcagtttgaaaggaggaccaaatctatggctaaaggacatagatcccaaattaagagagaaagaaacgctcagaaagatacaagaccttcagctaagctgtcttacgcaagagtatctgttcagaaggcttgtttcgtattagatgccatcagaggcaaagacgtacagactgcacttggtattctggagtacaatcccagatatgcttccagcctgatcaagaagctgcttgagtcagcaatcgctaatgctgagaacaataacggtatgaataccgagaacctttacatcgcagagtgctatgcaaataaaggacctaccatgaagagagtaaagcccagagcacagggcagagcttatagaatcgaaaagagaatgagccacattaccatcgttcttgatgagaagaagtagggaaaggagctattgaaaagtttatgggacagaaagttaatcctcacggcctgagagtcggtgttattaaagattgggattccaagtggtacgctgatgcggagttttccgattatctggtagaagactacaacatcagaaagttcctgaagaagaaattatacagtgcaggtgtttccaagatcgagatcgaaagagcatctgacagagtaaaggttatcatctatactgctaagcccggtgttgtgatcggtaagggcggtgctgagatcgaagtaaccaagaaagagctctccaagttaaccgataagaaggttatggttgacatcaaagagatcaagagacctgacagagatgcacagctggtagctgagaacattgctcagcagctggagaaccgtgtatccttcagacgtgcaatgaagtcctgcatgggcagaaccatgaagtccggtgctatgggtatcaagacctgctgttccggtcgtctgggcggtgctgatatcgctcgtgctgagttctacagcgagggaaccattcctctgcagaccctgagagcagatatcgactacggttttgctgaagcaaacaccacctatggtaaagttggagttaaagtttggatttataaaggcgagatacttcctacaaaaggaaatcagatggaagggagcgataaataatgttaatgccgaagagagtaaaacgtcgtaaacagttccgtggatccatggccggaaaagcttccagaggtaacaccctggcatatggcgaatttggtctggttgctacagaaccctgctggatcaagtctaatcagattgaggcagcccgtattgcgcttacccgttataccaagcgtaccggtaaagtatggattaagattttccccgataagcccgtaactgtaaagcctctcggtactcgtatgggttccggtaaaggcgctgtagattgctgggtagcagttgttaagcccggacgtgtaatgttcgagatcgctggtgttcccgaagaggacgctcgtgaagcattacgtcttgctatgcacaagctcccttgtaagtgtaagatcattgctaaggcagatgtggaaggcggtgtgacagaatgaaatcaaataaatttgtagaagaattgaagacaaagtccgatgcagaactggcacaggagctggtagctgctaaaaaagaacttttcaatttgagattccagaacgcaaccaatcagttagataatactgcaagaatcaaagaagtcagaagaaacattgcacgtattcagactgttatcaccgagaaggctagagcgtaacgcgtgggtgcgtagaaaggagatcaaaccgtggaaagaaatttaagaaaaacacgtactggtaaagttatcagtaataagatggataaaactattgtagttgcaatcgaagagcatgttaagcatcccctttacaaaaagatcgtaaaggacacctacaagctgaaggctcatgacgagaataacgagtgcaacattggcgatatcgtaaaagttatggagacaagacccctgtccaaggacaagagatggagacttgttgagatcgtagagaaagctaaataaattagtttgtaagaaaccgtgaaagcggtgaaggaggaataacatggttcagcaggaaagtagactgaaagttgctgataacaccggcgcaaaagagttactttgcattcgtgttatgggcggttctaccagaagatatgcacagatcggcgatgtgattgttgcttccgttaaagatgcaacaccaggcggcgttgtaaaaaaaggtgatgtagtaaaggcagttgtagttcgttccgtaaagggcgctcgtcgtaaagacggttcttacatcaagtttgatgagaatgctgcagttatcatcaaagatgacaagactcccagaggaacccgtatctttgggccggttgcaagagagcttcgtgagaaacagttcatgaaaattgtttccctggctcccgaagtattataaggaggttgccacatgtctacaatgaaaattaagaagggcgacaccgttaaggttatcgccggtaaagacttaggtacagagggcaaggttctctctgtagacgtaaagaatcataaagtcctggttgagggcgttaacaagatcacaaagcatgcaaagccttctcaggcaaaccccaatggcggtattgttgagaaagaagctcctattgatatttcaaacgttatgcttgttgtaaaaggcaagaccacaagagttggcttcaaggttgaagacggcaagaaagtacgtttcgcaaagtcaacaggcgaagtgattgactaatcaataggaaggaggaaatataagtgagcagactgaaagatttatataacaatgagatcgtcgatgctatggttaaaaagttcggttacgctaatgtaatggaagttcccaagctcgacaagatcgttatcaacatgggtgttggtgaagcaaaagaaaacgctaagatccttgagaatgcagttgctgatatggaagctatcaccggacagaaggcagttctgaccaaggctaagaattccgtagctaacttcaagatccgtgagggtatgcctatcggatgtaagaccactctgcgtggcgagaagatgtatgagttcctggatcgtctggttaaccttgctcttcctcgtgtccgtgacttcagaggcgttaaccctaacgcattcgacggcagaggtaactatgcactcggtatcaaagagcagttcatcttccctgagatcgagtacgacaagatcgacaagaccagaggtatggatatcattttcgtaacaactgctaagaccgacgaagaggcacgtgagctgctgagactgttcaacatgcctttcgcaaagtaatcaaggaggtaaattctgatggcaaagacatcaatgaagattaaacagcagcgcaaacctaagttctctactcaggcttatacccgttgcaagatttgtggtcgtccccactctgtactgagaaaatacggaatttgccgtgtttgcttccgtgaactggcatacaagggcgagattcccggagttaagaaggcttcttggtaagagcgaaaagattttctaagccagctaaatacgctggctaacaaaatctaagtttcgctcctaagagaattttgccatgcaaaattctccgagacgaaaagaaatccctatgaaattcttcggagcgaaaagttttaacttagtttataagagtaatcttataatatagatggtatatacaaaatgtatgtacttagcatgattcaagtcaaataataaggaggaaactaaatcatgacaatgagcgatcctatcgcagatatgcttacaagaattcgtaatgcaaatactgcaaaacacgacaccgtagacgtaccttcttccaagatgaagctggctatcgcacagattctgctggatgagggatatattaagaagtacgacatcgttgaagacggtggtttcaagaccatccacatcactctgaagtacggcgcagacaagaacgagaagatcatctccggtatcaagagaatttccaagcccggtttacgtgtatatgccggcaaggaagatctgcctaaggttctcggcggtctgggtattgctatcatttctaccaaccagggtgttatcaccgacaagaaggctcgtgagcttcaggttggcggcgaagtattagcattcgtttggtaaggatgaaaagattttctaagtcagcaaaatacgctgactaataaaatctaagtttcatccctaagagaattccttaaggaattctcctgtgtaactattgtttttctatagaattataggaggtacgggcatgtccagaataggtagaatgccaatcgcaattcccgcaggtgtaactgtagaagttgcagaaaataataaagtgactgtaaaaggtcccaagggtactctggaaagagtattaccctctgagatggatattaaagtagaaggagcagaagttcttgtaagcagacccaatgatctgaagaagatgaagtctcttcatggtctgaccagaactctgatccacaacatggtagtaggtgttaccgaaggtttcgagaagaaactggaagtaaatggtgttggttacagagcggctaaatccggcaagaagctgaccctgaaccttggttactctcatcccgtagagatgatcgatcctgaaggcatcgagactgtagtcgatggtcagaacctgatcactgttaagggtatcgacaaagaaaaagttggacagtttgcagctgagatccgcgacaagagaagacctgagccttacaagggtaagggtattaagtatgccgatgagaccatcagacgtaaagttggtaagactggtaagaaataatagataaggagagtatgaagatggttagtaaagagtccagacagttagtacgtgcaaaaaagcacatgaaaattcgtaaccgcttcagcggcactgctgaaagacctcgtcttgcagtgttcagaagcaataatcatatgtatgctcaaattatcgacgatacagttggtaatactttagtatctgcatccactcttgagaaagagatcaaggcagagctggagaagaccaataacgttgatgcagcagcatatcttggaactgttatcgcaaagagagcaatcgaaaagggcatcaaggaagtcgttttcgaccgtggcggtttcatttatcagggtaaagtagcagctttagccgatgcagccagagaagctggcctggaattctaggaaaggaaagaggaatacaccatgaaacacacaatcatagatgcaagccagttagagttaaatgataaagttgttaccatcaagcgtgtaaccaagaccgttaagggtggtcgtaacatgagattcaccgcactggtagtagtcggcgacggcaacggccatgtaggcgctggtctgggaaaggctgtagaaattcccgaagctatccgtaagggtaaggaagacgctgttaagcacatcgtagagatcaatctggatgagaacaattccatcacccatgatttcatcggtaagtatggttctgctaacgttttactgaagaaggctcccgacggtaccggtatcatcgctggtggtcccgctcgtgtcgtttgtgagcttgcaggtatcaagaatatccgtaccaagtctcttggctccaacaataagcagaacgttgttcttgcaacaatctccggtttaagccagatcaaggctcccgaagaagtagcaaagaatcgtggaaagtctgttgaggaagttctggcgtaagccggatcttcccgttaagttgacagggccaacagaaaggagtagagtatggcagacaagaagttaaagatcactctggtaaagtccactatcggtgctgtaccgaagaataaagcaatcgtggagtctatgggactgcgtaagatcggcaagtccgtagtactgcctgataatgatgcaacaagaggacagatccgtcaggtgaatcatttgatcaaggtagaagaagcataatcagataaggaggtgttaggaatggaattatccaatttaagacctgcagaaggttccaaacacagtgataattttagaagaggccgtggacacggttcaggaaatggcaagaccgcaggtaagggtcataagggacagaaggctcgttccggagctcccagacccggtttcgaaggtggtcagatgcctttatacagacgtattcctaagagaggtttcacaaatagaaacactaaggaaatcgttgctatcaatgtaagtgctctggagtgctttgacaacggtgctaccgttgatgtaaacgcattagttgaagcaggaatcattaagaaccccagagatggagtaaagatccttggaaacggagaacttaccaaaaagcttgatgtaaaggtagatgcattcagtgcatccgcaaaagaaaagatcgaggctcttggtggaactgctgaggtgatgtaatgcttacaacactgaaaaacgcatttaaaatcaaagaaatcagacaaaagattctttttacactgggaatgttagttgtgatccgtatcggatcacagcttcccgtacccggagtggacacgaagttcttttctcaatggtttgcccagcagacaggcggtgcgttcagtttctttgatgccattacgggcggttctttcctgaacatgtctattctggcattgaatatcaacccttatattacatcttccattatcatgcagctgcttacaattgctattcctaagctggaagaaatgcagcgtgatggtgaagacggccgtaagaaaatggtcgctatcaccagatacgtaaccatagcgcttgcactgatccagtccacagcaatggcaatcggtttcggcagacagggctatctgatcgagtttaatgctctgaatgtaattaccgctatcacagcacttaccgccggtagtgctttcctgatgtgggtgggtgaacgaatcacagaaaaaggtatcggaaatggtatttccatcgtactggtgatcaacatcatttccagacttcctcaagacctgagcaatctgtttgagcagtttgtgttcggaaaagctccggcaaccgcaattcttgcagtagtgatcatcttcgcaattattattgccatggtggttctcgttatcatcttaaatgatggtgtgcgcaagattccggtacagtatgccaagaaaatgcagggcagaaagatggtcggcggacagacctccaacattccgttgaaggtaaatacttccggcgttattcccatcatttttgcacagtccattctgcagttcccgattattatctgttcttttatcggatataacggaaccggcgtgtgggcagagatcctcaagggtctgaattccggttactggtgcaaacccagccagccgatttattccctgggacttttgctttacattgtattgattgtattttttgcatacttctatacatccattacatttaatcctttgatgattgccgataatatgaagaagcagggcggttttatccccggtatcagacccggtaagccgaccagcgattatctgaataagattctgaattatatcgtattcatcggtgcgatcggcctgatcattgtatctgtgattccgtacttcttcaacggtgtgttcggtgcaagcgtatccttcggcggtaccagcctgatcattatcgtaagtgtagtactggagaccatgaagcaggtagaatctcagatgcttgttcgtaactacaagggattcctggaagattagtagcataacagtaaccggatgattaaagatcatccggttatttttgtattatgggaaaatctattgcaaaaaatccgcataaaagttaaaatataaatgttgggctgtatttgtagcttatccatagaagagcagagcctgcagctgcaggcagataggagcagatatgaagattatcatgttaggcgcacccggcgcaggtaaaggtacacaggcaaaaatgatcgctgagaagtatggaattcctcatgtatccacaggagatattttccgtgcaaatatcaagaacggaaccgagcttggtatggaagcgaagaaatacatggatcagggtcagctggttcccgatgaactgaccgtcaagatccttttagacagagttgcacaggatgattgcaagaacggctatgtactggatggattccccagaaccattcctcaggcagaggtactggacaaggcactgaccgagctgggagatgcgattgattttgcgatcgacgtaaatgttcccgatgagaatatcgtgaagagaatgtccggcagacgcgcatgtctgtcctgcggcgcaacctatcatatcgagcacattccgcccaagaaggaaggcatctgtgataagtgcggacaggaactggtactgcgtgatgatgataagcctgagaccgtattgaaccgtctgaaggtatatcatgaccagacccagccactgatcgatttctataccaagaaaaatgtattaaagaccgtagacggcaccaaggatatgaaagaggtatttgcggatatcgtagcaatccttggctaagaatagtccggatccctgacaaacagcagaaaaatccggaacggaaaggtgaataaaatggcagtaactatcaaatcacagcgtgagatcgagctgatgagagaatcatgcaaaattttggcggatgtattcagccagatggagaaggcagtgcaccccggtgtatccactctggatatcaacaatctgggtgagaagctgatccgtgcccacggctgtattcccaacttcctgaattataacggatatccggcttctatctgtgtatctgtgaatgatgaagtcgtacatggtattcctcacaaagatcatattcttcacgagggtgatattgtaagtctggatgcaggattgatctataaggggtatcattccgacatggcacgtactttcccggtaggtcaggtcagtgaagaagcaagactcctgatggagagaaccaagggaagctttttcgcaggaatcgagatggcgaaggcgggcaaccacctgtatgatatttccaatgccatcgatgcttatattaaaccttttggttatggcatcgtaagagatctggtaggccatggtatcggcaccagtctgcatgaggatccgcagattcccaattttgcacagcacagacgtggattgaagttacaggcaggtatgacgctggcgatcgagcccatgatcaatatcggaagaccggatgtggcatggctggatgacgactggacagttgtcaccgaggatggatccctgtccgcacattatgagaatacggtcctgatcacggacggcgagcccgagatcctgaccatgtattaagagtaatccactgcgattataatgcgtaagaaaggttagacttacggtatgataggagaacttgcaacttcaaaagccggtcatgacaaggacagattgtacatgatcgtcggtgaagagggagaatgtgtttatctgtgtgacggaaggctgcgtggtgtagaacatccgaagaagaaaaagaaaaagcatatccagatcatacattcttcggcacaggacacactgatccagatcataaagcagaatcttccgggggagcgggacgagatcaacagacagatccgcaagaccctggaggattatctgagtaataagtaatgtaaagaagtaaaaagtagaaagctatggaggaattttatgtctaaaagtgatgtaatcgaaatcgaaggaaccgttgtggagaaacttcccaataccatgttccgtgtagaattggagaacggacacagagtgctggctaccatcagtggtaagcttcgtcagaacttcatccgcatccttcccggagataaggtaacactggaattgtctccttacgatctgagcaagggacgtattatctggagagataagtaagtacaatctggagagaaaatagctatggctaaaaaaatacgtaactttgctgctattctggcgatcagtgcggtagtgggaacgatgcttttggtattggtattcctgcttccggtagggccgatgcgcaggaatgtggagaaaagtgttggggatatgctgaagagcggtgatgagatcccggaagacgcattctcaaagtacttgtggaaaaacagagagacttacaccgatgctatcatggtacagaatgccatagagagactgccggataaaaatgcttatgaacatgccatgtggatgtaccattatgatctggaagaggacgtgtggacgccggaagattccctgaaggctttttgtgaatcccatgagaatgtcaataacatgtaccttcatatttatgcgaggtactggcacggctatcttttatacttaaagcctttgctgctgttgttctcctggaagcatgtggtatggctggaactggcggtacagatcgcacttatgatctgggtactgatcacggcaatacgaaaacagaatgcaggtgtcgcagctgtgaccctaggaagctttctgttcatgaaaccgttactggtgctgatctctctgaccatgtcggtatgctggatactgacgcttctggcggtggaatatatgcttttgcatcatgacagattgcatgacaaggggtggtatccggaatttttcctgattgtcggaatattgacttcttattttgattttctgacgtatcctattgttacgttgggaattcctctgtgcagttatttcttattagaaaatgacagagcatggaataatatcaaaaagctgatcggcttctgcgcaagctggggaatcggctatgcgggaatgtgggcagcaaaatgggtcattgcagacctgactttacataccggtacgatcaaagatgctatttggtccattatcggtcgtacagaggcaatcggcggcagaccgcggatgaacggagggttctatgtgatcggactgaatcttcacgaatatccggtttatatgggaatcgccgcaggcatcctggccgcagtggcagtaggactgatggttatgatcattgttatgggaagatggaagaatgtgtatgcacagttacttccggtcgttgtcacagctgcaattccttttgcctggatcattgccgtacaacatcattctgcgttgcatgcaaggtttaccttccggattttgagcgttgcggcggctgcagccattacttttattgttttgatcgtaaagcaggcaaaaagatcacaaaaaagttgaaaaaacctaaaaaatattgaaaaaagcgtaagaatacgcttgcaaaggaaagatcgtcatgctataatgtaagacggtcttttttgaaaggagggtttaacatgaaagttagatcatcagtaaaaccgatttgcgaaaagtgcaaaatcatcaagagaaaaggacgcatcagagtaatctgtgagaatccgaagcacaaacagagacagggataatcaccgcttgatcgtcatttgatcaggtatgtgagttcttgtccggttattatgtgcggctgaattgatcattatcaaaaatatcaattttcataatagatttggatagagcttacgggagattacttgttgataccacggtgaaaagaatttcttaaattatcgtcgtggaaagatcggatcgtgtccgattgggtgagagccccaatcaattagtaactattgagcgtacaactaacagaccaaacgtacgcacgcacaacgaaagttgtgagcgcagaaatgttgcgcaaagcgtaagagattacgcaggaaaatggaggaaacgtaaatggctcgtatcgcaggtgtagacttacctagagaaaaacgaattgagatcggtttgacctatatctatggaataggcagacctactgctgacaagctgttagcagaagcaggtgtaaatcctgataccagagtgagagatattaccgatgatgaggtaaagaagatcagtgaagctatcgaaaagcttggcgttatggtagaaggtgatctgagaagagaaatcgctctgaatatcaagagacttcaggaaatcggctgctatcgtggtattcgtcatcgtaaaggacttcctgttcgtggtcagaagactaagaccaacgcaagaactcgtaagggacctaagcgcacggtggcaaataagaagaagtaattgagatcaaaatgtaactgtgagagggaagcaaatgtaagcatccccaggaaatgagaaagtaggttagtttaaaatggctaaaaaagttgcaaagaaagtaacaaaaaagcgtgtaagaaaaaacgttgaacgcggacaggcacatattcagtcttcttttaacaatacaatcgtaacgttaacagatgctgaaggtaatgctcttagctgggcaagtgccggtggtcttggttttagaggttcaaagaaatctactccatatgctgcacagatggctgctgaaacagcaacaaaggctgctcttgttcacggattaaagtccgttgacgtattcgtaaagggtcctggttcaggacgtgaagcagcaatcagagctctgtctgcaagtggactggatgtcttaagcatttgtgatgtaactcctgtacctcacaatggatgccgtccgcctaagcgtcgtcgcgtttagtgagaaatcgtcagaagacgaaacaattaattttaatgaagtaacattagaacaagttggatgaaagtgccgcattgcggcactgtaaacaaccctcggaagtcacttccgaagtataaagaagggaaaataaaaaaatggcagtaaatcgcgtacctgtactgaaaagatgtagagcccttggccttgagccttcttacctgggctatgacaagaagtctaacagaacctctgcaagagcaggcaaaaaggtatctgagtacggacttcagttaagagaaaagcagaaggctaagttcatctatggcgttctggagaagcctttccgtaactactatgagaaggctgatagaatgaagggcatgaccggtgagaacctgatgaccctgttagagagcagactggacaatgtagtgttcagaatgggttttgcaagaaccagaagagaagcaagacagatcgttgaccacaagcatgtacttgtaaacggtaagtgtgtaaacattccttcttacctgatcaaggctggcgatgttatcgagatcaaggagagcgctaagtccatgcagagatacaaggatatccttgatgttactgctggaagattagtacccgaatggatcgatgctgatgttgagaactttaagggaaccatcaagaatctgcctaccagagagatgatcgatgttcctgttgacgagatgcttatcgtcgagttgtactccaagtaagttttatgtaaccccaatgaacatttcctgtggaatattattccatgggatattgttcgtaagaacatgtcaacatataaagttcgcaaaggagggtattggcagtgtttgattttgaaagacctaatattgaggttagcgagatttcagaagacaaaaagtatggtaaattcgtagtaaaacccctggaaagaggctatggtattactctgggtaactccctgagaagaatcatgctgtcttccctgcccggtgctgcagtgagccagatcaaaattgaaggtgttcttcatgagttcagttctattcccggcgtaaaggaagatgtatctgagatcatcatgaacatcaagagccttgcaatcaagaacaacagcgagaccaatgaggctaagactgcatatatcgagtttgaaggcgaaggtgttgtaagagcttctgatatccagtgtgaccaggatattgaaattctgaaccccgaccttgtaatcgctactctgagcggtaaagataccaaactttacatggagttaactattacaagaggccgcggctacgtaagtgccgacaagaacaaacacgaagatttaccaatcggcgtaattgccattgattctatctatacacctgtagagagagttaacgttacggtagaaaatacccgtgtaggtcagagtactgatttcgacaagcttacattggatgtatacaccaacggaaccctggctcccgatgaggcagtcagcctggcagccaaggtgctcagcgagcatctgaacctgttcatcgacctttccgaaaatgctaagaccgctgaggttatggtagagaaggaagatgacgagaaggaaaaggttctggagatgagtattgacgagctggagctttccgttcgttcttacaactgcttgaagagagcaggtatcaatactgtagaagagttaaccaataagacttcagaagatatgatgaaggttcgtaacctcggacgtaaatctttggaagaagttctggctaaactgaaagagctgggattacagctgaaccccagcgatgagaactaatttcagctgaacataaaaagttagatttccgtatccggtaagcccaaagtgttcggatgcggtttatctctaaatggcaaaaaacaacgcattcggtaagtaagtccaaagtgcatggccggatgtaccatgaatggagaaaggaaaattatcatggcaaagtacagaaaactcggcagaacatctgcacagagaaaggcattattaagaaatcaggtaactgcagtgatcaacaacggcaagatcgttaccaccgaagctaaggctaaggaagtacagaagatcgttgatggactgatcgctctggcagtaaaagagaaggataacttcgaaactgttaaagttaccaccaaggttgcccgcaaggacaaggacggcaagcgcgtaaagcagatcgttgacaaggagaccggtaaggtcctggctgagtcccatcgcgataaggatggcaagctggttaagatcgagaacggtgttaccgttactgtatacgacgaagttgagaaggagatcaagaaggatctgcctaccagatctcatgcacgtcgtcagatgctgaaggttctgaaccctgtagttgaggttcccgctgatgtagcaggcaagaaaaagaacaccaaggaagttgacctggttgcaaagctcttcgatgagtatgctcccaagtatgctacccgtaagggtggttacaccagaatcgttaagatcggtcagcgtaagggtgacgcagctatgactgttgttctggagttagtttaatccataacttataagcagacataaaaatagcgctttcggaaataagttggtttatttccggaggcgctttttgtgtattcaaagtatacaaatcgagtaggagacagtctactcgattattacaggaaaatgattgcttacaagcggcttactccactaccttctgaaaatgctgataatccttgcaggagttccagtgacctccccaggtgaaaccatgttccttaaataactgatagcacagatcgttttcgtcaattttgtaggggaaggaagaggttctgtctgcataggcggaagcgtttgcaggagataccttttcgctgccatccttattgtaagtaatataaggattataaaagggattgatatcgatcgccagccctaatgcatgcttggacagggaggaagttccttccaccgggcggtaattgaagcaggaggtattgttatcctccatggatgcgaggtcatccccatcatattcatcgatcaaaagtaccttttccagctgatattcattacaatacagctcgtagaagatctctgtcaggtcctgcgcgatcgccttgttacagattaattccccttctgcaggatttccttcaaaattataatgccttatatgtacatagcgcagatcgtcatagctgatttcgacagatttcaacagtgtttccgaagaactatcagagttatccacagtggctggataagaaacacctgttatgtatctctgtaatttttcggataacggctcataatagaagccgtcggacagcgtggtccgctggtcggtcaatagctctccgttcagggaataaccggtcaaaacagtagtttctgccatggaagatccttcctgcaagttttctgtcgcattttcattggaattgtcgacgactggtgtaggctccggggtaggtgacggctctgccgtctgataagccagggaaggattgtccaccgcataatcccccagagtgtaggaattgtgttgggatacccttagcagtcctcctgccacgacagtgatgagcgcaaggatacccaccatcttccatattttattgcgatcgatcggattcatagaatgcctcctcgttttattttctgaaatgttctgcaatagaaagatacaaccataactataaaggtttttggaaagcagtacaagagattttgaaaaagtcgggtcagttccctgttaagtgttgtaaatctgtgcataatctagtaaaataggaacgatatcttgcaaaagcagaagacagctgattctccggcactaagcgaatatggaatggagattatttatggagatcattaaagcagataatgtagtatatgaatatattcgtcgggatgaagagggaaatgtggaagggatcacaaaagcagtgaatgatgtttctcttgatatagagcagggacagttcatagctatcctcggacataacggttccggcaagtctactctggcaaagcatatgaatgccatcttaaatccgacagagggaacactctgggtcgatggtatggacacgaaggatgaggacaacatctggaaggttcgtcagacagccggcatggtgtttcagaatccggataaccagatcataggacaggtagtggaagaagatgtgggatttggtccggagaacatggggatccccacggaggagatctggcagcgtgtggaagagagcttacgtgcggtaggtatgtacgaatatcgaaagtattccccgaataagctgtccggtgggcagaagcagagagtgtccattgccggagtactggccatgcatccaaaatgcattgtattagatgagccaactgccatgctggatcccagtggacgtaaggaagtcatccgtgcagtccgtggattgaatcaggtggaaggtgttacgctgatcctgatcacccattatatggaagagatcattcatgcggacaaggtatttgtcatggatgagggaaaaattgccatgcagggtacaccccgggaaatcttttcacaggtggagcagctgaaaaagctacggctggatgtgccgcaggtaacgctgttatcgtatgaattgcagaaacgcggaattccgctgccggatggcatattgacaagagaagagctggtcaatgcactgggctatggaaaaaccgacaggaaatagtggcggggatggcagcgaatgaaagtacccgggaaaggatcgaaaaaatgtctatcatattagatcatgtgaattatgtatacggtgcagatacaccgctggcagttcatgccctgaacgatgtctgcctgaagataccggatggacagttcatcggtatcatcgggcataccggttccggtaagtccacgctgatgcagcatatgaacggattgatccgtgctaccgacggacatatctattttaacggagaagatatctacgacaaggattatgatatgaagaagctccgcagcaaggtagggctggtgttccagtatccggagcatcagctgtttgagatcgatgtattcagcgatgtctgtttcggaccgaagaatctgggactggataaaaaggaagtggagcttcgtgcatacgatgctctgaaaaaagtaggactgccggatgagcttttctatcagtcaccctttgaactgtccggtggacagaagcgtcgtgtggcgatcgccggagtactggcaatgaagccggaagtgctgatcctggatgaacccactgccgggctggatcccaagggaagagatgagatcttacagcagatcaaaaagctgcagaccgagacaggacttacgattctgctggtatcccacagtatggaggatgtggcggaatacgtagaccgtattattgtgatgaacaagggaagcgtcatgtatgacgataccccgagagaagtgttcaaacattacaaagaattggaagaagtaggactggcagcaccgcaggtgacctatatcatgcatgatctgaaagctcggggcgcggatgtggatgtagatgccacaacgatcgaagaagctgcggaagaaattgcgagagtctggaaacagaaaaatcagaagtaatgatttgaactgcaatgcccaaattgcagcatgagcagagagaagatacgagttctgacccgacaggagccgggcagaaactctggtgaggagcaatatgcttagagatattacattaggacaatattatcagacggaatcattgattcataagatggatccccgggtaaagctgggaggtaccgttttatttatcatttccctgttctttttcaaaaattatgcaggatatgtgatcgcggccctgtttctgggcctggtgatccgactgtctaaggtaccgtttaaattcatggtaaagggaatgaagaccattgtgatgctgatgctgatcacggtggtgttcaatctgttcctgacaccgggaacgccgcttataacgatctggaaactgaccatcacgcaggaaggtctgaagatggccatttccatggcaatccgcctgacactactgatcattggatcctctgtgatgacgctgactaccacaccgaacaatctgacggacggtatggagaaaatgatgggacccttaaaagtatgcaaggtgcccgtacatgaagtggccatgatgatgtccattgcacttcgttttatacctatattattagaagaaacggataagatcatgaaagcacagatcgccagaggtgcggatttcgagagcggcaacattttcaagcgtgccaaagccatggtgcccctgctggtaccgctgtttatctccgcgttccgcagagccaacgaccttgccatggcaatggaggccagatgctatcgcggcggagagggcaggacgaagatgaaaccgctgatctatcataagagagattaccttgcttacggctgtattgccgcatatatggtgatcagcattgtggtaggaagattaccgtttttaccgtaaatttttactgcaaaacactaatgcccattgcagatcgtatatcatcaaatacagaaaagaatgccggggaacctaagacaggtggcaggagagaaagcgggtgacatacagtggaatcggaaatgacaatggaacagctgtcaaagcggccggaaaaagagaaaaagcgtgtgcgcctgaccgtggcgtacgacggtacgaattatcacggctggcagatccagaataacgggatcaccatcgaaagcgaattgaaccggtgcctgaccgatctgctgcaggagcccgttgaggtcatcggagccagtcggacggactccggagtgcatgcactggggaatatcgctgtgtttgacacgaccagccggatgcctgcggagaaaatctcctacgcattgaaccagagacttcccgaggatatccgtatccagaagtccgaacaggtggaaaat

SEQ ID NO: 11435 - DNA, 1685 bp, Unknown
  gut microbiota DNA sequence
tctaccgggcacagttccccatgccagtgaaacgtttgtattcgctgtttacttattatgaactggatgtgaaccggatgcaggaagctgcggcttatctggagggagaacatgatttcaaaagcttctgccagaccggtgcccaggtggaatccaccgtacgcaccatctattccgtggaagtggaagagcagggagaaaatgatctggtgatccgggtctgtggtaatggcttcttatataatatggtgaggatcattgccggaaccctgttagatatcggacagggcaggcgggaccccatggatattttcacaatcctcgaggcaaaagaccgcagtgcagcgggacctaccgcaccggcccatggactgactttagtgaaatatgagttcttgtaatagcttcgccatacgtgatataaacataagagaggctgagcaataaaagatgaacgcaaaacaacgcaaaaaaagtttagtttatgtattgacacgaacgaaaccgtatcatataatatatgactgtgacagtgtttcaatatgctgagtcaaagccccgacgaagcattgaaataaagtattcaaccgttttgggaagaagtaaaatgcagccggacatctgcagattactatcagaccggaacactgaaaaagtcgatcaggaatcggcgaaagtaatatggagggaacataatgaaaacatttatggctagtccagctacaatcgatagaaaatggtatgtagtagacgctactgacatgaccttaggccgtctggcatctgaggttgctaaagtgctgagaggcaagaataagcctatcttcactccccacatcgactgcggtgacaacgttatcgttatcaatgctgagaagatcaaagtaaccggtaagaagatggatcagaaggtatattatcatcattccgattacgttggtggcttaaaagaagctaccctgagagaaaaattagaaaagaagcctgagcaggtaatcgagcttgcagttaagggcatgcttcccaagggacctttaggaagacagatgttcaccaaacttcacgtatatgcaggacctgagcacaagcatgaagctcagaagcctgaagtactgacattctaaaggactgagaggaggaaaataaatcatggctaaaacagaaagatactacggaaccggtagaagaaagaaatccatcgccagagtatatttagtacccggtaatggtaatattacaatcaataagagaagcattgatgagtacttcggtctggagactctgaaggttatcgttcgtcagcctctggcagctactgagactgctgagaagttcgacgttctggttaacgttcgcggtggcggatacaccggccaggctggtgcgatcagacacggtatttccagagcactgcttcaggtagacggtgatttcagacccgttctgaagaaggctggattccttaccagagaccctcgtatgaaggaaagaaagaagtacggtctgaaggctgctcgtcgcgcacctcagttctcaaagagataattcaaacgaatatcacaaaagagcaaatttccccgaaaacatcgagttttcggggatttctttatattttgataattctatcagacaccacaaaacacacaaaattttcacgctaactaacaaataactaacacgacgat

SEQ ID NO: 11436 - DNA, 551 bp, Unknown
  gut microbiota DNA sequence
tcattcctccgaaaattcagagaaatttaattgcagtagaaagtgcaacatgataatatgaacttagaaagaggggaaactatggcagaagataaaaacagcaaggttacgcagaatcaggacaggatcaacaagctgattgatgaacttactttatttgatgatgatctgatgagccgcgtattcgataagaatatagaagcaacggagttattgcttagaatcattctggaaagaaagatcaaggttatcagcgtaaacggacaggaagaaatgaaaagcgctgccgtcgggggacgtaatatcacacttgatgtacatgcactggacgaaaacggagagaaaatggacattgaggtacagggaaactccgaaggtgctcacgtaaggagagcaagatatcatagcagtgtccttgattccagaatgttaaaagaaggtcaggagttcaaagagattaaggattcttatgtaatctttatttataagcatgataaatttcaaaaggggttgcctttgtaccatatcgaccgatatgtaagagagacaaa

SEQ ID NO: 11437 - DNA, 374 bp, Unknown
  gut microbiota DNA sequence
ttttaaggacggatcacatataatttatgtaaacggtaactataagggcgatgatgaaatcggacatcttatgcaggactttcatcagacagaccctgataatatgcattacaaagaactgtcacagggagtaagacatttcaaagaagcagaggaaggacgtgataccatgtgtgaagcagtacaggaatatgcaaaggaatatgccagtgaatgtttaaaaacggaaaaggcagaattagtagaaaattttatgaagaatatgaatttaacgttggaacaagcactcgatgccgctggtatccacggtgaagaaagagaagctattattcagttgttgcagaagcagtaataagataaagcttaaatgtatt

SEQ ID NO: 11438 - DNA, 5701 bp, Unknown
  gut microbiota DNA sequence
atcccagtcaaaggtagaatagccgtatttccagtcaccaaggtggtcaccgtttacataaatagaagaatccatgtagacaccttcaaagcggaggatgacacggtcatcatttcctgttttatccggggcataggcaaagttcttccgataccagccgatgctgtcttcatagagattcttcgtatcatagatcaaccagtcatggggcagatccaccggctgcattttggcttcccagatctgcctgtcttcccagttcacacctaatgctgttttggcaaaataccaattatcattccataacgttctgctgttcatcgaaatttctgccctttctgtccatattgtttcctgtcaggttcctgcttctatagtgctgcttttcctacttgtgtcccgtcttatcgttgtgtgatatggtcttcacatccactcggtcttccaaacgttttactatgtaaactgccagtactgcatccaatgttcccagtaccatgccacccagaatgtccgtgggatagtgcacgaagaaatagagtctggaaaaagcaatgattgctgccaccagcagacttaaaatacctgccttacgataatagctgaaaatggtcaccgctccggcaaaaccgttggaagtgtgtcccgaagggaaggaatattctgaagggaacggaattttcagcgtcacaccggtgtccactgcacagggccggggtctggcaatcacatttttcaagaacaaatttcccacaaggtatgtaatggccatggcgatcatcatcgtcagaccgcatttccgggtcttaggtatacaggtcagcacaatcgcaataacgatccataccagaccgctttctcccatcgtagtaaaaaaacgaagaatctctgtcagccattcctgatggatcccctgaattgcatgtaatatctgtaactccatattgctctccattccgcagacggctgtctgtccttacgtcaccgtctgtcggcagtctgcgccttccactaggcgttcacgctgttaatcctgccgtcactacgcaggcaatcgttttctcaaaattattgcattctatttaagaacgcctttgcattggccgcgatgtcatccttgaatacagcagagcctgccacgataacattggctcccttctccaatgcctgcactacgttgtccagatgaataccgccgtctacttccagatcgatagcaagtcctctgtccgtgatcattttacggatcgccgctaccttattcaggcattccgggatcagcctctgtccgccgaaaccgggctccacggtcatgaccagtaccatatccaccagttccagataaggttccacagcctctgccggggtggcgggtttgatggtgatgccaacctttttgccggtggcacgtattttatcaatgcatcccttcacatcttctgtggcttccagatgaaaattcaccagatccgcaccgcaggcagcgaactcttccacatagcgctccggcttctcgatcatcagatgcacatccaggaacatgtctgtgtggggtctcactgccttcaagacaggcattccgtaagagattgaaggcacaaacagtccgtccatcacgtctacatgcagccagggcacaccggctccttccacagctttgatatcctctcccagcttccagaaatccgccgaaagaattgaaggtgataaaatattcatgatactcctcatttctgccccttagggccttgtctgcaacacttttccctttgaaaaggaaatcgtattccgtatgcgtctattctaacaaacttgtattcttaaaacaagataaactaaaaggaacctttccttttggaaaaagttcctctcttcgtgtcttgtgatcacgtaattctctatagatttttgacatcctcttttaactgctcccaggcatcttcatgctctgtatagtatatgggacatttttttccaccgcagtcatagtggcggagaatatcctccggttccagttcataggcatcgatcagccaactcagcagcctgatcagggaatcgtaggtctcctgagtgaactgtccgttgtccgccttatagcagcattcgatagagatggaatcctcgttacgggtctgcaccgcgtaagcgatctcatccaaaggaacacactggatgatctccccgttatagccgatgatgaaatgcgcgctggcactgcgctcatgattgtccttaagctgttcgaaataactgcggttctgtgccgcactggtgccggggttggcagtataatgcacgaaaatattattcacctccgtcaaaggatctcccggtctggaatattcatttaccgtgaggaaatcctccgtccagtcagggtgcgctgcgtaagtctccgccgacagtccctggatcctagtccccatggtattctcagtcccttttcccacctgctgcgccatatctattgcttccatcggtgtgctggcttccgcagtactggcaggcaccttcaaaagctttgtcaatgcgacgattcctaccagaattcctgcacaaagcaaagtcatccggatatatctgcggattcttgcccgtctgcggcgacgctgtctctccgccctcgtcaggcgttgtcttgtgcgcgtgttgtaggtattgtctctgcatacgtttccatcagatacagcagccgcagttttctgtttctgttggcggattctgttttcctgctggggcactgcactatgatgtcgttgttctatgcgccttcctatatgtctgcccgtatttttcccggtttgataatccaccagatacggattcctccgcatctgcattatatggatctctgcctgtctgcccgaacgattttcctgcatcatattgccagtccctccgaatgaattactttctacgggtttcaatataacgcggaattgtcacattttacgtcacatttttcttaagaaattataaatttctcctataacagttcttgcagatatgtttcgatctctttcgcggtaatttgatgggctttcatgccggggtgcaggcggctgcctacggtatccggtgtagtgtcgggaagttttaaaaagtgtatccgggaatcggcggtctgctccgcatagccttccacagcttcccggatgacggacaggaagttgtctcccagcataccgtaaccccagatgatctgtgctgtggggttgctttcccgcactactttcaggaaatcgccgatggctgtagtcaggatttctttaacttcttctatatcccttgttcctgcccattcctgccccagttccgctgcagactgaatcgctgtgacatcattggttcccagattgataatgaccgcatccggctgccatgcctcgaaatcatagtcttgcaacgctcctaaagaagcattcctctccccggtgagtaagccacagacctgtgtgtaaaacggaggaatcttattctccacatttccatcccatccggtgacaattccccagccgctctgagataccacacgatactctgcggataatgcatctgccaccatacggggataagtattcattgcagagaaaaaggcactgatccaatcttcctcatagatggctcccaccgtaccttccccgctggtaatgctgtctcccacaaattccaaccggtacttcggctccggcagctgctggaattcaccgtctgcatattgcaatcccacaatctgtaacagatgcccgggatcctgatgcattgcctgtacttctttcagaatccgtacatgcttcggttttcctaccgtcatcccccggaacaggcacacttcatttttccctttatttaacggaactctactgatctgcacaccgttcagttccaccgcaagccacggttcataagcgtcgtaatcggcatttacctccacctgaatttcactgccggtatagataaattctattccgctgccggtccagaataagttcaccacatccgttcccgtggtgcgtcccaacacccgtacctgcggcaatgctgctacgctgactatctttgttggctgctccatttttctgccatacctccctgtgcattgttttatctgtcgttctgattttcgatgtttcgctctcttatcaccgattcttggcacaacggctatattcttcggcgatcacagcctccgcagggcgatctgtgcataatgcttctgaaaagcaatatggctttcaaaccagttgccccacttcggttcacagggaacatcatgatcaaaaaagcttatccttgctctccagacaccattgtcacaattcacggtaggctttaatgccacctttaatcccagactcttcgcaaagcgaatcatatcacacagttcttcatccgtgcagcttttctccccatcgaaacgaatttcttcgctataaggggtttcctgcattcccgagggagtgagtatcacccagttcgcgtgggtcttatgcgccatttcctccatactttttctggcttctccagatcccagtacgcctttgtgcggaaataccgcaaaattcaccccatgaaatttttctgtaccaaatttctgcatcaatagttttcctttccataattgttttatcgtaaagcttttccaatctccgttcttgtattgtatcattattatctttatttagctagctattttagcttaattttagttaaaattatttttgttttctcacttttcctatgttaatataaaaacaaagttatacaatcaaatgagggagaatattgccatgcattttgtccaggcgaaggggattttatctcagaataacggaatgaatatttaccgcggatgctcccacggctgcatttattgtgacagccgcagcagatgttacggttttacacacgcctttgaagatatcgaggtcaagaaaaatgctcctgaactgctggagcaggcattacgttcaaaacggcacaaatgcatgatcggtacaggtgccatgtgcgatccgtatcttcccgctgaaaaagagcttcaattgaccagaaaatgtctgaaactgatcgatcggtatgaatatggcgttacggtactcacaaaatccaatctggtgcttcgggatctcgatctgctgcaatctatcaataagaaggccaaagcagtcgtgcagatgacgctcactacttatgatgaggagctgtgccgtaagattgaaccgcatgtatctactacgagagagcgttttgaagtgttgatgagatgtaaagagttgggaataccgactcttgtgtggatgacaccgattcttccttttattaacgataccagggagaatatagaaggcttgcttgattattgcctgctggcaggagttcaggggattctggtgttcgatgttggtgtcacgctgcgggaaggcgaccgggaatatttctatcaggcgctggatcgtgatttccccggcatccggcaaaaatatatcagcacctacggaaatgcttacgatattcccagtccttatgcaaaagagcttatggcactgattcaaaatacctgcgtagcgaatggtatgctgtgttccccgaaggaatgctttacttacctgcatgaattccccgagagatacgtgcagcaaacattattttaaattgagagttagcgaagtagtcccgtagcccttggcagggtata

SEQ ID NO: 11439 - DNA, 170 bp, Unknown
  gut microbiota DNA sequence
ctttagtacgatgcgctcctgtcgcagagcgtagcggtacataggcggtcacaatacgaccgcaatgcgtcccttaggacgctatggtaccgacgtctgcttacggcactgcttattcttatacccagccggggctactggttttttgaaagctttccaaaacgcagaac

SEQ ID NO: 11440 - DNA, 159 bp, Unknown
  gut microbiota DNA sequence
gtcacaatacgaccgctaagtaccgacgtctgcttacggcactgcttattcttatacccagccggggctactggttttttgaaagctttccaaaacgcagaactcccggagtatgcggtgccatgtcgaagatgtttgtcggaggatgttgatattttc

SEQ ID NO: 11441 - DNA, 3013 bp, Unknown
  gut microbiota DNA sequence
tttcgccttcaggcagatctccacttcctcaggatctgcggtatgcaggatcatgacaggggtagaagaatcacggttgaaggacaggtaggtatagtccacattgacattgctgtctaagagagctgtcagcagggtattcagtgcaccgggcttatcctcgatctctacagccaggacatccacgaaacggcagaggtagcccctctctgtaaggacttcttttgccttgtcgggatcggagacaaccatacggttgattccgtactccgcaccatcgttggtaacggaaccccagatattgatgcctgcttcatacagcgcattggtcatagtctgcagggctccttttttattttcagcgtaaatggataattgttttaacatttcgatattacctcctcattacagtctgactattatgcagtctgtcgaaaacttccggcactttattatgataaagcattcttataaaataatcaacctagagttatactttcctaattttattttatcgcttacatcccaaaaatgactttaatctaaactcgagtttaaattaaagtcatttttcattttaggaaatcgttccatgggagaacaatcctaccggtccctggggaggatccttgggatttttggaatccttcgattctgctgaagtctcagtcttgttttcaggtttttccacagctgcgtcactctgagaagcctcgccggcagtttccttcgttgcattctccgatgttgtctgctcttttgcttcctgcaagctgtcctcaaaggcaagcggctgaaatgtcggatctgtggaagtcataacctgctcaccgatggtcacgtcaatgttgtttcccttcattgcatctgcaaccgtattatctgtctcatccttttttgtctcagccttttgaccggtagcgccttccgcggcatccttcttttcttcctcaggatcgggcaatcccttttctctgcggaagatctccatgaattccttaccggtaatggtctcacgctcgatcaggaacgctgccagcttatccatcagttctctgttctcgcgaagcatctgtaatgcctgatcataactttccttgatcatggcaacgacttcttcgtcaatggctgctgccgtttcatcactacagttcagcgcggttcttccctccagatactggctctctacagtagccagtcccacgagtccgaagcgcttgctcataccgtaacgggtgatcatattacgggcaatagaagtagctttttcaatatcattggctgcacctgtggtcacggtatcaaatactacttcctcagcagcacgtccgcccaccagtcctaccaacatatcccgaagttctgcctcggtgttgaggtatttttcctcctccggtacctgcataacataccccagcgcacccatggtacggggcacaatggtaatcttctgcaccggctcggaatttttctgcagggcactgatcagtgcatgaccgacctcatgataggatacgatacgacgctcctccttgctcatgatgcggtcctttttctccttacctaccagtacctgttctactgctgcgaacagatccttctggctgacgaattctctgccttccttgacggcattgatggcagcctcgttgatcatattggcgagatcggaacctaccgcaccgctggtcgccagtgcaatagcatccagatctacggtttcatccatcttcacatccttggcatgtaccttcagtatctccacacgtcctttgagatccggcttgtctacgatgatccggcggtcaaaacgtccgggacgtaacagggctttatccaggatctccgggcggttcgtcgcacccaggatcaggatacccttagaactgtcgaaaccatccatctcggacagcagctggttcagggtctgttcccgctcctcgttgcctccgccgtacttagaatcacggctgcggccgatggcatcgatttcgtcaataaatacgatacagggagcattcttggttgcttccttgaacaggtcgcggacacggctggcgcccacacctacatacagctcaataaagtcggaacctgtcagggaaaagaacggcacatgtgcctcacctgccactgcttttgcaagcaaagtcttaccggttccgggaggtcccactaacagggctcccttgggaagttttgcgccgatcttggaatatttctggggattgtgcaggaaatccacgacctccaccagagattcctttgcttcgtcttcgccggctacgtccttaaaagtaacaccggtttccttctgtacatatactttggcattactcttgccgacgcccatgggacctccactgccgcccattttacggaacaggaatccggctacgacccagatcagcactacaggtaatactactgttaccagaatctccatcaaaaagctggaggtattactgctgatacgggtacccgtcacaccatgctcctgtaatctgcccgtcaaagtatccagatcctccatcagcatcgtataatataccgtcttagactgcgttgccttctgagtaataccataaaaggtcacataactgtcaggtgccggcgtagctgccgcttcctttttcagctgtaccgtgatcacaccgctttccttatttacctctactgcttccaccttatccgcttccagatccttcaggaaatccgtataagacacctccgtaccgttgccggttccgaaaaatacattatacaacatcaatatggcgatcactgtcatcagaccggacaggatcatcatcaggatactgggacgccttggtggacgatttccgttgcctccgttaccgttattgccgttcccgctattgttgccgctgccgggagcaccgttgccattgccgccgttaccggaaccatagccgttattatatgattcagataatattctcatgtcatctccattttctactttattttattgtctctattttttctatat

SEQ ID NO: 11442 - DNA, 8557 bp, Unknown
  gut microbiota DNA sequence
attcttcagtgccagatgccccaggtagatctgatttcggagaatatcctgatccagcatacgcaaagcatctgcgggaagtgtctgtcttgcgtctgccaaactggtaatgagtggaatggagctgttctttttgatctcggtaaggagaggagctgcatccttgcaaaatcccaatactctggcgtaggaaatataatcttcagacttgcaggtctcgaattcttccttggtcatattcagcaaaatatggaacaggcatctgctgatacgagtgtaggtcatatccttgctcttgagcagatcgcagaaagaagataagccggtgaaggacggcagggtattgcggatacggtcggagagatccgaggaaatatcctgatacttgtcgtagcctgcggagtattctgtcagcagcttgtattgcagcgctgcggaaaaatcatccgcaaacagaggcttctgttcctccagagaagtccgcaatatctcataggcattttccggcatttgggatgcaagataggcaagatcatgcccggcagccacggactgacggatggcaatagcggaacactggttggttcccagacgcttatcgtgataatctgcacctacacgggtggtagtgaagggaacaatcttgctgttccttgacatcagagccttcagatattcaattcccagtatattattcggagaggacagcacatccttgtcattacttaatgaaggagcgtactgcaacagagcccaggtcctggcaatcgggaaggacattccctttttgagattgcagcgcagggattccacataaggttccggctccgtgtagaatatctcggcaatccgggagagcgtatcgatgttaccgcattcactgccaaagcatagattcgtggtgactcccagcttgtcgaacagagcaacggatcctttggcgaaaaattccgcgctcgatgcagcgtagcaggtggggagctccagcacaagatccgcaccgcattccaaagccattttgacgcgggtgaacttatctaacagggcaggggcaccgcgctgcatgaagttgccgctcataacgatgatcgtataatcggcgcctgtggcttctttggcatgcttcatctggtaagcatgaccattatgaaaagggttgtattctgcgacaataccattgaccttcataatatggctcctttcgtgaaaagaaatatacggtaaaacgaatataaatacaagctgcgtatgtgaaaaaaataacatacgttgaaagcgtttacatgtgcatggttatcagcatattttgtaatcaaaattcaaaggttgtatctgaaaatatacaattttgcgaacattatgcccttgtctacttcagatgtatttagtataatataaatacatcggtttgttaagataaaaccgaaactttacagaagttatttgggaggaagcgggtattccccgccggaaaggagaatggatatgtcatacattgacatgattaaagagagagcaagactcgacaaaaaaacaattgtattaccggaatctaatgataagagaacattactggctgctgcccgtatcgtggaagagggcattgctgatatcattatgatcggtgatgaagagaagatcatggatggtgcaggctggctggaggttgatctgtccaaggtaacagtaattaatccgaaaacaactcccaagttggatgactatgtgaatttattatatgaaacaagaaaggcaaagggaatgactcccgagaaggctagagagatcctattaaatgattacctgaccttcggtatcgtaatggttaaggctaatgatgctgatggtatggtagcaggtgcatgtcactccaccgcagataccttaagacccgcactgcagatcttaaagactgcacccggtgttaagctggtatccgccttctttgttatggataccgtattcaaggatcagggtgagaacggaactttcctgttcgctgactgtggtctgaaccaggatcctacccccgaagagttggctgctatcgcagatacttcttccagaagcttcaagtccctgatcggacccaagcccgttatcgctatgttaagtcactccaccaaaggcagtgccaagcatgctctggttgacaaagtagtagaagctacccgtattgcacatgaggagtatcctcatctgacattagacggtgaactgcagctggatgcagcgctggttcccagcgtagctaagtccaaggctcccggaagctctgttaacggacatgcaaatgttctgatcttcccgaacctggatgcaggtaacattggttacaagctggtacagagactgggtggcgcagaagcttacggtcctatgttacagggtatcgcaaagcctgttaacgatctgtccagaggatgttcctggcaggatatcgttggtgtcgtagcactgactgctgtacaggcacagctggtataatcattataagaaccataaacgtgtgcgggatatctgtcccgcaccgtattcatgtattgcccttaccgggtggcatgagatcatagaacattagtctgacagattaaaaaagaaaggaatttaccatgaatattttagttattaattgcggaagctcttccctgaagttccagctcatcgattctgagaccgagaaatgcatcgcaaagggtatctgcgaaagaatcggtatagagggaagccagattacatacacccctgcaggtggagagaaggaacagaccgtaactcccatgccggatcacaccgaagcaatccgtcttgtactggaagcactgaccaatcctaagaccggtgtagtaaagagcctggatgagatcggtgccgtaggacatcgtatcgtacacggcggtgagaagtttgcagcatctaccatcattaccgatgaagttatgaaagccatcgaagagtgcaacgatctggctcctttacataaccctgcaaacctgatcggtatcaatgcctgcaaaaagctgatgcctgccactcccatggtagctgtattcgataccgctttccatcagaccatgcctgaggaagcttatatgtacggtctgccttatgagtattatgagaagtacaagatcagacgttacggtttccacggaaccagccactcttatgtatccaggaaggctgcggaggttctgggcaaaaagtacgaagatctgaagatcatcgtatgccacttaggcaacggtgccagcgtatctgcagtgaagaacggcaaatgtgtagatacctccatgggtctgactcccctggaaggtctgatcatgggaacccgttccggtgatattgatcctgccatcatggagttcatcgctcacaaagagggcaaggacatcgacgagatcatgactgttctgaacaagaagtccggtgtatatggtctgtccaacaacctgtcttccgatttccgcgatctggaagatggttataacagaggtgatgagcattgcatccgtacaatgaatacttattgttatcgtgtggcaaaatacatcggttcttatgtagcagcaatgaatggtgtagatgtgatctgctttaccgcaggtattggtgagaacgcaccgctggttcgctccctggtatgtgagcatctgggcttcttgggcgtatccatcgatgaggatgcgaaccacaagcgcggcgaagaaatcgctatttccactcctgacagcaagaccactgtaatggtaattcctacgaatgaggaacttgctattgccagagagacagtaagtttggtaaaataggttcgacggaaccttaagaatgagaacacccatcaaccggaggctccgattgatgggtgttttattatggtaaggaatgaacagagggagaaaatgttatgaagaaaaatgtgatcgtaggacagtccggaggtcccaccgcggtgatcaatgcaagccttgccggtgtctataagacagcaaaggatatgggggcggatatcatatacggtatgcgttacggcatccagggtcttttggagaaaaagatagtagatcttggagagaaaatacgtaacgatatggatgtggaacttctgaagagaacacctgcatccttcttgggctcctgccgttataagctgccggagagcagtgaagataaagctatctatgagaaaatatttgcaattctggaagaactggagattacggcatttttctatatcggcggtaatgactccatggacaccataaaaaagctttccgattatgcccagacagttgacagtccgatccgttttatcggtgtgcccaagacgatcgataatgacctggagggcacggatcatacgcccggttacggcagcgctgcaaaatatattgccaccgttaccaaggaactggtacgtgatggtctgatctatgagatgcagagcgtgacggtcatcgagatcatgggaagaaatgccggctggctgaccggtgcggcagtacttgccaagagtgaagactgcgaaggtccggatctgatctatctgccggaggttcctttcgatgtggatgtttttctggaaaaagtaaagaaactggtgactgagaaacagtccatcgtcatcgctgtatcggaaggtatcaagacggcagacggcagatatgtctgcgaattgtccgcacactcggacaagaccgattccttcggtcatgtgcagttatccggtaccggtaaatatctgtccgacctgatcattgagaaattgggctgcaagtccagagctatcgaactgtctaccctgcaacgctgtgcaggacatctgacctcccgtgtggatatcaccgaggcttatcaggtaggcggtactgcggtaaaagcagcttttgagggcaagaccggtcagatggtgatcctgaaaagagtatcccaggatccctatatctgcaccacggatctctacgatgtgcataaggtagcaaatctggagaaaaaggttccccgttcctggattacggaagagggagattacgtgacagcagagatgaagaactatatcgagcctctgatacaggcggaactgaccccgatcatgatcacaggccagcccagacatattattatcgatgatctgccggatataaagtaggcaagtatagatagaacaaattggatacaaaggaggtgggaacatgccaaaagacaggaagagaaaaaacatgctgatcatagcatgtatcatgctctttgcgattttatttacgcttgttcccgccttttctttttctgtgactgcagccagaaggaacacaggatcggtggcggaagagtacgtcaggtatcagtccaggcttcagaacatagagaagatcacggatctggaggaaaatggatttcatttgttagaggatcagatatttgccatgccgcttcagaaattgccggaggatacgccggaggaggcagtggatgaagtctggttctatgcggcattagacaagcagtaccacagactggcagtttttctcgcagatgataatggacagattctgtacaagacggaccagctggaggcaaattactgctatccggaggaactacggcagcccatagagaagcttgcatcggtatcttttcaggatgtggacaatgacagcgatacggatattattctgattgcccagtgccataatgacagaggagattatcaggagaaatcttataaagtgggagatgttctgttccaggagcatggcagcttttacagagactatcggatctcggacaagatcaaccgctttgatatgaataaaaatccggcgtgtattctgaacttcgtacgcgacggacgttccacagaattcctctacactgcggagacatacggagaactgctcagccataatttccgggtgatcgaggaacaaagctatacccgtaattttgaaaagctggggaaaatgaaggtagtgcccggagtataccggatggcggaatatgatgtgtttatgatctacctgatcgacgagcagggaaatattgtgtggagcttccaacctatggaggattatgacaatctctatgcgctgaagggaatccaggggaaggatctggacggcgatgggttcaaggacctggtggtatttgcaaaatacagttacgagggagatttgggggaactgttggtagataccgtgtgcaccgtgtattatcagcggactgcaggatttgaaaaagacaaagattttaccgcaaattatgaatgtacggaggaggacactttagaggcactggttggaaagatacgtgcctactgggggtggcagacataatgataaaaatattgatcgtggatgatgaaaagccgatctgtgatctgatcgatctgaatctgtcggcagcaggatatttttgcaaaagcgtacaggacggcatgaaagcaatcgaatgcatcgagagagaaaaatttgatctgatcttgctggatattatgcttcccggggtggatggctttgacatcatggaatatatcagacctttgaagatcccggtgatcttcattacagccaggggagatgtgaaggatcgtgtaaaggggctgcggcttggcgcagaggattatctggtgaagccctttgatgtcgtggaacttctggcgagagtggaggtcgtattacgcagattccataagacgggagcgcagctgtctgccggtgatgtggtggtggatatggatgccagaatggtgaccaaggcaggaatgccggtggtgctgaccaataaggagtatggacttttggtgttgtttatccagaacaaaaatatcgccctgttcaaggaaaatctgtatgaaaaagtgtggggtgaagagtatgacggagatagcagaaccttagagcttcatgtgcagcgcctgcgcaagaagatgggatgggagcgtcagctggtggcggtctataaggtgggataccggctggagatcgcatgacccggagtgggtaaaaggagagatgtatgaaattttcctggaaaatactgttttgtacgatgttgatcatggcagcggcatgcggagcaagcggttatttttttgtaaattatgtatttcagacctccatggagcgtgagaccagacaggcacttgatgaaagcagtattttgaggttcgctttcgagacggcagctttaaatattccgtccaaatatgatgtacttccggacggaacggtggaacagatcggagtatacctggagaacagtggacagcacggcaacagattgctgcggatcagcgatgagaacggtaaggtgctgtatgtcagcgaagggtttaccggggatacttctctgtgggaagaacgcggagaaaatacgagagtgtaccgggtagtgcagtcgggggattcctattatatccagacacagacaaggatcaatgtgtccgaccgaatgcttacgttagagaccatgaaaaatgtaactgcggtatatacggagaggacggaaggattccggatgtatcgtcaggttacggtgatcgtattgttatgcagtggagcggtcatgacgctgattgcctgttggctgaccaggcctatcagacttttaacccatgccaccggcaaaatggcggagggagaatacagctatcgcgcggagcagatcagtaatgatgaaatgggacagctgaccgcggatttcaaccatatggcagaggcactggagcagaatattcagaatttggaaaatgaagtcagagccagagaagattttattgccgcattttcccatgaactgaagacaccgctgactgccattatcggttatgcggatatgctgcgttccaggaaattggatgatgagaagcattttttgtgtgccaattatatttatacagagggtaaacgcctggagaccatggcactcagactgttggacatcattgtgaccagacgtaaggagatcgatcgtaagatcacaaatgtctccggtattttctcgtatctgcaggaaatctatgatgagaccaagaacccggaagatggcagagtgaaggttgacatctgctgggaaaagggagaactctatgcggaggagaatctgctgaagacggttttgatcaatctgaccgataatgccatcaaagcctccgaggaggggcagaccgtggagatcacaggcaggcgcatggagaatggatattattttcaggtgcgggatgaaggaatcggcatccccgaggaagaactttataagatcacggaagctttttatatggtggataaatccagatccagggctcataacggagcgggactggggcttgcactgtgtaccgctattctggaactgcatcacagccgcctgaagatcgagagtacactgggttttggaagctgcatgagctttctgattccggacgagggggtgaacgcggatgaatagatggaagagctgttctttgggctttgcggtagcagttgtggtcattcttgcggcactgtggggtccggaatggatcgcggtcagaagggatgagagactcttaaacagtatt

SEQ ID NO: 11443 - DNA, 856 bp, Unknown
  gut microbiota DNA sequence
ggcggtaccgcggaattctcccttgggatccagcacgcagacttctctgtcccggttcaccaggagcttcgcataggagtctctgagccctttcagatcatgggtctgtaagaagatctcataatcctcctcaaaagcttccatgatgtccgcgatcagctggctgcgggagatccggaatccgcactgttcctcgatggctgctgcccggtcccggatctcctccgggaattcctgcctgcgcacattgatgcccacgccgatgacaatgtgatggatataagcctgttccatgctcatctccgtgaggataccacagactttttttccatccaccacaatatcattgggccacttgatgcctacctttgccgcaccttcttcactgccgcgtccgagagtctgccgaatacccttagccaccgccagtgccatgactaacgttaacatcggtgcgcagtccgcattgaaatccggtttgagcattaacgtatagtaaatattgcttcccgaagggctctcccagccgcggcctctgcggccccgtccggcagtctgctgatccgctacgaccaacaatccgctctctgctccctgttccgcttccagcttggcacggatattggtggaatcaatgctgtcgaaaaacagtaagggatgtcccacccactttgtcttcaatctgctttggatatcggcctggttatagacctcctctgcctgatccaccaggtggtaccccttgttctgtaccgcctcgatgacatagccttctttcttcagttgtccgattgctttccatacggcagtccgggatactccgaactgctcacagagttcctgtccggagacgtaa

SEQ ID NO: 11444 - DNA, 679 bp, Unknown
  gut microbiota DNA sequence
cctgatctggggcgcgatcgctgcgttttgtgctgcatggggctggatactgactcataaatccgtgcaggagagaatcccgcactggatccggatgacgttctgcgggctggtggcagcaggaatactgctgctccttatattagaaggaatgatcttcgggcagtttggcgcgaaagcagaggcgggagcggactacgtcatcatactgggagctcagtggaagactaccggccccagctatgtactgcagaaacgtctggataaagccatagaatacctgaatgccaatccggagacgaaagtcatcgtgtccggtggacagggttataacgagcctgtcagcgaagcggaggggatgaaaggatatcttgcggatgcaggaatcgatccggagaggatacttgcggaagatgcttccacgaatacgacacagaatctgatctacagcggagaactgttgaataaatcggaggacagtgtggtcgttgtcaccaataattttcatatgttccgagctcttgccattgcgaagaagcagggatatctgcatgtggaggggctgtcagccggaacttttcctcttacagtaccgaataatctgctgagagaagcttttggaatcgtgaaggattttatggcgaacaacttataggataccagggtcaaaaggtctaag

SEQ ID NO: 11445 - DNA, 13157 bp, Unknown
  gut microbiota DNA sequence
gggattgagggagtgcgtagcacgaagcaatccgtaggtatcaaagtcgggggcctttgaccccgacatccttataataaggttacaggtaccggctgcgaagtgccggcacaggagtggacatacagacaagagagacgaggaagagcgttatggatattaatgtgggagatgtattgaaattgaaaaaacaacatccctgcggaagcagagaatgggaagtactccgcgtgggagcggactttcgactgaaatgtctgggctgcggtcaccagattatgatcgcacggaaattactagaaaaaaatgtgaaagaaatcgttgaaaaagcttgaaaagtgcacggggatatggtaacatgttctttcgtgagacactttattccttgctcatatgtgaaatatgggccagagaccaaaaggaggtaactaacatgaacaagtacgaattagccgttgttgttagcgctaagatcgaggatgatgagagagcagccgttgttgacaagtgcaaggcactggttgagagattcggcggcaacatcacagaagtggacgagtggggcaagaagaagcttgcttacgaagttcagaagatgaaagaagctttctactacttcatcagattcgaagctgagagcactgttcctgcagagatcgagagccgtgttcgtatcatggacaacgtgatcagatacttatgcgttagacaggacgaggcataaacagaaagcgagaagcgaaatatgaataaagtaattcttatgggacgtttaacaagggatcctgaggtgagatattctcagggagctaccgcaacagcgatcgctcgtttttccattgcagtagatagaagatttaagcgtgatggcgagccggatgctgattttattaactgtgtagcgtttggtaagactggtgagtttatcgagagatatggccacaagggaacaaagttcgttgtggaaggacgtatccagaccggcagttataccaataaggatggacagcgtgtgtacactaccgatgtagtggttgagaacgtagagttcgcagagagcaagaatgcatctgccggcaataatgacggtggataccagaacgctggttttggtggtggtaataatgcccccgctccttccggagccggtgatggttttatgaacatccctgacggcatcgatgaagaattaccctttaactaagtttcagtgacaagcggagctgacacccgcctctgccctgacagattccgataggaggtaataataatggcttttaataagactgagaagaccgattctccgatgagaaaaaaaggcggtatgcgcagaagaaagaaagtttgcgtattctgtggtaaagataatgtaatcgattataaggatacagctaagctgaagaagtatgtatctgagagaggtaagatccttcctcgtcgtattaccggtacttgcgcaaagcatcagagagcactgaccgttgccatcaagagagcacgtcacgtagcacttatgccttacgtagctgaataattcagactaagatagtagtaagagaccagccgcaaaagtggctggtcttttttcgacgtatgcaaggagatgaagcggcatgagaagaataccaatcacagatttacatacaccggaactggagatttacaacgaacgcagggaaatacagctgctccgctattacgaaccggctcccgggttgttcattgcggagagtgcaaacgtgatcctgcgggcgctgacggcgggatacgaaccgttgtcgcttctgatggaacagagagaagcggattccgagaagggaagagaagtcctggggcggatcatggagagatcggaggaaattcctgtctatgtgtcatctaacgaggtattatcccagatctcaggcttcaagctggcgcgtggcatgctctgtgccatgcggcggagagctttgccgaagatggaggagctgtgtcgggatgccaggcgcatcgctatcctggaaaatgtcgtgaatcccacgaatgtaggagcaatcttccgctccgcagcagcgttggggattgatgcggtgctcttgactgcaggttgcagcgacccgttgtaccgtcgtgcggcgagagtcagcatggggacggtattccaggtgccctggacatttttggggacggaagactgggcggatcgcacgatggcacagctgcgtggcatgggatatcgtaccgcagctatggcgttaaaggaagacagcctgtcaccggatgcccgggtattacatgaagcggaaaagcttgcaattattctggggacggaaggggaaggcctggcagcggacactatcgcagactgtgattacacggtctgcatccctatggcaagaggtgtggattccctgaatgtagcggcagccagtgcagtggcattctgggaattatgcagataagagcgattttaacctgaaatgctgacaaaaagcacaaatttgacagaggaatattgtctattcgtcaaaataatatggtggcatagtggtatattatttgttataatagaagttgtcgaacgcaaacattgagaggtgttctttgatgaaaaaacgaatcagactgaagggaagaatccgtacatatattcagttcaccctgtatctgggacttctgctgctggcaattgatgccgcggtatttatgctggattttcgtgccggactgcttactttcggatttacgatcttctattttgcaattacactgacattgtatttctataataaaccgatcattatgaatgaactgatcagttttgccacggagtatggacagatccagcggaaactgttgcgggatctggacctgccgtatgcccttttggacgattccggcaaggtgatctggacgaacattgcctttgaaaatgtggtgcaccagccaaagggatataataaatccattacttccctgttccctaccattaccagggacaggcttccggatgattccggtgtggatgaggcacagtacgagctggagtatgagggctgtgaatacgtagcaaagttccgtaagatttccctgaaggaaatggcagaacacagcgatatgatcgatgcggaaggatacaacggctatctgatcgcggtctatctgtttgatgagaccgcgctgcacatcgcattgcaggaagtggatgatcagagcctcacggtggggatgatctacctggataactatgaggaagcgctggagagcgtagaggaagtccgcaggtccctgctgatcgcattgatcgaccgtaaggtgaacaaatacattgcttccctggatggtatcagtaaaaagctggagaaggacaaatacctcgtgatcatgcggaaaaaagcggtggcacagctgcaggagagccgttttgatctgttggaagaagtgaagaccgttaacatcggtaacgaaatggctgtgactatcagtatcggtatcggactggatggtctgacctatgcacaaaattatgagttcgcccgtactgccattgatctggcattgggacgtggtggtgaccaggcggtcatcaagactccggagagcattacctactacggtggcaagagtcagcaggtagagaaaaatacccgtgtcaaggcgagagtaaaagcccacgccctgcgggagatcattaccggcaaggatcgcgtcattgttatgggtcaccggatgccggatgtggacagcttcgggtctgcagtgggtatctaccggattgcccagactttgggcagaaaagcccatattgtactgaacgaggcgacgacttctgttcagcctctggtagagctgtttaagaataatccggaatatgatgaagatatgatcatcaccagccagcaggcaattgatatggcaggcagcaacaccgtactggtagtcgtggatgtcaataagccgtccattacagaatgcccggatctgttgcgcttctgtaaatctgtagtggttctggaccatcacagacagggcacagagactatagaaaatgccacattatcctatgtggagccttatgcatcctcggcctgtgagatggtatccgagatcctgcagtacacttatgacaatatcaagatccgtacggaagaggcggattgtatgtactccggtatcatgatcgataccaacaactttatgaccaagaccggtgtccgcacctttgaagctgccgcatttctgcgtagaaatggcgcagatgtcaccagagtcagaaaactgttccgtgaggatgctgcagaatataaggcaaaggcagacgcagtcagccaggcagagatttacaagcagttttttgccatctctctgtgtaccgcggaggatctgcccagtcctacgatcattggggcacaggcagccaacgaactgctgaatatcaaaggaatcaaggcaagtttcgtactcacggattatcagggtaagatctatgtcagtgccagatccattgatgaggttaatgtacagatcattatggaacgtatgggtggcggcggtcacatgaacactgcagcctgtcagatggagggtgtaggattggtagaagccatcggcgtgctgaagcataccattgacgatatgttggaatccggagagatttagagataggaaaggcaggtatataacatgaaaattattttacttcaggatgaaaaaaagctgggcaaaaaaggagatatcattgaagccagcgaaggatatgcaaggaactatattttaccgaaaaagatcggtgtggaagcaacttccaaaaatatgaatgacctgaagcttcaaaaagcgaatgaagaaaaagtagcacaggagaacctggatgcggcaaaagctctggcagcggagctggagactaagcaggtcatggttaagatcaaagcaggagaaggcggcaagacctttggctctgtatcttccaaggagatcgcaactgcctgcaaggaacagcatggcattgaaatcgataagaagaaaattgtacttcccgagagcctgaagaattttggctcctatgaggtgacagtaaagcttcatcctcaggtggcagcaaaactgacggtgaaagttacggaggcatagacaggcccatgccggctatagatgaaaatgtaatcaaaagaataatgccccacagcctggaggcagaacagtcggtgatcggatctatgttcatcgatacggaggcaatcgctgccgcgacagaacagatctcgggagaggatttctacaatcgtcagtacggtattgtatttgacacgatcgtggaattgaacaacgagggaaaaccggtggattttgttaccctgcaggatcgactgagatccagggaagatgtgccgccggaggtcagcggactggatttcctgacgaacctgatcgcatcggtgcccacctccgctaacattaagtactatgccggtattgttgcggagaaagcaaccctcagacgactgattcgtaccaacgaagagattgccaatacctgctacagcgggaaagaaagtctggatacaatcctggagagtaccgagagcaagatcaatgaggtggtacagaaaaagaatgtaaaagagttcgtcccgatccgtacggtggttatgaatgctatggacaagattgagaaggcatccaagcttcacggaactgttacaggtattgccaccggattcattgatctggattatcgtactgccggtatgcagccctctgacctggtgctgatcgccgcccgtccttccatgggtaagacagcgtttgtactgaatatcgcgcagcatgtggcttttaagcagaatctgccggtagccatattcagtctggaaatgagtaaggagcagctgatcaaccgtatgttttccctggaatccagcgtggatgcacagaagcttcgtaccggccagctgaatgaccaggagtgggagcggctgatcgagagtgccggtgtcatcggtaaatccaaactgatgattgatgacacgccgggcatcagcattgcagagctccgctccaaatgcagaagaatgaagcaggaaaatggactgtccatgatcatcatcgactatttacagttgatgtcaggcagcggcggcagaagcagcgactccagacagcaggagatttccgatatttcccgttccttaaaggcggtagccagagagttatccgtaccggtgctggcgctgtcccagctgagccgagcggtagaacagagaccggatcatcggccgatgttgtccgacctgcgtgaatccggagctatcgagcaggatgccgacgtggtaatgtttatttaccgtgatgattattacaaccatgattcaccggacaagggtatttccgagatcatcattgccaagcagagaaacggtccgatcggaaccgtacagctggcatggctgccggagtacaccaagttcgctaacctggaaaacgacagaaaaaaagatttttaagtatcctgcgaatacagaatataaaacacgaaagagaacaagtaagggaaattcccctgtacctgttctcttttttatttcacattttcataatatgacaatttagaaaaggagagattatgggagagtatttattgatttcggatgcagcaaaacaggtaaaggtggagagccacgtgcttcgttactgggaggaagaactgcacctgcccatcaagcgtaacgaattggggcatcgctattatacgaaagaagatgtagaacgcttcaaagagatcaagagcatgaaagaaaggggattacagttgaaagcaatcaaaatgatattaaaggatgggaagctggatgtactgccggaggaaacgacagaaaaagaagcagctgccgcaccgcgtatggcaattgaaattgtagatgagacagtgaagaaaacagtaccatcaccggtgcaggagacctcgctgacaggcgaaaaccgggaggagaaggttaaaagactacagtggatattacagcagatgatccgtgaagccgtaaaagaaaataatcaggagctatgtcgggaattaaaggagagcatggtcaaagaactggattatcagttccgcagcagagaagagcgtgaggaagagcgggatcgcaggctggaacagcgcagcgaagaatattatcagaagatggacgagctgttacggaaaaagaccaaaggacggttgcaaaaacagccaaaagatacacccgtgaatccaaaagaaaatgaaaaacataaagcagaaaaaaagaaaaggcatttcattttctgaaatgcctttccaaggttgcattttaagtcggaaattaatcctctgcgatagcaccaacggggcactgacctgcgcaggaaccgcagctgatgcacttatctgcatcgatttcgaactttccgtcgcccatgctgatagcgccaacggggcactgtgcttcacaagctccacatgctacacaagcatcaccaataacaaatgccataatcttttcctcctattttgcgtgtatcaaatcatattgtttgatacaaatttatcaatataactattagtattgtaatataaatatggcttgaatacaagtcttatttagtattttttatcattagttacagttgtttatttatatttattgaactccaggatcttcttcgcattctgaattctctcttcggtggggggctccacaccttccagcttataggggattcccagctctttccatttgtatgcccctaatgtgtgatagggaagaacttctaccttcataacggtatccagagtgtcaatgaattctcttgttttcttcagatattcgtcattgtcagtgattccgggtaccagcacatgacggatccacatggggataccctgttcggagaggtatcttgcgcagtccagaatgtttttgttggtatggccggtgagttttttgtgctcctcatcatcaatatgcttgatgtccaacatgacaagatcggtatatttcagtaattcgttgaatttggagaagaagggctcttctctggtaaaaggctgtccggaagtatcaaggtcggtgttgatgcctctctcgtgagccttacggaagagatcgatgagaaaatcaatctgtaataaagcttcgccgccgctgacggtgatgccgccttctttgccccagtagctgcggaaacgctctgccttatccagaagctcgtctgctgtcatcagattgtcagtgtcgggattccaggtatctacattgtggcaatattgacaacgcatattgcagcccttgaggaagataagatagcggattccgggtccgtctactgcgccgaaggattctaatgaatgaattctgcctttgatcattgtaataatctccattctctgccatgcaggcagctgaggggtgagtgttacgaatagtatatccaaaaagggaccggacattactgcccggccccatatacatcaattatctcaaaacctgtaagaattacagactcttatggcaggttcttgcgataacatcatcctgctgctccttggtcaggctgatgaacttaacagcataaccggatacacggatggtgaagttagcgtactcaggcttctcaggatgagcctgtgcatctaacagcttctcggtaccgaatacgttaacgttgaggtgatgagcaccacgatcgaagtaaccatccattacacgtaccagagtttctttctgctcgtcaaggttgtgaccaagagcggaaggagccatagtctgggtattggagataccatccagagcatactcataaggcagcttagctacagagttcagagaagccagcagaccactcttctcagcaccgtaggaaggtgatgcaccgggagcgaacggtgtgtaagctgctctaccatcgggcagagcaccggtagccttaccatatacaacgttagaggtaatggtcagtacggaagtggtaggctcagaatttctgtaggtgtggttcttcttgatcttctccatgaaggtcttcagcagccatacagcgaattcatcagctctgggatcatcgttaccgtacttagggaagtcgccttcgatcttgaagtctacagcacaaccctggtcatcacggataaccttaaccttagcatacttgatagcggacagggagtcagctacatgggacagacctgcaataccggttgcgaaggttcttcttacatcggtatcgatcagagccatctcagctgcttcgtagtagtacttatcatgcatgtagtggatcaggttcaggatgttaacatacagagatgcacaccagtcaagcatgatgtcatatttatgcataacttcgtcgaaatcaaggtactcggaagtgataggagcgatttcaggaccacactgcatatgtttgccgtccttgtccagatgcttctcatccttaccaccgttgatagcgtacagtaagcacttagccaggttagcacgagcaccgaagaactggatctccttaccggtctgagtagcggatacgcagcagcagatgctgtagtcatcaccccagataggcttcataacgtcatcgttctcgtactggatggaagaagtattcacagaaatcttagctgcgtacttcttaaagttatcaggcagagcgctggagtacagaacagtcaggttcggctcggggctgggtcccatgttctccagagtatgcaggaaacgatagtcgttcttggtaaccatatgacggccgtccatgccgataccaccaacttccagagtagcccatacggggtcaccggagaacagctggttgtaagaaggaatacgagcgaacttaaccatacggaacttcatggtcatatggtcgatcagctcctgagcttctttctcggtcagggtgccttcctttaagtctctctcaatatagatgtccaggaaagtagagatacgtccaacggacatagctgcaccgttctgggtcttgatagctgccaggtaaccgaagtataaccactggatagcttccttagcggtggtagcgggaccggaaatatcgtagccgtagatcttagccatttccttcattccctgcagagccttgatctgatcagcgatctcttctctcagacgaatgatttcctcggtcataacgccggtaccgcagttcttcttatccttcttcttctgctcgatcaggaaatcgataccatacagagcaactcttctgtagtcgcctacgatacgtccacgaccataggtgtcgggaagaccggtaacgatatgggtatgacgagcaaccttcatttcatcggtataagcatcaaatactgcctggttgtgagtcttgtgatactcattgaagatcttgtcatatttttcatttacttcgtagccataggtgcttgctgcctgctgagccatcttaataccaccataaggcatgaatgctctctttaaaggcttgtctgtctgcagaccaacgatctgctccagatccttcatagattcatcaatatagccagggccataagcggtcagactggatacgatctctgtttcgcattccagaacgccgttatgctcacgctcttccttctgtaactcctgaagtctgccccaaagcttatcagttgcttcggtaggtccctccaggaagctctcatctccatcatacggagtgtagttggtctggatgaagttacgtacattgacgtctacatcccagtggccatctcttttaaagcctctccatgcttctgccatgaaaatttacctccttctagtaaaaacaattaatattatcaactgagagtaccagttgcgctggcgtcccaagctgtttctttacgataaaagtgtactacctgacaagggtaagtgtcaacagttttaggtaatgtacgcgcttttgtacatcagctctgacataaaaagactatcccctggtgagggcgcttgcgcacaaagcacgaaaacctctttttcatggacaaagcgcaccaacatgaaataaatgtgagctacgaagcggcgccatttgtgaagcaaatgcttttatgaatgtggtttgcggcagagctgatcccgggggaggaacaaatgctgatgtacaagaatattcttgtaatcttttggggaaagtattatactaaaaaagccttatacggcagaaaggagaccgatatgaccggagtaacaaaagacatgaccattggcgagatcttacgtgccaatcctgaagtagctcccgtactcctcgatgcaggaatgcattgcctgggatgccctgcttcacagggagagaccctggaagaggcagctatggtacatggcattgatgtagatgagcttatgaaagtgatcgaggagctgtaagctttgtatgtctgttttggaaacatcacctgaccggggcacacaggtgaaacaaagtatttatggaatttcatagctcagatttccgcgcaatcgaaatgtgtccgccgattgcgcggatttgagaaatctaaagaattcaaggaactcagatcatcggcctctggccgtctttttttacctttttcccttagatatattatctgatccgacattatgaagtatgactggcccggtagattctttcaggggaggctaattctgtggtactttcagttcccagcctgaataaatcagagcagggttgcggatcagttcccggttcagggagatgatctcggccacggagcagccgtactttctggcgattttccagagggtgtcgccctgtctgacgatgtatatcccacttttcttattctcaggcagaacagcatcgggagtgccgcctgtgataggcgctccgctttggggaatcttaagctgccagccggcgtggatccggttcgggttcttgatccggtcactgttggctgccatgatctcggttatggagcagttgtattttctggcgattgcccagagagtgtcacccacctgtacggtataggtcatataggaggtgtttttcacgacaggagagggaacttcacggtcggtctgttctcctgagctgctgtcgtcagtcttatactgctctacgatattgctggtgttgttgccgggaacgatgggagtcgtgttccgcatccactttgcgtagaataccttgtctcccgtatcggtacctgtgatctctgtgacgggcgaaccggaaaaactgctgtctgcgtaccagccgtcaaagcgatatccctcgcgggtgatatcatcggcggtcggaagaactgccccggtgccgtaagtgtagccggttacctcttttccactggcaatcgtaccgccgttcatctgcagcgttacggaataggtggagagttcccattttgccttgagggtcatagtgcatttgactgtatccgtgtcaaagttccattttgtttctgtaccattgttatcataataccagccgtcaagactatgcccctctttggtgggaacgggatccggtgcggtgagtgccactccgtctttactccaattcacttcccgtgtgatgaccggctctccgttgttcggttcaaaagtgatcacgagcataccgttcagggtggctttgctgaaatcaccgcctgaaattgttccgtccttgttctcaactgtgccggtaaatgtgccgccgttaatggtaccactgctctcatttatgacctcactcgtgaatgtgcccttccggatggtaccgttgttggtcactttgccctgaaactcagtgctgtcggcagcaccctcactgccggtgatcgtgccggtgccgtacctgttggtatcgttcgtcattgtgccggctattccgccgccgtcagcattcaggatgccaacgtttgttacatttgtgtagatttttgcgttgccgcttatagtaagagtagtctcctgactggaagtattgtatacatggcttgcgtcattctcattatccggatcaccgattgtgccccctgtcatggtgaactgattatcattcctcaccccgccgcttgaagcatcctgggtgctgatgctggctttaatcgtaccgcctgacataataaaggatccagagttgtccacaccgccactgtataatcctgtgcatgtacggattgttccgccgttcatgataaagcggccgatgatatt

SEQ ID NO: 11446 - DNA, 724 bp, Unknown
  gut microbiota DNA sequence
agtgaaataccgtaagcacacagcaggatcaccgggtagaagataatgttcacacggttaatgttcacttcaaaggtgatcaggcccacccagatcccggtaatgaggaatccccacagagccagcatctgcgtctgtttttcaatctgtttctccttaaaaaggcggatcgtaaatacaatgatcccgatcaatacaaatggtatcgacacatggtataagggtccgaacgccggaatcgaattaaagaaaatgtccggcagctgcaggaacaccctgctgaataatgcccaggcattcctgcccagctgtgcaaaggaaaaattcaaaaacagtatgtctgcacttctgatactatccgggaaaaattgcatggtgaaaaaaggcgtttcaatgcttttaccataatgcaacgcattgatcgccagcacgatcacctccggcaaaaccaccagcgtaaatattaccgcacacagcagtccctcccggaatttcagctgctttttccacaggcaccagataaaaagcacaaacaaaaatgccgtgacggagtatgccgctattccatagcaataaaatgtcaggccgaaaaagagcatggatacatacaaataccgtcttttctccagtcccaacaacagcagataaaatgccaataaaaatacatgtgggaacaggttgcagtccaacgaccagcggctctgcatgaactgccagggattca

SEQ ID NO: 11447 - DNA, 615 bp, Unknown
  gut microbiota DNA sequence
tggaaaccattcgaagagtgcaaaggcagaagggagcttgactgtgacaccgacgggtggaacaggtacgaaagtaggacttagtgatccggtggtataaagtgggattgccatcgctcaacggataaaagctaccctggggataacaggcttatcactcccaagagttcacatcgacggagtggtttggcacctcgatgtcggctcatcgcatcctggggctgtagcaggtcccaagggttgggctgttcgcccattaaagcggtacgcgagctgggttcagaacgtcgtgagacagttcggtccctatccggcgcaggcggaggatatttgagaggagctgtccttagtacgagaggaccgggatggacggaccactggtgtatctgttggctatcagagccatggcagagtagccaagtccggcagggataaacgctgaaggcatctaagcgtgaagcccccctcaagatgagatatccctcagaaatgagtaagaccccttgaagactacgaggtagataggaatgaggtgtaagcacagcaatgtgttcagctgacatttactaatcggtcgagggcttgaccaaaggttttggataggaaagcaggatg

SEQ ID NO: 11448 - DNA, 2046 bp, Unknown
  gut microbiota DNA sequence
tttgaaaatcccatgaaaaactactaagtctatctcgtgttgctggtttctgtattcctccaaagtcatttacatacttaattcctatttttaaattttatacatgtgtttcctgaagcgatttacatacctattttccattttagcctattgcgcatgtgttttcccggttatcatacatgccggatcattatttttttgctttaaggcatgtattttccgacttgttacacatacttaattttgacttttgaattattcgcatgtatttcctgcttttttgcacatactaaatccttgtttttaacttctgcgcatgtattctaaaatgctctgcctaaataattgggatgcttttcataacccagcagaaaaggactgctcccccggacatagatgcggcggagactgtgagattttcttggaaagtggttgagccgcaggggcaacgcgaacacgatgttcgcgttagccgataagtgccatggatggcaacgtaaaggcggccccgtcatggtgagaagcacttgaccactttcctttagaaaatccacagttgtagctagcatccgagtccggggcgggcagtcctttctgcgtggattttaaagcaactattcatttaactttcaagttacactaacttgatttgccgctatagcgagattatgttatattaggtttatcttagagaaatgagtgagagtaatggctggaattgaaaaagttatttttatgaatatgtgtatggtctatgataaagaaggtaatgtggtggcactggacaaggttgggaagaattattcgggaacgacgtttcccggcgggcatgtggagcctggggagacctttagggagtcggtaatccgggaaatctatgaggagaccggactgatgattcaaaatccaagactgaccggcatttatcactggatgacaggggatataaagaatgtgggctttttatataaaacgtcggaatatgaaggaaaattgatctcatccgaggagggaaaggtctactggatctccggagaagagtttttgaagaagccgttggcacccggtatggagcaggtgtggcagatgatgcatgatgaagatgcacaggaatgtttgcaaacactgacggaagaaggcattgtatcaaagattcagtaggatatttcggaggcaggagggaaaataaaatgatcaacaaattacatatggcaatgatcggactttaccatggagatgcaaagcgcattcagcatttttgcaaggtacacagctatgcaaaactgattgcggaaatggagaatgtggatgctaagaccttatttattttggagacagcagcactgactcatgatattggcatccatctgtgtgaagaaaaatacggaaactgtaacggaaaattacaggaaaaagaaggcccggccattgccgaaaagctactggcagagcttggtttttccagagaagtttccgagcgggtacagtatctgatcgcccatcatcatacctacaataatatagatggaatcgattatcagattttggtggaagcggattttcttgtaaacatgtgtgaggacgaactgtctgaagaagccttgcagaacacctatcagaatatttttcggacggaaaccgggaaaaagatctgcagagagatgtatgatatagcgtgactttttggcgaatgaaaagaccaccggagagcttgacatgccggaagatgataaagagagtatgccggatcagtacaagacagtatttttggaggaatttgtcgaatatagcgagatttataaacagatgcaaccaaagttaacacagatctgaaaaagctgacaagtttgcatggtgtaaatctaatccgacagaacctataatgaagatgtcagaaaggaagtggtgatcatgttgtcagagaatcttgtgatactacgtaatttaaagggactcacacaggaacaagtggcagaagtagtggaaatttcaagacagtcttatgctaaatgggagcagggagtttcccatagttaaagataccac

SEQ ID NO: 11449 - DNA, 3240 bp, Unknown
  gut microbiota DNA sequence
atgaacagtggctcatatgaatgaatattaaaactatatgcaaatcattagcatctaaaaagcaggaaatgctaatggagaaagaggaggatattaccatgaagaaaacttacaagatcgaagtagattgtgcagcatgtgctctgaagatggaggatgcagcgaagaaggtagaaggcgttaccgatgcgaccgtcagcttcatgacccagaagatgaaagtggaattcgctgacagcagcgatgagaaggccgttatggagaatgtggtaaaagcctgcaagagagtagaggatgattgcgaaatttatttataggatgaattccggaaggagagcagatactctctttaccgggagacttgataatttcgtaggaaagcaaggaggattcctatgacaaagaaacagaaaaaagtattgatccgcattattgtagcggcaatcttattagttattttacattttgttccactggaagggctgtggctgggattgctgtacctgatcccttacgcggtgatcggatatgatattttaagaaaagccgttctgggcatcatgcatggtgaagtgtttgatgagaatttcctgatggcagtagcgacagtaggggctatgggactgggagagtattccgagggcgtggcagttatgctgttctaccagatcggcgaattgttccagtcggtcgctgtaggcaaaagccgccagaatatcagtgcactgatggatatccgtcccgactatgctaatatcgaggccgaagacggcagtctggagcaggtagatcctgatgatgtagagatcggaaccattatcgtggtacgccccggtgagaaagttcccattgacggtgtggttgtggaaggcacttccactctgaataccagtgccctgaccggtgaaagtgttcccagagagatcactgtggaccaggatgtgatcagcggctgtgtgaacctgacaggactattaaagatccgtactaccaaggaattcggagaatctacggtatccaagattctggatctggtagagaactccagcatgaagaagtccaaatccgagaactttattacaaagttcgcaagatattataccccggcagtctgctacagtgccctggctctggctatcctgcctcctgtgatcaacctgatcatgggcaacccggcagcctggagcacctggatcatccgtgcgctgaccttcctggtaatcagctgtccctgcgcgttggtcatctccattccgctgagcttcttcggaggaatcggtgcggcaagtgcctgtggtattctggtgaaggggtccaactatctggaggcattgtctgagactaagtatgtggtatttgacaagaccggtaccctgactaaaggcgtattcgatgtaacgggcatctatcccggtcagggttttacagaggaagaactgctggagtatgctgcttacgcggagagttattccaatcatcctatcagcaagagcctgaagaatgcttatggaaaagaactggatgcctctaacgtcagtgacgtggaggagatcagcggacatggtgtaactgccaaagtgaacggcagacaggtggcagccggcaatgcaaagctgatgaagagcctgaacctggcttatacggaaaataccggtgtaggtacagtggttcatgtggcggtagacggtaactatgcaggatacatcctgatctccgatgtgatcaaggatggtgcgaaggaagcaattgcctccctgaaaaattccggcgtgaagaaatgcatcatgctgaccggtgacagcaaaacagttgcagaacatgtggccggtgagttaaaattagatgaggtacacagtgagctgcttcccgcagacaaggtaagctgcgtggagaagctgttgcaggagaagggtgcgaaggaaaaactggcattcgtgggcgatggtatcaacgatgcaccggtattgtcccgtgctgacatcggtatcgccatgggagcacttggttctgatgcagccattgaagctgcagacgtggtcctgatggatgacaatcctgccaagattgccctggctatgcggatttcccgcaaatgtctgcgtatcgtctacgagaacatcgtatttgcgctggcagtcaaggccatctgcctgatcctgggtgcgctgggtatcgccaacatgtgggttgctatcttcgcagatgtaggagtgatggtactggctgttctcaatgccatcagatgcctgcgaattaaaaacaattaaccggatgcagtaaaaatatgtcggcgtcatgagatagccggtgttccgggagaacaggtgaacatgcagacttttttttcagaaattacagcactgtgcaggaacgaacaatttctgcacagtgtgatggaaaaatatcattatgatccggaagaatatcccaatctgaagaggctggcaggtgagatgatcccctgcctggagacagaagcgggatggcaggacagagaaatcaaagagacttttcccgggagggatcagtcttttttggctgtaggcattaccctgggaaaagggatcgatgcactgcaggaaaagtatttgcagaacggatttctgacagagagttatatgatcgaggtgctgtccagtgaattattattaaaaagctaccgggtttatacagagtgggtggctgtacatcggaatctgcatgttgccagactgcattttttaggtggggagatttctgagacttcggaacccccaataggcagtctgctgcggctggcgaatctgcccatgcttctgcaggagcttgcattgccggttacctgtaatgcagcatattgcatgatcccgaaaaaaagtgtggtattttatgcggagttgacgaaggatccttttaccaaatgtgcaggaatctgtctcgggtgcggcaggagagactgcccgaaccgcatggaggaaaaagagaattttcctttgcgatttgcggatatgacggaccgtccgttgtcttatgggtatgccagaattttttccaaaagcacagatgaaaatggaagataacgtacaaaacagaagtctctattggccgaaatattaaaattctgataagatttatcagacgacttgtaagtaagataagaatatggtatgatgcaatcactttcaaagaggagagatatcgcgtgtgcggtgtttctcctatttttgtgtatacgatgagccaagtacagatttgtgcttg

SEQ ID NO: 11450 - DNA, 196 bp, Unknown
  gut microbiota DNA sequence
gatgttgtacattatggagtcatgcagtccagaacaattgcgttattttattgtctgctggcgttttctcattgcatcgcagcaatacttcgtggatcaggtaacgcatccgttccgatgatcgttatgctctgtgactggtgtttgtttcgcgtaagctacattactgtggcagttcgtattctcccggatatac

SEQ ID NO: 11451 - DNA, 3803 bp, Unknown
  gut microbiota DNA sequence
tatcgacggagcctcctattttaccatttactggaagatcattcttccgcttctgaaacccgctatcgtaacttcgatggtgcttaagggagtaggcgtatataacgagtattattgcgccagtctgtatctgcaggacaagaggactctcggtgtggtagcaacctccctgtataccttcaccggacctcttggaagcaaatacaatctgatctgtgcaggtgtactgatgtctctgctgcccgctctgatcgtattcctgctctgtcagaaacagatctacagtggaatcacctccggcgctgtcaagggttaatacaaaggagagtgcggaacatgatgaacatagaaacaatgaaaatgcgggaagaaattaaaaaccatctgacagaggggatcattcctttctggaaaggaatgagagatgacgagttcggcggctattacggctacctggattatgatctgaatctggataaaaaggcagaaaagggctgtatcctgaacagcaggatcacttggttcttctccaatgcgtatacactgttaaaagacgaaagcctgcttgatgaggcaaagcacggatacgctttcctgaaagactattgtcttgacaaagaatacggcggaatctactggtccttaaattacgacggaacaccgaaggataccacaaagcatacgtacaatcaggcattctgcatttatgcactatcctcctattatgaggcaagtggtgacgcagaagcactggaactggcgaaaaagctttttacattgatcgaaacaacctgtatggatgaggtgggctatctggaagcattcaccagagactttaaaccggaatccaatgagaaattgtcggagaacggtgtcctggcagacaagaccatgaacaccctgcttcatgtatttgaagcttatacggagctgtaccgggtatccggtgatgaaaaggtgcgcagacgcctgctttggatcatggatctgttcgctgaaaaggtttataatcccaagctgcacagacaggaagtgttctttgataagtattacaataccattctggatctgcattcctatggtcacgatattgagaccgcctggctgatcgacagaggctgtaaggtactggatgatccggaactgacacagaagatgcatgtcatcaccaaagaccttaccgcgcagatctataaggtggcattcgacggacactctctggcaaacgaatgtgacagaggtgtcgtgaatgtgcacagagtctggtgggtacaggcagagactgtgatcggtttcttaaacggctatgagaaagagccggagaagaaggaatatctggaagcagccgagaaggaatgggcatttatccgggatcatgtgatcgataagagagccggttccgaatggttctgggaagtggatccggaaggaaatccctatcccggccgtcctatcgtggagccttggaagtgcccttaccataacggcagaatgtgcatggaggttatgaagagatgttagagcgttattacatagagaaagagaagcaggagaaattgctttcccgtaaaaatgtaaagtccgatttctacaacggtatttacgaccgttatgaatatccggttctgaccagagaacatattcccctgacctggagatatgatctcaatcccaagaccaatccctatttcatggagcgtctgggaatcaatgcggtcatgaattccggagccattgaattaaacggcaagtattatctggtagcccgtatcgaaggcaacgacagaaagtctttctttggtgtggcggagagtgacaacggtgtcgatggattccgtttctgggattatcccattctgttagatgacacctgcccggaagagaccaatgtctatgacatgcgtctcaccaaacatgaagatggttacatctatggtgtgttctgttccgaaagcaaggatacttccgtaaatgatctgtccgcagcagtagcggctgcaggcattgtaagaaccaaagacttaaagcactgggagagactggagaatttaaagacccttcgttctccccaacagagaaatgtagtgctgcatccggaattcgtggatggcaaatatgccttctacaccagaccgatggatgatttcatcgagaccggaagcggcggaggaatcggtttcggactgtgcgacgacattactcatgcagtgatcgacgaagagcgcatgaccagtctgcgtaaatatcacaccattaccgaggccaaaaacggtgcgggcgctacccccatcaaaacagacagaggttggatacatatcgcacatggagtacgtaataccgcagccggtttacgttacgtcatttatgcctttgccacggacttaaaagatccggcaaaagtgatcgcagagccttcgggtctgctgatcggtcccagaggggaagagagagtgggagatgtttcaaacgtagtatttaccaatggcgcaatcgcgaatgagaagggggaagtctttatctactatgcatccagcgatacccgcatgcacgtagcgactactaccatagataagcttgtggattatgtattcaacaccccttccgatcccggaagaagcgtggaatgtgtggcacagagatgtgaactcattcacaaaaatgaagagttcttaaaacaggaagcaagataaataatacagaaatgaggtaacctgaatgagcaaggttaagatgatcagccctgcagtacctaatgtaccctggcaggataaacccgaagaccataccggagcaccggtatggagatatagtgagaaccctattattggcagaaatcctgtaaaaggagtagccagaatcttcaacagtgccgtaatgccttacggtgatgaattcatcggcgtgttccgtggggaacaggtcaacggtattccttatatctacatgggacgcagcaaagatgcaattcattgggattttgataaagataagattcagtttgtagatgaagaaggcaagccatttatgccgatctacgcttatgatcccagactggtgaaggtagaagatacctattacatcatctggtgtcaggatttttacggtgcagccatcggtattgcgaaaactacggatttcaagacgtttaccagaatcgagaatccgttcctcccctttaaccgtaacgccgtactgttccccagaaaagtacacggtaatttcatgatactgtcccgcccttccgacagcggacatacgcccttcggtgatattttcgtcagtgagagccccgatatggtattttggggcaaacacagacatgtgatgggaaagtcttccgaatggtgggagtccttgaagatcggtggcggtgcagctcccattgagacctctgaagggtggctgctgttctatcatggtgtgagcggaacctgtaatggttatgtctattccatcggtggagcaatcctggatattgacaacccgtccatcgtaaaatatcgttgtgagaacttcctgctgacaccggaagagtggtatgaggagagaggattcgtaccgaatgtatgcttcccctgcgctaccattcatgattccgagagcggcaggatcgccatttactatggcgcagcagacagctacgtagggctggcgtttacgaccatcgatgaagtggttgactatatcaaagaacacagcgtggtcacaacaagcgatacagaagaaggcagaagatagaatcgagggacccgcgatgagcgggtcctttcagactgtagacaaagctccttcctgtgagggag

SEQ ID NO: 11452 - DNA, 341 bp, Unknown
  gut microbiota DNA sequence
ctcaatatcccaataagtttctgtatttctccaaagtcatttacatacttaattcttatttttaaattttatacatgtgttttctaaagcaatatacatacctattttccgttttagcctattgcgcatgtgttttcccagttatcatacatgccggatcattattttttgctttaaagcatgtattttccgacttgttatacatacctaattatgacttttgagttattcgcatgtgtttcctactttttttcacatacctaattcctgtttttgaattgtccgcatgtatttcttgatttttcgcacatactagattcttgtttttaacttccgcacat

SEQ ID NO: 11453 - DNA, 9377 bp, Unknown
  gut microbiota DNA sequence
cagattgcgcagatccttaggtaattctctggtgcttggcctattggcagctgtggtactgacgataggagggcttatatttttgcagccgatcctcagattcctgaatgtaccggaaaatctgctgaatacagcaacacagtatgtatccgtgatcatagcgggacttgttattactttgctatatgatgtattagcggcgaccctaagagcaatcggagataccgtgaccccgctgatcgtgctggcggtgtcggtggtgctgaatatcggaggagatctgcttctgatcgtggtgctgcatatgggagtgctgggtgctgcaattgctactgtgctgtcgcagctgatcgctgtggtggtatgtgcggtctatctgtggaaaaagtatgaaattctgcggatacgtgtggatgatctgaagctgcaggatgccggaatgctccgcaatatgttaagctccggtctttctatgggattcatgagttctctggtcaatatcggtacactgacattgcagacttctatcaacaagctgggacagaatattatcattgcccatacggcagcccgcaagatctctgagatcttcatgatcatgttcagcgtcttcggtcagacgatggcgacctattgcggacaaaatctgggagctggtaaaatcgaccggatccgcagaggaatcctgttggcaaccggttatacctgcatctggtgtacgcttaacattgtgaccgcttataccatcggtgactggctggtatggctggtcaccggcagcaaaaatccagaagtgatctacaatgccacattatatctgaaggtagatacactgttctattatgtgacagcagtaatctgtattgtgagaaactccatgcagggactgggagagcggatcgtaccgctgatctccagctcgctggaaatgatagggaaaattgtgattgcagcgacgctggttcccatgttcggatacccgggtgtcatcgcggcagagccgattgtgtggtttatcatgatcattccgctattgatgaagatactgcgcatgcctgtctggaagcagaaaaacttaacggtttcgtaaataaaaaagatgtttttacttaacgttgaggaaaaataaccaaatctgacagtaaaatacttgtaattttgtcgaattgtattaccatatggaaaatgttacaatgatttcaccgagaaaatacttaaacgttttcgagatggatcgaatgtgataaagtcttttacagaaaggcagatgtggtaagtatgaagaagacagagaacaagaaaacggaagtaaaagggaagaaaaagccattttttacaatttccaaaaagatactggcgttgagccttctgccaatgatcattgtgtgtgcactggtggcgacggtgggggccaaagcattagagaccggaattgagaaacagattgagcagtctctgcagatcgttggtgtcagtgtggatgaaacctacacgaatctgtatgaaggcgattacagcagagataagggaggcaaggtgcgcaagggaggcacatccatttccggggagacacagttgatcgatggattgcaggagaagacaggcttccaggtgtcttttctgtatggaaatatgcgtctgatcacgacattgaccaagccggaaggaggacgtattaacggtacggcgctggaagacgatgtctatgcacagattcagactggggaggctttgttcctgacggactgcaacatttccgaagtagattattatgtatattatcagccattgatcaattctgatggctctgtgatcggtgctatcgaagtggcgacgccgatgcagaatgtcaaggatacaatctcgatgcaggtcaaggatattatcctgatcgctgtagtatgcgttcttgtggcggcaacgctggtaagcgtattatcccgtagcatggtgaagaccatgaagaagacgaagcatttcctaggcaggatcgtgaacggagaactggatgcagaaccggatgaaaagcagtgccgtaaaaaggatgaacttggggatgtatatcgtatttctgtaaaactgcaaaaaactctccgttcgatcgtaacagagatcaaggattccgcggatgatctgacagtatcttccaacaaactgatcaagatggcgcaggatacccaggaatctgtgaatgatgtataccatgctgtcggcgagatatcagacggcgcaaggaatcaggccaatgagacaacggatgctaatgaaaatgtagtgcgtatcggcgagcagatcgagtatatctccgacaaagtgaattctctgacggattatgccggcaggatggcagaagcggagaaagcttccgaagagatcatgaaggaactgaacagctccaacgaaagcaccaaggaatctgtcctgcgggtagcggaacagattaaggatatgaatggagcaattcagaatatcacgaaggcagtttccatgattcaggatattgcggacgagacagacctgctgtcattgaatgccagcattgaagcagccagagccggggaagcgggaagaggcttcgcagtggtggcagagcagatcagtaagctggctgaccagtccaagcgctccgcaaccgagatcgagcagatcatccaaaatatcatggagtcttccggcagaatggtggagatcatgggtgaagtggaagccaacatgaatcaccagcagagcaagttagaggagaccggtgtgaagactgcggcagtagcggacggtgtagagaattccctgcagcatatcggtggtatccgggagaagatggatgtcttgggacagtccggaagtgcgatccgcgatgtagtggaaggactgtcggcaatctccgaacagaatgcagcatccgcagacagtaccatgcaggcggctcatggcatgagtgataccatgacagaactgatgaattcttctgagaacctgctggcattagcggataagttggaaaaggtactggatgttttcaaggtataaagaggggccggaagttgtccggcagggagataacatataaatgacagaaaatgcagtccggttttcatagaaaaccggactgcattttcgtgtggtttattgacggagataccatcatgaattacaatataagagatgtaaggaatgaatatatcagacgggagagaaggagaatgcaaatgaaagagatggaacgaaataaccgggtggccatgatagcacatggtgtgatcaatgcatgtatgcttttcattagcgtgatcggattcgttgagcacacagtatcggctccggtattggtagtgctaatacttcttggaatcataccggttttggcagaatttatttgttggaagagggatcatgcgaccaaagctataaaacatctgtcactgatcggatttgcgctgttttatacggtgctgctttttacggcacagtgcaacatggtgtatgcatttgtaattcccatgatgtttgcagtcatgccttatcatgatgtcaaggcatttgtacttattaatgtggggacggtggtagagaatatcctggtggtgctcctgggagccacacaagggggatttggttatctggggcaggacgcaggatttatacagatttcggtaatgattctgctgtgcattacatccatctatgctaccatatccaaccagaagaacactgatgaaaatatagagagcattacagctgcgcaggaccgcacggaagcaaccttacgtgaggtcatggaaatgagcagccggatggagacttcagtagctgatatcacagcggaattgaataaactggaaactgcttttgacagtaccaaaacagccatggaggaggtgtctgtaggttccggggagtctgcagcggcgattcagcagcagacggcacagacggaggctattcaggaaaaagtaaataccgtgagtgaagtggcagagacgatcggaaacaatatggaacatacgatagaaatactggatgccggaaaagaagagatgacaggtctgaaggagcaggcagaggattctgcaaggaacagtgagctggcagcacagaagctggaaactctggatcattatatgcaggagatgcattccatcgtggaaatcatcagtaaaatagcgaatcagaccagtcttttggcattgaacgccagcatagaggcagccagagccggtgaagccggccgcggattctccgtagtagctacggagatttcgggaatggccacccagacaaaggatgctaccggcaatatcgcagagctgatccaaaatgtatccggagcgattggagaagtggtaacggtcattcgccagatgatagatggcatcggcagccaaagggaaggaacgatgcgtgcggcggacagcttcacagcaattgaagacagcagttatacgatcgtggataatctgggagagatgcttcagatagtagaagctctgaaaacagccaaccaggagatcgtggattccattcagacaatctcagcgactacggaagaagtatccgcccatgccagtgagacgctggaagcggaagagagaaacagagagattctgcagaaaattacagaaaatatgaattctatggtaaaaaaataagtaacggttcttgtgacagaacggacaggatagaaacaggagtgacagaatatgcatgacaacggggtgactttacagaaaaaggtgttacagaatctggatataccgtattcgtatgaactggcaaaacgaatggaacagtatcgctcacatccgacactggggtatcgcccggcaggttctaaggcagaatttgagaccggagagatgctgaagacagaaatggaaaaaatcggactgtctgaggttacaaaggatgctgtgacggtagacggctgggaatttcataaggcggcgttaagctacacgaatgcagccggggagaccgtgtcagcagagctgggagcctatcagacaacctttgtcaccgatggcccgaaggaattttccatgatgtatctgggaaaaggaacggagacggactatcagggaaaagatgtcagggataaactggtattggtggagattaaccagagagatgagtggtggatcaattatccggtataccaggcacatctgaaaggagccgcagccctgatcgcagtgcagagcggcggctacggcgaaatcgacgatgaagctctgaatgcacaggatatcgccggaccggaggatgctcccgctttttccatttccagaaaagatgcggcaggcctgttggagctgctgcgtgatcaggaggaaataacggtcacctttgatgcggaatccagggtgaccagaaactgcacgacttataatattgtgggaaggattcccggaaaacatcctgaccgcatggtgcttttgtctgcgcactatgattcctattttgacggatttcaggatgacaatacagcggtcgcgctgatgtttggtattgcaaaggcgttgcaggacagtggtttccaaccgaacaataccattgtgatctgtgccatggcatccgaggaatggggagttgtggattccaatttcgactggtctacgggagcttatgagcagatatttaccgcacatcctgaatgggtgggcaaggtgatcgcagatctgaactttgagcttcctgcgttggcacatggcaccagagcgaggatccgcagctgctatgaatatgttagcttcctggaggaatatctggcagatctgccgaatctgacgatggcctatccggaagagacggcagtgacatctccgatcgagacctggtcggatgatttttccatggcgatcgcaggtgtaccgtccatggtaaatgatttcaccggcggaagctttatggagacccactatcattcccagtttgataacgatgagttttatgatgaacaggtatatcgtctgcatcacgagctgtttgccctgctgatcctggcgctcgatgaaacggcagtggtgccgttacagttttcaccggtggtacagcggattcgcaagggtttggaacagtgtcgggagatctgctaccgcgctgatgtggctgggcagctgggagagaaaaagcgagttttgcttgaaaaaattgaggaactggagactttaagtgaccgggcactcagaagatgccgggaagaatatgaagcggtagaggaatataaccgtaactacaaacacttgcttagagatggaaaatacgacgaggcggagggacttttccggcagaccagaccactggaacagaagctgcttgcaaggttcaaacaggagcaggacgcttttgtgcagattgactggtacggaaatgtgttgtatcctcatgagatatgcagtgcaaatctgagacttctgggcggagcggtgagaaatctgaaggaacagagactttcctccgcacttcgtaagctttatcaggtagacaacaatgcctatgcctttaattttgatgaagaagtatataggcattttacggattatgtattccaccagccgaaggatcgcctgaaatggggctacggaaggctgccggagcatgaaaatctatatggaacggtcaagcagcttctccaaaaagaaagacaattggaggcattgacagaatccgatatgacggaaatggactaccgggaagaaattgccagtctggaacatgcatgcagcaagcttgtggtcagtctgatgaatatcatacagcaaatggacaaagctgtggcagagatattcgaattataatgatggcgagagcagagcatggaacgatccaccacaggcaacaaagtcttggactgacatcatcataataataaggagataacagtaaatacaattatggaaagtgataagctatatcgtgtgcagaaggaagaccttccgaaagtggagaaaatgctgaatcagtgctttgcacacgatccgttgtacgagacgctgattccggatccggaagtccgtaaaaatctgatgccggagctgtttaaatgtgatatggatgaattttatgcgacctgtgaaattttcgcagacagtgcggacttgaacagtgtattggtggtatcggatgaagcggagccgtacaatgtattccagttctattttacggaggccatggctgctttacagacggattcctatctgatcaaggaggatccttctttaaagacttttcggaattttatgaagggtgaggattatctcaattccagctggacggatcagttgcatcagaatcagcgacttcatattatctatctggcagtggatcccgccatgcaacatcacggaattgcggcagaacttttagaggaagccattgactatgcccagaagcacaaactgatgatctccctcgaaacacataatccaaaaaacgtggaattctatgaaaagttcggattcaaagtatatggtgtgatggagaagaatttcccgttaaagcaatactgtctgatccgtgaagtacagtaatattgctgaaaatttcagaaaaatccggaaacgcaactgccggttgacaaaatttcaagggcacttggtagttgtcaaccggctcttttgttatgattttcccatgtcgacgatctatgtgtgcacaagaaaacattaataaaagaaggagagaatgaaaatgatcctgtcagaaaaaataataatgttgcgtaaaaaatatgggtggtcccaggaggagctggcagaacgcctggacatttccagacagtccgtatctaaatgggagagtggagcctcaatcccggatctggaacgcattgtcagtatgagccagctgttcggagttactacggattacttattaaaagatgaaatggaagagacggaattcgccgatgaaatgacaccggagatcacagagggaaaagtgatcacggtggaggaagccaatacgtttctggaagttacgaaaaaatacgctgcccacattgctccagcagtatccttatgtgtgctctctcctgttgtattgttgtggttgttgggaatggcaggtgccaaaagaggagctgtcacagaaaatgttgcgggaggaatcggtcttatcgtactgttactgatggtggtagttgcggtagcggtatttcttctcaccggaatcccgtacaataaatatgaatatctggaaaaagaaaagctgacactgcaatatggggtatccggaatcgtggagaaagcaaaagaaacctttgcgggaacctaccggatctgcataaccctgggtgttgtattgtgtatcctgggagtggtacctttgctgatagtatccatttttttcgggaataatggttatgcagtaatccttgctacggatgttttgctcattgtagtggcgatcgctgtatggctgttcgtgtggtccggtattatctggggcggttttcagaaattgcttcaggagggggattatactgtggagaataaggcagtcaaccggaagtatgagcatgtgacagcaatttactggtgtgtctggacagcgctttatctggctatcagcctgccgacgatgcgttgggacattacctgggtcgtatggcctgtggccggagtattgtatggggcattgctggcgtttttgaagataaagaatcggaaagcagagcacgaataagcggatttcaaggagaaatgcagacggtgtgaaaaggagcggaacatatgacagtggtatgccttgtaatactggcaggaattttctggggagattttttcctgaaaaattatatagagtcgcatgtggacgagcgggaagaacgagcaatctgcaagggaaaatttctgatccgcaagcatcataacaaaggcatgatgctcaatgccggacagaagagaaggcatctggtggccgctgtttcactggcgtttacactggtattgaccgttgtctttattgcgagtctgggacatcgaggcaacaatttgctgcgactgggtctggcgctgttgcttggcggtgcattcagcaatacctatgaccgccttcacagaggttacgtggtggattacgtgagcttcccggtgaaatggcaggcgttgcgcaagatcgtcttcaactgttcggatttctgcattatcatcggtgcgttgctatcggcgcttggaatgctgtaaattgagagttaatgaaatagttgttctaaaatccacgcagaaagggctgcccgccccggactcggatgctagctacaactgtggattttctaaaggaaagtggccaagtgcttttcatcatgacggggccgcctttacgttgccatccatggcacttatcggctaacgcgaacatcgtgttcgcgttgcccctgc

SEQ ID NO: 11454 - DNA, 1043 bp, Unknown
  gut microbiota DNA sequence
atattccagtgtcctgctccgtgcgatccagaaaatggaggaagatgagcttcccaatctgaaattcatccgcatggatgccgaagatatcgacaaggtattcgggaagggagaggtcgaccggatctatctgaacttctccgatccctggccgaaggaccgccatgccaagagacgcctgccctccagacagtttctggcacgctatgatgtgatcctgaaaaaagagggcacactggaattcaagacagacaaccgtcctctgttcgatttcgcagtcgaggaactggaacccgccggctggcaggcgaaggtgatcacctatgatctgcatagtgacgcttcactgatggaaggtaatgtcatgacggaatacgaggagaaattctcttccattggcaaccctatctgcaaatatattatttttagataacaattcataacacactcattttttgaaataattcataacgcactgatttttttgaaataaataaatcatagtacaatcatttttttgaaatacttgtaactattcagagtcatgcaaaactacgatctgcgaatgcttgcattcaagcagataagaagttttatatggtgaatgtggttctgaatcgttacaaaaacttaaaccatatcggctgcttacattcagccgggaaaggaaggatcattatggaatacacttttacagctgcaaattttgaagaggaggttctgcagtcggagcttcccgtcctggtagacttctacgccgactggtgcggtccctgcaagatgatgggacctgtggtggagaaatgtgccgaagcttatgccggcaagatgaagatcggcaaactcaacgtggatgacaacatggcgatcgcgcagaagtaccgtgtggtaagcattccgcatttcatcgtgttcaaaaatggagagcccgctgtaaccttcggcggtgccatgtccgaagccgacttttgccggaagctggaccaggcgttgatgtaacctgagagttagtgaaatagttgttctaaaatccacgcagaaag

SEQ ID NO: 11455 - DNA, 6269 bp, Unknown
  gut microbiota DNA sequence
tcggatgctagctacaactgtggattttctaaaggaaagtggccaagtgtttctcgtcatgacggggccgcctttacgctgccatccatgtgcacaaaaagccatgcaggcatggcttggctaacgcgaacatcgtgttcgcgttgcccctgcggctcaaccactttccaagaaaatctcacagtctccgccgcatctatgtccgagggagcagtccttttctgctgggttatgaaaaacatcccaattatttaggcagagcatttgagaatacatgtgcggaaattaaaaacaagaatctagtatgtgcaaaaaatcaagaaatacatgcggacaattcaaaaacaagaattaggtatgtgcaaaaaagtaggaaacacatgcaaacagctccccctaactgcgggctactgttttttgaaaaacttcatgggtctatagaagataaatttccttgtaggtactttttgggacgggtaaaaacaaaaactagacattatgggtctatagcgaaaaatttgctttctagatactcaatttcttcaaaatgagtatcttagagccagttttttccctatagacccatattcagctttttatgcgttatttgcagcgaattttgtatcttacaactcagtttttctgtatagacccaaaacacagaacgccacggcggatggaatgtccttccgaagatgtttgtcgggaggtggtgatattttctcgaaaagtgttgaaagacaggcggatgttgccatggatggcaactggagccgtgcccgtacggattagaaccgctactcacttttcgttagaaaattcccaccgggagacctcacatcgaggaaggacattccgttcgccgtgggcgttcgtggcttcttcactaactttcaagttaatataagaagggtgagctttacagctcacccttcttatattttgcaacgatgttctgaattctctcattcggattcagcagatcactgatggaagaatcgtggttcaaagtatcgatgatgtaagcgatgtacttactcatatcgcagttaatgtaccattctctctgaagtaattccggagtctgatagatcaggttggtggtcagtaccttatcgatgatgccgttctcataagctttgtcgaacttgtccagaccgttggtgaagagaccaaaggtggagaagacgaagatcttatttgccttgcgctccttcagagcagcggctacttccagcatgctttcgccggaggagatcatatcatcaatgatgatcatatccttgccctctacgctagtgcccaggaactcatgagctacgatggggttacgaccgttgacgatgcgggtgtaatctcttctcttatagaacatacccatatccagacctaaaacgttggctacataaatagcacgtcccataccgccttcgtccgggctgatgaccatcatgtggttggaatctaactgcagatccttcacattgcggagcagacccttgataaattggtatgcaggctgtacagtctcgaaaccgtgcagaggaattgcattctgtacacgaggatcgtgagcatcgaaagtgatgatgttgtctacacccatgcttaccagctcctgcagtgccagcgcacagtccagagactcacgggaagttctcttgtgctgacggctctcgtacaggaaaggcataatgaccgtgatacgacgggctttaccaccaacagctgcgatgatacgcttcagatcctgatagtgatcatcgggagacatatgattctcattaccgcacagggaataagtcatggagtagttcagtacatctactaacaggtagagatcggtaccgcggacggattctaagatctgaccttttgcttcaccggaaccgaaacggggcacctttgcatccagcagataggaatctctctgataacctgcaaatgccagagattctttatgctcgctttctctctcagctctccattttacaagatactggtctaccttttctcctaagggcttacagccgggcagggaaataatgcccagagagccgacagggatagtctccagatttcttttttcttcacgattcgccattggggtaatcctcactttctgattctgtatactgttcggttacaataaaataattaattgtcagatgcattctgcatacgctttttgcacatacggatatcgggaccggtgagcttacacaaatcgtaatgactggtaatgcgggaaaatacccggtcggaatatcggtcgcgcaattcctccagacttaagttcgtggagatgatggtagctttttggcgcagatgtctctcgttcagacaggagaacagctgggatgccacaaaagtattggtcatctccgtaccgaggtcatcaatgatcagcagatcacagttgtagatatcctcgtagaatccggagagggcttcctttgccctggcgtcaaaagtataacgcgcaagggtatcaaataacccggaagcactgaaatagatcacggaatgcccgctctgcagcaattcactggcgatgcatcccgacaaaaagcttttgccagtacctactgtaccataaaagaataaattgtggtagtcttgtttgaagttttgtacaaaattgtgacagacatcgacgcattttcggaaatgcgccagatcttcgccctgatagtattcgtaagacaggttggaaaaattctcggaagcgatcatatcccggatatgagactgttcatagagaatatccagttcctgctgatgaaaacaatgacattttttgcgaagaccattgtcaccttcgatataaccggtatccttacagtccgggcaggtgtagaccggttctaaataatcgacgggataaccggccgagacgagcaattctttttttcggcgggaaatgtccttcagagaaagacgcagcctggtaagcgcctcatcatcgccgtttaataaaagctttgcctgggctacggagagttcaccaacagattcgtccagcctgccgtattccggaagctttgtatagacctccagacggcgctgttccgttagatgacgattgcggtccctggtctgttcatagtctttcataatggaattgtattgtgcgttagtcagtgacacgacatgttcccctttacctgcaaatatttcggttaattacttaaaatttctttttccagagcggcaaagtcataactgttctgggcaaattgcgtgaaacggttggaggatgcggcagcaggctttgtggcctttttcttctggaaagtggcatccgcctgctggatatccgttttgtgatggatccctgcgtttttccagctgcttaagattccttcagcatactcgaaacgatgtctgtccgtagcaagggaactgcgctcacaggcttccaatataatatcggtactgaagccgtactctctggtccagcgattgatgaattccagttcctttgctgtgggagcagtactgcgtcctaagctgttcatgatggaatagacatttttatcgtaacgggtagagaatttttgcgcctgttttggcgtggtgataccctcctctgcccagttgacagcaactttttctatgtatttgaaatctttctttccacgttctacgcagtactgcagcagataatcgatcagatcatccgaaaaatgcagcacatctgtgaagaacagaatcgttttgatctcggagggggtcagaggtttaccgatatatgcttctgcgatgaacaaaagctgggaagtctcttctctctctttaaattcccgcaactgatccagggaataggcgggcttggtatagacaggagttgcctcctgcggtgtagtctgcacacgctgtgcagcagcgctgatcatggagcttcctgcagtattctgcgcctgtacggaaccggaagttaacagtacattgtgctggggggcaggggtggcctgggcgctcagatcacggagatggatacctaccagagtcttattctcatcaaagtccagatccagaatctgctgcttctcccaatatttcaatgcacggatcacatccttttccgtgtggttgaacttgtccgcaattccggacacactgatggcctgatccgcattcagcatgcgcagcagataaaaatagaccttcagctgtgcgtcgttggcatccttcatatattcatcaataaacagattggacactaccgtcgaatctgcataattatccttatagagcgctattcgtgccataacacacaataccttctttcacaaatttcacaaatcattcctttttcaaagtaagaccaagtatagcataagacctgtgaaaaagaaatagtcaatttgccggaaaaccttgtaaacactgggtttgcggacacgcgaagcaaaatgtggaaacggtggatattgtggatacctacagacggtgtatcggaaaaagcttatatatcggcaaatatgcgtcaaaattcgacacggaaatatccacaaggaaacaataaaatatccacagggaaagaagggataatccccaacattctctgtggataatgtggataactatttgccaagcaggttttcaccgatttttactacatctccggcacccatagttatcaacaggtcaccgtttatgcaattttctaataaaaagttttcaatttcatcaaaagaaggaaaatagtagcattcatgccccagtgcccggatctctgcctgcagggtctcagaactgattcccagggtgtcggtttcgcgggcagcatagatatctgccaggacaaccttgtctgccagacttaaggctttggcgaaatctttcataaacgccttggtcctggtgtaggtatggggctggaagacgcaccagagagtcttgtgagggtagttggctgcggcatgcagagtggctgcgatctctgtgggatgatgcgcgtagtcatcgataatggtaacgccaccgatggttcccttatattcaaatctacggtccgtgcccgtgaagccgtgaagtgcggaagcggtaatttcacggtcaatcgacaacagatcagctaatgcaatggaagctactgcattgcagacattgtgttctccgggaacctgcagggaaaaactgccggatccctcaccatggcaatgaagcgtaaaggaaggatgccccaattcatcataagtaatatccgaaggataatagtctgcagcagaaccgtcactgttgacagcttctttattaaaagtgatcacacggcagtcaagatcccctgtgatctcctgcagtttgtcaatggcaccgttgatgatcagacagccatctgcgggcaggagttttgcaaatttatggaaagaatttctgatatcgttaatatccttgaaaaagtccagatgatcctcttcgatatttaagatcataccgatcctggggaaaaagcttaaaaaactgttggtatattcgcaggcttccgtaacgaacaggtcagtactgcctacgcggatattgccgccgatactttttaacattccaccgatggacagagtgggatctgtgccggcatgcagcaggatctcactgaccatggatgtcgtggtagtcttgccatgggtaccgctgatagcgatgggggttttgtaattctgcatgatctcacctaagagctgggctctggtcagatgcgggatgcctttttccatcgtggcgatatattcgggattatccttatggatcgcactggtaaatacgacgcagtcgatatcatcagtaatattcgcggcacgttgtccataaaatacagtaatcccctttctttccagagtctcggtaagggggcttttggaacggtcggagccggagacacgaaaaccggcatccgcaaggatctctgcgagaccactcatactgataccgccgatacctacaaaataaatggacgaggggtgattaaagtctatctgatacatgttgacacttccttaatataatgtaatggcattacttattaattaacattatatacatatagacgaaaaaaaacaatccgtaggcatgattttgaaaaaatgtgtaacattacaattttgcgcaaagttgctctgtacggaactggtagaaacttacaaaaagataaaaaatggaacgacaattatgtaaaaaatgaatatataaattgtaaaaaggcaaaaaatcctagtaataaatattcactttcaggtattgatgtgatataatcagattatcacatc

SEQ ID NO: 11456 - DNA, 6833 bp, Unknown
  gut microbiota DNA sequence
tatttattacaacaggtggaaggctagatagaggtgaggatatgattaagaaagaaatgatagctatgctattggctggaggacagggaagccgtcttggtgttctgacatccaaggttgccaagcctgccgttgcatttggaggtaagtaccgcattatcgattttcccctttctaattgtattaattcgggagtggatacggtaggcgtactgacacagtatcagccgctcagactgaatacccatatcgggatcggtattccctgggatctggatcgcaatatcggaggtgtgaccgtactgcctccctatgagaagagtagcaacagtgaatggtatacaggtactgcaaatgcgatctatcagaacctggaatatatggagagctacaatcccgaatatgttctgatcctttccggagatcatatttataagatggattatgaagtcatgttggatttccataaggccaacaatgcagaggttaccattgcggtaatgccggttcccattgaggaggcaagccgtttcggtatcatgatcgcagatgagaaccatcgtatcaccgagtttgaagagaaaccggaacatcccagaagcaatcttgcaagtatgggtatttacatatttaactggaagacattgaaggaagcattgattgctatggcagatcagccggcactggatttcggcaagcatgtcattccttattgtcatgaaaagggagcttcgctgtatgcatacgagttcaccggttactggaaggacgtaggtaccttaagctcctattgggaagccaatatggaactgatcgatattgtgcccgagttcaacctgtatgaggagtactggaagatctataccaagagtgagatccagccccccgattacatcgctggggacagtgtggtagagagaagtatcatcggcgaaggttccgatatctatggagaggtatataattccgtcatcggatgcggcgtaacgatcggtaagggaaccgtgatccgcgattccattatcatgaaccagacacagatcggtgaaggatgcgagatcaataaggcaattatcgcagagaacgttgtggtaggtaatcaggtaaaattaggtgttggtgaagaaacagagaacgatactgcacctcatatttacaaccacggacttgtaaccatcggtgagaagagcgtgattcctgacggtatcagcgtaggcaaaaactcagtgatatccggagtgacagctgctgcagattatgaggattcccagctcgcaagcggcaaaacattaattaaggcaggtgaatagcagtgagagcgattggaattattttagcaggcggtaacaatcacagaatgcgggaactctcccagaagagagcaatatgcgctatgcctatcgcaggcagctaccgcagtattgactttacactgagtaacatgaccaactctcatattcagaaagtggcagtatttacccagtataatgcaagaagtctgaacgaacatctgaactcctccaaatggtgggatttcggacgcaaacagggtggattgtatgtattcactcccgctgtgacagcagagaacagcaactggtacagaggaactgcggatgctatttatcagaatctcagcttcctaaagaacagccatgaaccttatgtggtcattgcttccggtgactgtgtatataagctggattacaataaggtgctggaatatcacattgagaaaaaggcagatatcactgtagtctgccgcgatatggaagccggtaccaatgtagagcgtttcggtacgatccgcatgaatgaggaaagccgtatcgaagaatttgaggaaaagcctctgcaggccaagaccaataccatctcctgcggtatttatgtggtacgtcggcgactgctcattgagatgatcgagaagtgtgctgaggaagaccgctacgattttgtaagagatattctgatccgctacaaggatctgaagagaatctacggatataagatcaaggattactggagaaatatcgcatcggtagacgattattacagtaccaacatggatttcctgaaagcagatgtgagaaattacttcttcaaacagtatccggatgtatattccaaggtagacgatctgcctcccgcaaaatacaatcccggttcccaggtgcgcaacagcctggtatccagcggatgtatcgtgaatggtgtggtagagaattccgtcattttcaaaaagagctatattggcaataattgtgtgatcaagaattccattatcctcaatgacgtatatattggagataacacgcatattgagaattgtattgtggagagccgtgatacgatccgggcaaattcgtactttgtgggagaaggcgaagtcaggatcgtagtagaacgtaatgaaaggtatgtcatttaagtgatccggatccgagatcgttacagtgcggaaaaatgcgtagggattactgcaacaataccaagggggttagcaaatgcagattacagatgtacgtgttcgtaagatcaccaaggaaggcaagatgaaagcggttgtatccattacactggatgacgaattcgtagtgcatgatattaaagtgatcgaaggcgaaaaaggattattcattgcaatgcccagcaagaaggcaacggatggagaatatcgggatattgcacatcccatcaattcttccaccagagagaatttacagaaagtaatcctggagagttacgagaaagcattagaagagccggaagaggcaatttaaatcatcaaaagacatataaaaactgctgtcgtcagagaaatctgcggcagcagttttttatgcggaaaattaaaatctttgataagcacacaatccattttcaaaatgaagtctgtcaattaactccaaagaaccgccgactcttcggtacaattcaatggttccgacagcagtgccgccctcccatagaggagcgggagagacttttccatccggattttcatagagcaggggcatcatctgttccttactgcaacttcctgagatgcgtatgacggaagtacggttctgcgctttgaaatgccagataaaacgtttgttggtttcttttaccttccatttgcaacggggcaacgtaagcggtttgccgaaatgatattcgaaatcttctccggtataagtcagctgcatcaggattcttcgccgcatggggaaaaataaaaacttcggacaacagccgtcgatggcgagagcggaatgtttcagctcacgaccactgcgttcactgatcagatgaccggaagcaaactgcagccatggctgattgtagctgcgtccccaatgcttgtctgcatagccgtaggaagtctccggtgtaatatcataggtgacaccgtttaaattaacagtaccgcggaaaaaggtccggattccttcaccgtgccagaagctttccaacgcatgaatcaccgtaaaaaacgcatttgcaatatatccggtatggcaggctaccgccttgtgcatttccagatcccatacaaaactgccggcatcggtcatcagagagcgatgccgtgcggtatcctcggagatctcgatggcaccactgatgcgattttcacttaagacacattcctcgatctgcatataaaaaggatcctgtgctacctgtagagaggtcatgggatagtaggactgcaattgcagcccaccgtcaccgttcttagggaaaacgcctgctttgatacagacataagaaggcttcatgccatgacgtttgtaataggggtgttgtccgagaatcggctgtgtggttccgagagccggattcagaatactatattccacaaaaaaagtgcgggtctcctgcgtcgtggaacaaacgccctggaaagaatgccaccagcgcatgtaaccacgttttgcatcagaaccccgcaacatatatgcatttcgtttcagatcagataaattcattgatgaaagactcccccgctttagtaccccttaaaacaacatttcgtagataacgtctatattataatactatatattgtgaatgacaagggtgtcggaagaatcttaagaaagttttagagattttctttgatccggatatccaccgcggtataattgtattccttctccggagtctctccggtggtcagataggcgaacagcagggaaagcggtttgctgccctgaatttttggctgctggcagataatagcggcaatcgtgccattttccaacatctgtctcgtggtagggaccagatcgaaagcaatgatccggacggaaccttttcgctccaaagcttccacactgcggcagccgccatagacaccgccggcagcaaaaaacagcgcattgatctcggggtgttctgataacagtgcagtggtcttctcgtagctttccacttcatcgtcgtggatctccaccgtgtctatcacgtggatccggtcacggtaagggactaaggttttcataaatccggcaatgcgctccgtatggcagaggatattggaagaaccggtgacgattccaatgtttaccgtaccggaagtcatcagctgtaaaagcccggcggcagtggcaccactgcgggtataattgctgcccacataagcgaggcgtctggaattttcaatgtctgtattcagcgtgactacggggatgccttgttcatataacgcattgatacggttgcggatccgggcgtcattataaggagtcatggcgatgccgtttacctcttccgccagtagctcgtcgattgtctgcagctgtgcctccacaccgaaggagatctgttttgtaattacagtgcagttgtaatttgtcagctcttccgctttttcatcgattcctgccaatacatcctggaaaaagggattcccggtggaaaacagaatgacgcctaacttcaatctctttttttgggcagccaggaccagaccggcacgattgggtttatagtccagttcttttgctatttttctgattttctcagcagtctccgggtttactgcgccgcgatcattcaagacacggtccacggtgccgcgggatactccggcaagagctgcaatttctttgattgtagccataaaaagccccctatattttgttataaaagtatcataatttccacataaagtcaatgaatgttgcacacttgtccgagcacggtttggatagaaggacatcggtagcatacagcttcacttttttgggaaaatcataggaaaaataaaatttctacttgaaaatatttctcacagcagttatgattaatacatagcgtgcacgagcacataaaggcggcgaaacggaagtaaacagtaaacataaataaaatgaaacttatgggacaaaaaatgccgtacagattaaaatgggaggaagagtatgctatatattgggattgatcttggtacgtcagcggtaaaactgttgttaatggatagtcaggggaatatttgcaatattgtatcccgggaataccccttgtatttcccgcatcccggctggtcggaacagaatcctcaggactggtatgaacagaccatggagggcatccgggagcttttaaaagacgcagacaagaatcaggtggcaggcatcagctttggaggacagatgcatggacttgtcattctagacgagaaggatcaggtgatccgtccggcgattctatggaatgacggcagaaccaccgaggagtgtgactacctgaacaacgtgatcggcaaggataagctgtcggagtataccgcgaatatctcctttaccggttttaccgcaccgaagatcctctgggtgaaaaagaatgagccggagaattttgcaaggatcaaaaagatcatgcttccgaaggattacattgcgtataggctgaccggtgtacattgtacggatgtatcggatgcttccggtatgctcttgtttgatgtgaagaatcgctgctggtcaaaggaaatgtgtgagatctgcggtgtgagggaagagcagctggcgacctgttatgaaagctatgaaaaggtgggctgcgtattgcctgaggtggcagacaaacttggacttccgcacaatgtagtggtagcggcgggagccggagacaatgcggcagcggctgtgggaaccggaaccgttggggataatatgtgtaatatttctctgggaaccagtggaacgatttttatctcttctgatcatttcggtgtggatcagaacaatgctctgcattcttttgcacatgcagacggtcattatcatcttatgggctgcatgttaagtgctgcatcctgcaataagtggtggatggatgagatcatcggaacgaaggattacgccgcggaacaggcacagatcagtaagcttggagagaatcatgtctatttcctgccgtacctcatgggtgagcgttctccacataacgatcccaatgccagaggtacctttatcggcatgaccatggacacctcaagagccgatatgacccaggcggtattggaaggtgtagcatttgccctgagagattctctggaggtggcgaagtctctggggatccatctggaacggaccaagatctgcggcggcggagcgaagagcccgctgtggaagaagatgatcgccaacatcctgaatctgaaggtggatgtgattgagagtgaagagggtccggccatgggtggtgccatgttggcagcggtagcctgcggcgaatatgcaagtgtggaagagatcgcagagaagtttgtgaaagtcacaggaaccgtagaaccggatccggagctgacagcgaagtatgaagatcgttatcag

SEQ ID NO: 11457 - DNA, 7106 bp, Unknown
  gut microbiota DNA sequence
acaaaatgaacctcgttattttcagattgtgctataatagagaaaggttggtagagtagaatgaaaattttgtcggtaaaggatcctgcgtttcgcaagtatggcagagtgatcaccaatgtggattttacacagctggtggaagaaatgaaaaagactccggttcctgacggcgtggtgtacgagcccgggatcaatgctttggaagcattacctgtgaaaaaagaactggagatcatcacatacggagaaatgcctgtacagatcggttactgcaatggccataattccaaactgaatgccgtggaatatcacagaagttccgaaattaatgtggcagcaacagacgccattctgatcctcggacagttagctgatgtggcagaggattttacctatgatacttctaaaatggaagcatttttagtaccggcgggtaccggtgtggaagtcttcgctacttctctgcattatgctccctgcggcgtagacggacagggatttcaggtggcaattgtattgccccagggcaccaattatccgcttcagggaacccatcagaaagtggatcatggccgcgctcccagtgaggatgcactgcttgccgctacgaataagtggttgatcggtcatgcggagggcggactttccgagggaagctttatcggactgattggagagaatttggatgtcaacaaatagtgggcatgatgtagcagggtttgaacgctggatttcactctgtggatgggcggaatctgcggtaaaataaataataagctagagaaaaagaaaacgaaaacaggaggattacaaaatgagtaatttacccgaagtaaaaattggcgttgtggctgtcagccgtgactgtttccccgagagcctttccgtgaacagaagaaaagctctgatgaaggcttataccgagaagtacggcaccgacagtgtctatgagtgtcccgtatgtatcgtggagagcgagatccatatggtgcaggcattggaagatattaagaaggcaggttgtaatgcactgtgcgtatatctgggcaacttcggccccgagatatccgagaccttactggcaaagcattttgacggtcctgccatgttcatcgcggcagcagaagagacccagaacgatctggtaggaggcagaggcgatgcttactgcggtatgctgaatgccagctacaacttaaagcttcgtaatatcaaggcttatatccctgagaatcctgtgggaaccgcagcagagtgcgcagatatgctgcatgagttcattcccattgcaagagctatcgtgggcttaagcgatctgaagatcatttcctttggacccagacctctgaatttcttagcttgtaacgcaccgatcaagcagctgtacaatctgggtgtggagatcgaggagaactccgagctggatctgttcgaagctttcaagaagcatgacggagatgagagaattccggctaaggtaaaagagatggaagcagagctgggcgcaggcaatcataagcccgaagtactgcctaagctggctcagtatgagctgaccctgttagactggatcgaggcgcacaaggggtatcgtaagtatgtagcgattgccggcaaatgctggcctgcattccagacccagtttggtttcgtaccctgctatgtgaacagccgtctcaccggtatgggaattcccgtatcctgtgaggtagatatctacggctgcttaagtgagttcatcggaacctgtgtcagcgcagataccgtaactctgttagatattaacaataccgttcccgatgatatgtacgaagagtccatcaagggtaaatttaactatacgcacaatgataccttcatgggcttccattgtggcaataccaactccaagaagctgacctcctgcaacatgaagtaccagatgatcatggcaagaacccttcccgaagaagttacccagggtactctggaaggagatattcttcccggagacatcaccttctaccgcttacagtctactgcagacagcaagctgcgcgcttacattgcacagggtgaagtccttcccgttgcgaccagatccttcggcggtatcggtattttcgctattcccgagatgggacgtttctatcgtcacgtactgatcgagaagaacttccctcaccacggtgccgtagcattcggacacttcggcaaggctctgtacgaagtattcaagtacattggcgtaccagtagaagatctgaatttcaaccagccgaagggaatgctgtatcctacggagaatcctttcgcgtaaaaagaacttaagtaactggcaagttaactaacttattggctagcctaccgtagcctcgattgcatataagaaacgctgacatcgcggtgtgctttagcacactttgctcgggcgcagacgtagcggtacataagcgaggaaagtaccctcgcaatgcgtccgcagaacgctatggtaccgacgtctacttacggtcagcttattcttatatgcaaccggggctactggtttactgaaaactttagaaccatagaactcccagagtgagcagataactctgggagtttttgcttgttcagagtgttttgggtctatacagaaaaattgcattaaataatcccttttttctggctatatctatagaaatatcccccaaatgggtctatacaaaaaaacttgctcaggagatactcaaaataagaaaaataagtatctcagaaggaaatttttctgtatagacccatttttcttattttgaaggcatttgacagcttcaaaagtatctggagagaagattttctgctatagacccacgctattcatacgattgtcagcaaaagatgtctcccatcgtttgtctatcgcggcgttcgccacatcacgccaaaaaagacagtgccctgtgagtaagctcccaggcactgtcttatttttgcctatgcgtggctatgctttcgtaacttgctatttagcaggagatttcttccgggctttcacaacatacacaatggcgatcaccacatccacgcagtagataaaacatccgactcccatgaagatggcaccgggcagggatacaagcccttctttacgcatgcggacgctgcagccaatggaactgatgccggtgagcagaatcgtcaaaagatcaatgagtaccgcccataggagaaagccgataccccagacactcatggcaagtccgataaagccgagaataaagtgcatgatataagcgggaatctgcacacatttgatgatcaggttcattcttgccgcctgccttgcggtcatttttcccttcgctgcctgcaccgcattgacgatcacgatgataaaggaatacagattataaatcactgcaacgatcaacagcccaatcagtgcgacatcagtgtagtcttccggcagaatacctgcgaacaataaaaagatagcaagaatcaatacataaatataaggatagataattacaggtatcattttcagatacttcaaaaattcgttcatgataattcccctctcacaataataatcctcgtaaaaaataacaaaaagagtatagcaaaaaagcataaaatgtgcaaaaaaagatattgcttttttggagcgccgcgtatatactctcaacgatagaaataacaggaaacactgataaattcagtgcctgcggttgatttgaaaaatggagaggttattaccatgacgaaagatctgacaaaaggaagccccatgagacttatcatcagttttgcggtaccgttactgttcggttttctgttccaacagttttacaatctggtggatacgatgatcgtaggacggtttctgggagtagacgacctggcagcggtaggctctactggttccatcaattttctggtgatcggtttctgcatgggtgtctgcaacggatttgctatccccgtatcacataaatttggtgccggagattatgtgggcatgcgtaaatacgtggcgaactgcgcctggctgggactggcattttccgtcatcatgaccgttgtaacagcgatcctgtgccgggatattctggtatggatgaagacacccgccaacatcattgatggggcgtataactatatttttattattttcatcggtatccctacagtgtatctgtataatatcgtggcaggtgtgatccgtgcaaccggcgacagcaagactcctgtggtattcttagtgctgtcttccattattaatattgtgctggatctgtattttattatctccctgcacatgggcgtggcgggggcagcctgggcaacggtgatctcccagggagtctccggtgtggcgtgtctggtctatatggtgaaaaagttcgagatcctgcggatccgcagggaagaatggaaagtggacggacatatgatgatggtgctgtgcggcatgggagttcctatgggactgcagtattccattaccgccattggcagcgtaatcttacagactgcagccaacaccttaggttctgcggcagttgcggccatgactgcaggcggcaagatcggtaacttcttagcctgtccttttgatgccatgggttccaccatggcaacctatggcggacagaacgtgggagccggtaaattagaccgtctcggaaagggactgaaagcctgcgtaacgctgggggtgggatattccgtcattgcttttctgatcgccgtatttttcggcggtccgctggcgcagctattcgtggacggcggcgaggcagagatcattgccaacgtgcgtgcttttctgttatggaatacagcattctatattccgcttgcactggtgaatattgtccgcttcctgatccagggcatgggtttcccgaaattcgccattttagcgggtgtcttcgaaatgatagcaagatcattagcaggctttggactggtgcccatcatcggcttcaccggggtatgcctgggcagtcccattgcatggatcatggcggatgccttccttattccggcttatttccatgtgcgtaaggtgctgcaaaagaggatggtgccgcaaacggatgtcccacaggcagtttgacaacacgacggtcgtaagtcaccagaccgttgacttcttcctccacatcggagagctgcgtgtataccgcaccgctcaatccctttgagatcagaggaaataactgtctggaaaataactgcttcagggcagcagccatttcttccggggtgtcgtacttttgatatccatagacgcggttcacgctggaatgcccagcgatatggcaggcgtagccaccatattccgagataacgaaagccctttttccatccaattttacctgtaacggacggaagtagttatgaatactgcggaaatccccgcctttctggtcaaaccagccgctgacatggtctaccggacgggtggggtctttttttgccaccattttcgcgatacgggcggcatcgaactgcccccaaccctcgttaaaaggcacccacacggcaatggaaggcacattgtacagatgatctatggtgtctaaacattcctgctcccagcttttccggccttcctcggagctacgggagaacagttcgtaatgattgtccttcgtgtgggcggacatgtgggggaacaatgttggcatataacacacccagggcatatgataggtagagccaccgctgaccatatcctgccatacgatcattcccagacgatcgcagtggtaataccagcgcagagactcgatcttgatatgtttccggagcatgttgaagcccagaccttttgcaaggttaatatcatagacaaaggcctcatcgcagggagcggtcatcagtccgtcggaccagtagccctgatccaggatcccatggagaaaatagggcttgtgattcaggcagaagcgggggatacccttagaatctcgctctacggagtagcagcgcatggcaaaatacccttccacggtatcaccatcggcagtcagagtaaagggatacagccaggggtgttccggactccagggcttgaaattcacaggctccggtgcatcagcgggatctgttgcggaataggtgacgctggcgggaaaagaaagtactaccgtggtatgcgtgagcccaaaggaatcctgttgctcagaaattttacgtacacgcatccgtgtgagcgaaccggtattttcctgcgcgagggttccgtcgcaggagggaatgttcacccggaattccaaatggttgaacggcttcggagaacacagaacgaaggttacggaagccttgttgtactccggagtgatcttataattgatcacatagttttccggaacccattcgtaccagacactctgccagatgccgctctgggcagtgtagaacatgccgccgcggttcagggtctgctttcccctggtggcgtaaccggtgtcggtcagatcccggacttttacgtagagggatacaggatcctcatttacatactcagtgatgtctaaggaaaaaggaaggtagccgccactgtggatgccaagctgctttgtgtcgaggaaaacggttgtctcctgatctaccgcgtcaaaatgcagaatgcagtgcatgttttcctctttttgggaaagctcttccgtgggaaaagaaagttcccggtggtaccacaggtactccgtgggctccagccgtctgtgaactccggaaagcagggcttccggagaaaaaggaacccggatgataccctgagcggtaaaatgtgcaggatcctccgaggaactgctcccatctgcgggcacaaaggcatattcccaaagaccgttcagcatatgataatctgtacgtctcatctgcggccggggatattcggacaggatatcatcataagaaccggatcgcatcagcaaatccccccagggagtatagaggggatgcagggtatcctccgggtgtgcctgattcagattcgcagcagcatcttttaagttcatgcgaaaaccttctttcctaaaatagattatttatagtatactacatttggaaagcatagcacatgaaaaatgatacgattctttgagaaaaaagtttagataagccat

SEQ ID NO: 11458 - DNA, 58329 bp, Unknown
  gut microbiota DNA sequence
tctgaaaatatgaggtagtacagatgaatatattgactgttgacaatattaccaaaagttatggagtacgcaagatttttgacggagcctcctttttcctacaggaaggggaaaaggccggaatcattggtattaacggaaccggcaaatctacactattaaaaataattgccgggctggaagagaccgatgacggtaccgtaatcaaggcaaatcactgtctggtgcgttatctgccgcagaatccggagttcgcaccggaagagaccgtactggaagcggtgttgcggggcaaccgcgtggaggaaaacgcaggaaccatcgaggcggatgccaaaagcatgctgacaaaactgggtgttacggaattttaccagccctgcgggcagttgtccggcggacagcgcaagcgtctggcactggtatcggtactgttgtccccggcggagatcctgttattggacgagcctaccaaccatctggacaattccatgtccgactggctggaggagcagctgcgccgcagaaaaggtgccatgatcatggtcactcacgaccggtatttcctggacagcgtcactgaccggatcctggagctggacaaggggaagatctattcttatgatgccaactattccggctatctggaactgaaaatgcagcgggaagagatggcgcaggccagtgagaaaaagcgtctgaacattttacggaatgagcttgcctgggtgcagcgcggtgccagagcccgctccacgaagcagaaggcgagattacagcgttttgaggaactgaaaaatgtgaaaggtcctgtgacggacggtaaggtagagctggcttccgcagcatcaagactgggacggaccaccgtggagatcgagaatgtgtccaagagttatggggataaagtcctgatccgcgattttacttatctgttcggcaaggatgaccgggtgggattcatcggacccaacggaagcggcaagactacattaatgaaaatgatcctgggtgaagtggctccggacagcggacacatcgagatcggacagaccgtgaagctgggatattatgcccaggagatcgacgacactatgatgcatccggagcagagagtcattgattacatccgggatgtggcagaatatatcatcacggaggatgggcagatcacggcagcgagaatgctggagaggtttcttttttccggggaggaccagtacggacagctgggaaaactgtccggtggagagcggcgcagactgcagttatgcaaagtcctgatgggggcaccgaatgttttgatcctggatgagccgactaacgatctggacattgccaccctgcaggtactggaggattatctggacacgttcccaggcatcgtcatcgtcgtgtcccatgaccggtattttctggatcgtgtggtccgcaggatcttcgccctggaggatacccgcatggtgcagtatgagggcggttacacagattatgccaataggaaagctgcggaggggaacacagagagcacaggaacggcggcagcatcccagcctaagaacgccgatgaggaaactacttctaaaaactggaaaaacggacagaaacgcaaattaaaattcacttaccaggaacagaaagactatgaatccattgaaggcgaaatggcggcattagaggataaaattgcaactttggaagcagatttttcaaaatatgccagtgatttcgtgagactcaatgaattgacacaggaaaaagaggctgcggaacagcagctggaagaaaagatggaacgctggatgtacttggaagacctggcggctagaatcgaacggggagaagaaaactgacaatccgaagttcggaatgtcagtcttctgcatcgtcggtagctgccgcaactgcggataccacggaggatactacggcgatcactactgccaaaaggatgatcaaaagtccgccggctaaaagtaaaaacataaagtacgctcctctctgaaataactttacagacacccatattatatcatttttcctaaaaaaaacaataaaaatcggcatatagtagaaaaaatcaccaaaatgaagtataataaaagcattcatcgggactgatttatgttttgaggagggtgcctatgacgtatcagaaagcaaaagaggaaatcattgaatcttctccgcagaaaacagatgccggaaaagaagaattatatctgtattctcttagaaaaatggcggaagaaaatgtagaaaataacagaacagggctgacaaatctgcataatatcaattcttttttctatctgtgcggtgaaatgatcaagcagcagccggataaaaaatacggtgtcataattatggatattgtacagtttaaggctgtgaatgagttctgcggcagagacgaaggagacagattgctaagatttattgcgtcttgctttgactggtatgagaataacaggccggatagctatgcctgccatatcagagcagatatcttttgcatatgcacaagctatgaggaagtagaggaactggaaattattgtgcgggagatcagaaaaaagataactgactttccgttcgcttaccgtgtacaaccatcctttggaatcggaatctcaccggagagagcccctgccatcagctatctgaaagattgcgccacgatggctatgaacagtatcaaaggcaaagtatatcggacatatgcagtatttgacgaaaaaatgcgtagtcagaagatgcgagaacgccaggtggaaaatgatatcgtgtccgcactggagaacggagaactacaactgtatgtgcagcccaaggtcgatatgagggacggaagagtgatcggaggcgaggcgcttgtgcgctggaagcatccggaaaaggggctggtgccaccgagagagttcattcccgtactggagaaaaacggatttatcatcaatgtagatgaatatatctgggagaaggtgtttgcttatctgggaaaattgcaccgggaagaccggatgcttgtccccgtttccatcaatgtatcccgattacatgcctatgatgaaaaactggcagagacactgatccgtctcagggaggaatatgatgttccgccggagtatgttccgttggaactgacagagagcgccttcctggaggacgaggcaggtatgtatcgccgcatggaaagcctgcgggagcggggcttcctggtgtccatggatgatttcggaaccggttattcgactatgaatatgctgaagaaccagacgctggatgagatcaagatcgacaaagagtttatccgggatctggaaaaggataagagccggatcattatccgcaataccattgccatgctgcagcagctgggagtacatatcgtgattgagggagtggaaacagaggaacagaagagcttccttttgggatgcggttgtacagatgcacaaggctttctgtttcaccgtcctatgccggtggaggcgtttgatgcattgctgttgcaacaggaatgtgagtatgataggacaaaatagacaaagacaaaatatacaaggtgcgagaccgcagtctgactggattttcagtgaaaaatccccggactgcggtttttgtttgggcactattccgaaaatcaggaaatagttttgaaagcgttgacatatcatggcagagggagtaatctgcatattacccgacgggacagtcagagcgtcggcatcttttatccggtcatgttcgaccacacatcacattacagaagaagtaataacagggaacggctacaacaaaatatgcgattggaggaaaaatggaagaggatttacagcgattagtagaggatttccttacgcaaaagcagattcttttggtgcaggtgaaaaaaggaattctgagtaaggaacaatttttacgggaagttttgaaacacatagagcagaattatcatttaccggtggaaaaacaggcggatcttttaaaagaattcgagcaatatgtgttcggctattccagattgtcaccgctcatggatgatgggagtatttcggatatccgtgtagtcagccatgactgcattcggatcaagagagaggggaaacgtatggatgcaggcattgcctttgcttccgagaaggaatatcggcagtttattgattatatagcgaccagaaatcaggtgaatatttcgaatctgaatgcgattcagcgatttacggatacggaaagtcatccggattttatatttcgttttacactgtccatgccgatcgtgaatacatacagcgaaccttatctctgtattcgtaaagttccgaagaattttccgatgatggcgcaactggtggagaagaacatgatggacagggcaacggcggaactgctggtgcaaaggttccggcaggggtccacactgatctgcggaggcaattcctccgggaaaacgacactgctgaatgcacttaaagagactttgccggatgatatggcgatactggtggcccaacaggcggatgaactgacgacacttttccatccggatatgatgtttctacattccctgccgggtgcttcggagagctcagtgaattatgatctgaagcatatcagcattgccggtcttaccatggatgtggattttttcattatcggagaagtgaagggcggagaggcactgtatcttctgaatgcagcttatacgggacagatctgtgccgctacagtgcatgcgccgtccgctgacagagctccggagaaaatagtggattatgcaatgtatgacagtagatactcacgcaatgagttgatgaaaatgatggactgctttcagacactgatcttcatggaacattacagggtcaaggaaatatttgcctgcctgggctggaacgcagagaaagagaatctggaatatgagaggttgttttgatcattacacaggaggaacttatgatcatatacgtatggattgtctgtttattatttatgggctttttgcttctgtttggccggatgaggtggctggagaagctatgggagctgttgcaccggaccagggaaggaatggatcgtgcatcacaactgagagcagtagagaaccggcaccgtctgatggaatttcaacaaaaaaataatgtctggtacaggatagaagaggttttacggtacagcggattgcgcagaagaatgccccattttacagcagaaaaatgggttgccggaaatgtactgctgattgcggctgtcttcggagggacacaggtgcttgggtgcaaaatgataacttcacttttgtatctgatgatcacaatggctgtcgagatgattctcctgaacacctttcgtttcttggaataccggtcggtaaatgacaatattttaaagtgcttgaatttcctgggaaattacagcctgactgccggggagatcaccggtgtcctggggcaggtgagtaaatatatggaagagccactgaaaggagtgatggaggaatgcgcctatgaggcacagatgacgggaaattcctccacggcactgctggcaatggcggaaaaggtggaacatccgaagttcaaagaacttgccagaaatctggagatcagtatacgttacatggcagatctgacaacactggtagacagtagcagacgttctgtgcgggaatatcttaggacagaggaggaacgaaaaggaatgctgagggaagcagcgatcaatatgggactgctggcggcaatgtcagtatttgctctgatgacagtggatcgtctgatcgatgtatctgtctggaagatcgtaacagatacgttacccggacacctggcattgggaatctatgggatcatatttggattgttcctgcgcaaggtatatgggtttcgaagataaacacaaatgttgtgtagataccaaaatgtgaggagaatgagagaatgtactggaaaactatttggataccgcagatattgggagctgtcttcggcggagtgtttgtttttcgtctgggaaagagcaaaacaccggaaatcctgctgcgcaccatggaagaatttacgggaatgatacgggaaagcaaaggctataccggctgggcggaaaagacagagagaaaattgatccgtaacggagcaaaatatcattttggaaaaacgattactcccatgaagtacttaacaggtagaatcgtgctggcttttttgggggcgatcagtctgttgaaaatcggatgcggatacgctgttttggcagcaacggtgctgtattttctgccggaactgctgttgatatatatgaatgagagggataatcgcaatatgttgacggagatcaagctgatctatcaggcattggaggtacagatccgtgccggtatttatgtcgcggatgctctgacggaatgttgtcagagtgtgaaaggacggcgcctgcaacaggccctgatagaactggcgggggatcttgtaatgcagtctgatcttatgacggctttgtcagcttttcagggaaagtttgataaccggcaaattgatgcattgtgtatcacactgatccaggcgggggaatccggacaagctgtggaactcctgggagatatgggagaacagctgaaggatatggagataacagtcctaaatcatcagaaaaatgcactggaccgcagcattacattttaccagttggggatgctgggcgcgaccttgggagtgattttgtatgcctgtgtgggatatatgttccgtgcggcagtgaaattctaaacagccggccaatgaaaaaacaaaaatacaaaatataaaaatattaaaatacgaaaggaacgaaataaaatgaaagagaaaaaacacggaaattgggaaaagattgtgagcggaattaaaaaacatgccttaagcagagaaccgggaatcgatgggattctggtgacagtcggactatgcattattgcattgttgctgtgtgtggtcatgaaagacagtcttacaacgtttatacagacgatcgtgacggcaatgcagacaaaagcggcagatattctcaccggtgtataaggcaggagagtgtatgacaggacgaaaaaaagaagccggaaacgtaggagaaatactgacaatgggactgtgcatcctggcactcaccgcggtaatgataagttatatggaaaatgtacagttgattgccaaaaaggcggaagtgggacagctggcacgatgttatctgctcaagatggaaacggtcggctatctggcggctcaggatcagacgcagctgaccgcagaactggagaagctggggataacagggattgattatgagggaagtacattaaatccggcgggatacggaaatgacgttgtattgcagattcatggccggctgggggaaacttatgaaatttatgaaaaaagagtatctacagcgaaaaactagagaacgggggcaggcttcctgggtgcttggactgttcctgatattgtttttggcaatactgttatgtatgcagctgcaggttgctttgtacagagaatctgccatgtatatggaagatgccctggcattgtcgaatctggcctcggctgtcatcgatatagaagaatacggcattacgcaaaaagtactcataacagatcccgaacaggcatatgagaggtactgtcatgcactgagagaaaatcttggactggataatcattttatggcacagaaccggagaatgatctctggacaggtggaaatacagaattacacaatctacaatgtcacgtccgatctggtagagatatggcagagagatcgggatggaacggtatctgtatggagcggaaatgttggaaatgttcatgcaccgaacggtcagctgattgaagaaaccggtgtgtacagtgagatcgcttatcctgtggaaggatttctgggcacacgcgtgatggctcataagggaaaactggtagatgttataagaaatgacaacagggagaagaaaaatgaaattacagaaaataaagttacgggaaatgagtaaaagcacaaaaaataaaatatggaacggaagtattctggcggcattcatagcggcggcagcagtatttatcataatgcttcaggcagaaaaaaaggttctggccgagtatgagaaaatcacagtctgtgtaacgatcgacgatctcccgaagggagaaagcatcacggaagacaacatcctgaattatgtacagacggtggagatcgaccgaaagatcgtaccggacacggcaataaagaatatggatgaaatcacaggcagaatagcggtacaccggattgaaaaaggcagtgttgtgacccggggaatgctggaaagtgaagaacagatcactggagagatggaagaagctgtaattgccggatttcgtgcggaagatctgtatcaggcagtgggaggagtcctgcgagcgggggacaggattcatatttattgtattgataaagaagaaacagccaaagaaaagccggtctggaagaatttgttcgtgcagcaggttttcgaccaaaacggaaatgcgatagacagtggagatacaacgactcctgcgcagaggatcaatgtttacatggacaacggtaaagtagatgatttttacagaaatctggcaaaaggatcgctcagagtcgttaaggtctgcgattgacagtgccccgggatacaccaggaaggagaagcggcatgacggagaaaatacgctgtgcattgtacagcatcatgggaattgcactgggaattgtgctgttgcttccgggcgggcatgtacaggcctccgaaaaaaagacgatttacaacagcagttatgtatcattcagcccggacggggaagcatggacaacctgcgctggggaccggaactataaatggtatgacgaaaacgaaacaacgacagtgtataccggaatcaaatcttccctggaaacgttacgggaaggagagcattattacaaatccagccgaagtggggaagtacccataggggcgtggaaggtcacctggcgcagggcacaatgcattcacaatgcatatgggaagaaacccggatggcatggtatttcgtttggcatgaaaaaatgtcataggtattattattccggctggaagccgttgtgtgcggattgcggagaaccgatagaatggtggaatatttatatgagcagggaagcggcggagacgatacagtatatggatctgggcagcgaagaaaaccctgtgacctattattatttgtgtccgttttgtagtaatctggaacagggagttacattttcgccacaccgatgtaagacaatctcaaacaatcagtataggattatctatgatgcaaatgctgagtcctgccatggctttatggaagaaagctatcatatgtatgataatgctgtactttatgagggaaaagaagtaacgccggtcacacatcttgtggtaaataattattcccggatcggatatgtgttcaccggatggaataccaggccggacggaagcggtatctcttatggggatcatgcagaaatatacaatctgtctatggctgattacaaagacaggaccacatggacggaggaagacaacggcacggtgattctctacgcacaatggcgtccctgtaaaagtactttgaagatagatgcagcaggaggaagctataacggagaaagtgttttttcagttacaggggagtatcaaaaaaaatatgcattgcaggaagcacatatagaaccaccggaaggctgtcttataaagtttgagaccaacggaggtacgccggtggcaccggtcagggggactaatcatttcgaagaatggatgaggatcctgccgttccggggacagatagacggggggagttatatatttcccgcagcagacggacatacggatacggtaaaagcagtatatcagccggatccgatcacattgccgttcacatccagagagggctggtcgttcggcggatggtattatgatacaagttttacgcagccggcgggcgctccgggggacaggatcatcccctccgcctcactgacattgtatgctcattgggtgacattgcggctacaatcgacggacaattacagagccaacaagggaaaaggagccgtagatctgacatggtcgcaggcggatcaaaaagacaaatcgtatcttctgtttcagaaacgggagaatggtgcctggatcagagtgaatacgacagacgatatcagtaatgtagcggaggtgaacaaaaaggaggaatatacaggaaaagaaaaaacatttcttattccgtatacaggtctctatacgataacggcaaaaggggcccagggacaaaattatgagtcaaacagtggaggatacggagggagtgttacgggtacattctggctgcaacagggagagaagcttacctattttgtgggcggtcagaatggcgtgaacggaggtggcagcgccacagattacggaaacggaggcgggaagacaagcgttgtgtcggaccgcaaagggattctgctgatcgccgggggaggcggtggtgcatctcctgcgggaaacggcggtgccggaggaagtatggcgggagtgacagaaaacagtgacggacaggatggaatggccggtggcggtgccggatacctgggaggaagtgccggggagaaaatcgtccatcatcatacgaacggatgctatcgggatgcttcttatacgccggcttttggaaattggcagcattttgtgtatgctaacgcttcacacagcaatacatataccgccaccagtgtcggagggcatacgaaggatgatgacaacacttaccatgttatcagagcaggctgggcccgacctcattgggccgcagatggatggaataccagcggatatcaggggattgataccagaggaaataccaaattaaatgtatctgtatatgctgacagttgggggaaggggtgcagattttcactgaacagatcagaatattgtattttgaatcaggcgggaagaatcattctatccggaaccttccgggatgcagtgtatgctttgagtgaaacaccaagctctacgtggcagaatgaggatggatcctggggtggagctccgggtacaagtaaattttcaggaacatttcactttaacttgccggagggaactacaaaagtatatttgcactttaagttttatcacgattgcagcaatgcctggttttcatcatctcttaccggattgaatttcaccggcggaatgacatcgacctgtggatatacggaaggccaggtgctgtcgtctaaaccggcctatggaggaagcaactatgtgaatgaggattgtgtacaaatatttgaaagcatgagtggtaataacagaggcgacggaagtgtggagattcgatcccaaatggtaggatatcaggaaacatcacatttaaacggtattgtggcaacagattgtgcactgccggataaaataccggcagaagcgatttatgaggcaatagatgaaaaaagcgtacgtgttacctggcagatgccgaaggacaatggaacggtatattatcacaaggcagaatcatatctgaccggaagtacagtacggctttgtgaatcgaatattacacaaaacagattgaccagtgggattgcaggatattatctggttatagatgccgcaaaagatacgaatgtaacgaaagttaacggacatttcaacacagaaccgcatacaaatgtgacagctgacaaaatcacgaagtatctccatgtggcagcagtagatgttgccggaaatataggagctacaacacatttcaccatcaaagaaacagaggtgccatggaagatttataccggccagctgattccggaaggagaagacggaaatgtagctccgtcatcggaagaaaggtgctggtatgtacgcgctgacggaagaactccgatcacattaaagcatcaggcatatctgaaaggggtggcctctttgcaatatcagctgaatgagacaatttatgagacaaggacacaagaagggacaatagcccggaatattatccgtacgccttcgtcagatacagctgtggaaactatccgcacagatgctgaagatttaatttatgctacggaaggaaccacagtattacagcaatatccgtattcatttactgttcgctcagattcaggtaaaagtcttaccggtgtacaaaaatttacgatcacaggggaccggtccggacagaggatacaagtaattcccattgcagaggccgattccgttgcaggtaaaatctattcgcttcatgaactggatgaaaaaaataagattactctgatcgcggatggagagccgccggtgatatatggaatggaaatgctggagaacagggaactgatcgacaggcgggacggaaaggtgaatgtaacaataacggctagtgatgctgtcagtggagtgaaggagttttatgtgaatatacaaaatacagacaatactgtaagtaaaacatatcatccggatgcagatggcagtatacggatggaaatcacagaagatgatgctctgttcagcggagactttactgtgtttgcatatgcatgcgatcaggtgggaaatgaaacggaaatatccgaaggaacgacggaattcggattggaggctgacattatcagaatacgggagccacaggatgcagccttccgttgcggtgagagcggtatcttgacttttacggtctggggatatgcggatcgtgtggaagtgatcttccccaaagaaatgacagatctgtgcccggagctgaatcgtatttttgactatagggacaagccgggatatcgtattacggaacagttacagtttatggtgcctttgtatactcctgaaaacgagaattttgaggttacggtgaaggcatataagggagataaaaagcttgaggaccatcccggaatcagcgtgatcggggtaaaaggcagtgtattggaggacctgcggaccagactgaggtgatgacatggggaaattagtacttgcgacgatcaccatttcaggcagtgcgaagtggctgctgaaagttggcgggaataaagaaaaatggtacggaagtgacaggattttcatgtatgtcatgactgtgttcggtgcgatgaccgtaaactattcggagcaatgcacagaatatgggtgggtcgtgagtaatctcagactgctggccggctgtctgctggccggaggccttctgagtgcggcatacatggatcgtagaaattgctgggtgtataattatgtatggtggtggtgcctcccgtgggccggaatcctgggactgacggcgggtggaggatttcatggtatcgtcgctgtactggtgtttgtcatgctgcagcagcttctcttcagcagaatgtacggaaaagcggattgtcatgcattttcggtctgtgctttggcggagtgcggaaatgcagtcggaatggtggggtttctactgcagatgttcctctcagttgtgttattgacaatcgtacagctgtttcggggaaatgtcactccaagaggcagactgcgcgaaccacagccgtttattccttatattatcacagcatttttttccgtaacgttcctcgaaagtgtttttagaacaacgtatatttatgcataaacagttgcgtatctttttaaaaagtgctatagtaactaaagtttagaaaccatagtggtttccaaaacacagacaggaggaaaatattatgaaaaaagcaatcgcaatgttacttgcaactgtaatgtgcacagcaatgctgacaggctgtggttctgattccgcaaccaatgagagttctcaggctgctgaaagcagtgtggcagagactgctgtcgcaacaacggaagctgctgcaacaacggaagcagccgataagacagagggcggcgtactggtattcggtacaaatgctgagttccctccctttgagtatgttggtgatgacggagaacccgatggatttgatgtcgctctgatcaaggcagtaggtgagaagctgggcatggaagttcaggtagaaaacatggagttcgactctctggtaagctctatcggcaacagaattgacggtgctatcgctggtatgaccgtaactgacgaacgtaaggaacaggtggatttctctgatccttattacgaggctgtacagttcgtgatcgtatctgcagattccgatattgcaaccgttgatgacctgaagaacaagaccatcggcagccagcttggtaccaccggaatgttcctttccgaggacattgaaggagctactgcacagacctataatagagccatcgatgctgtcaacgatctggtaaatggcagagtagatgctgttattatcgacaaaaaccctgcagaagtattcaacaccaagttcgaaggcaaagttaagatcatcgatggtgcagagtttggattcgagaccgaggaatatgcgatcgcacttcccaagggaagcgaactggtagatcagatcaatcaggcactggaagaccttaaggcagatggtacctttgatgctctggtagctcagtacatcggagagtaatttttatacaaaatatacacgaaaaaagaagagaatggcttgtgccattctcttctttttgctatattaaggtaggtaatggaaatttatacatttacaagaaaggcataggaaataacatgcaaaatatctggcaacatatttatgcagccttcattgaagctgacagatggaagctttatctgaaaggcctgggagtaaccttagaggtttctttttttgcggcactgcttggtatcctgattggaacgattgcagcatttttaaaattgtctacgagaaaaaacggttcgaagacgatagcatcccgtattgcgagcgcctatattgatattatccgcggtacgcctaccacggtccaattgctgatcatgtggtccggtattctggctacctgcaaaaacagtgttctgatcgccagcctgactttcggtattaattccggagcatacgtggcagagatcgtcagagcgggaattctggcggtggataaaggacagatggaagcgggaagatctctgggattgaataaattccagaccatgcgttatatcattattcctcaggcattcaagagcattctgcctccgctgggcaacgaatttatcgtgttgatcaaggagacatctattgtgggttatgtaggaatgagtgatcttacccgtgtggccaatcagatgacttccaagctgttcgatgtatttacaccgctgcttggtattgcattcatctattttgtattgaccaaggtattgtccatcctgcttgcaaaactggaaaggagactgcgtaagagtgataatcgttaaagatctgcataaaagctttgaagataatcaggtgttaaaaggggtaagttatcatattcatcccggtgaaaaaatcgtagtagtgggtccctccggatccggcaaaagtacatttttacgttgcctgaacctgctggagagacctaccagcggtgaaatatggttcgacggacagaatatcacagaccccaagattgacattaataaagtccgtcagcatatgggaatggtgttccagcattttaatctgttcaataaccttacgatcatgaataatattacgctggcgcctgtgaagttaaaactgatgggcgaagaagaagcaaaggaaaatgctctgaaactgttaaaacgtgtaggactggaggaaaaagcagatgcttatcccgcatccctcagcggcggacagaaacagagaatcgccattgtaagatctcttgccatgaatccaagagtaatgctattcgatgaaccgacttccgcgctggatccggagatggtcggagaagttctggaagttatgaaggaactggcggagagcggtatgacaatggtggtcgtaacgcacgaaatgggatttgccagagaagtaggtacaaaagtgcttttcatggatggcggaaatattgtggaggagaatactcctcaggaatttttcaccaatccgcagagtcccagattacaggaatttttatctaaggtattataagatgttataaaggaacggtgaatgcagatggtcacaatttctttatgcatgatcgtgaaaaatgaagaacggatcctgacaagatgtctggacagcgtaaaagatctggtggatgagatcgtcatcgtggatacaggctctgcggatgcgaccagacggatcgcacagacatacacggatcgggtttatgattttacatggatcgatgatttcagtgcagcgaggaattttgctttttccaaggcaacttgtgagtatatttattccgcagatgcggatgaggttctctcggaagagaaccgggtaaggtttcaggcgttaaaagaaacgcttcttcccgaaattgaaattgtacagatgaaatacggcaaccagctgcataacggtacggtttataattttgatgaagaataccggccgaagctgtttaagagactgagaaattttatatgggaagaaccaattcatgaaatggtccggctggaaccggttgtctatgacagtgatattgtgatcacccatatgccggagcagaatcatgcaggcagggatattgccaatttccgtaaacagatcgcagcaggaagacagctttccagaaggttgtatggaatgtatgcaagagaattgttcctgggtggagcggacagggatttcctgaaggcagagaactattttcagatgcaggtggcttctccggacagaagcggagatgagatcacggaaggctgttgtgtggcagcaaaagcggcaagactgcggggagatgcggtgagctttttcaaatacacctcgaaggtgatcgccggagacggctgctcggagatctgctgcgaattggggcatttctacgagacatccggggacttggaggaagcggtcatctggtactacaatgcggtatatgaaacgcagccggtactggcactaaggacttccggggcagaaccgctggagggactggtccgatgctatgatcgcctgggactttcggaacaggcagcaagctatcgggaagagttgaatagcaggaatgaggagtgaaattatgaaatgggaagaaaatgtacgtaaggtagttccttatgtggcaggggaacagccgaaccggcccaatatgattaaattaaatacaaatgaatgcccgtatcctcccgcacccggggtgcgaaaagcggcggaaaatatggagagtgcagcactcagattatatccggattcaaatgcccagccactggtggatgccctggcagcatattatgatgtaaaaccggagcaggtattcgtgggagtcggttcggacgatgtattgtctatggcctttatgactttttttaacagtggtaagccgattctgttcccggatgtcacctattccttttatgatgtatgggcagatctgtaccggatcccatatcgcacctgtgcactggatgaaaactggcatatccatccggaagattataaacagcctaacggcggtgtcatcttcccgaatcccaacgctcctaccggcgtggaggaatcgctggaaacagttgaggagatcctgcaggcaaatccggatgtggtagtgatcgtggacgaggcttatgtggatttcggtggcaaaagtgcactgccgttacttaaaaaatatgaaaatctgttggtcgttcagacgttttccaagtccagagctatggcgggaatgcgtatcggtttctgcatcggcaatgagaaactgatccactatctgaatgacgtaaagttttcctttaactcctacaccatgaacctgccttcgcaggtaatgggcgtggaagcagtgaaggatgatacttattttaaagcaaccacggctaaaattatagccacgagagagcgggtgaaaaaggaactgacgagcctgggatttactttcccggattccaaggcaaactttatctttgcttctcataaggaagttccggcagaagaattgttccgggcacttcgagaggcggatatttatgtcagacactggaacaaaccccgcatttccaactccctgcgtatcacggtcggtacggatgaggaaatggaccgtctgatcgcttttctgaaagaatatctggaaaagagggtataattaaaaaaataaaagaattggagtaaacacatgttaaaaaagtatttgatcatttttctggtatctatggttccgttgattgaacttcgaggcgctgttcccattgcggtgggaatgaatctgccgctgcttcccagctatattgtatgcatcctgggcaatatgcttcctgtgccgtttattttcttttttgcgagaaaagtattggagtggggtgcagacaagcctgtcatcggtaagttctttactttttgtctggaaaaaggccacaagggtggacagaagctgcaggagaaggccggaagaggtctgttcgtggcactgcttctgtttgtgggaattccgcttcccggaaccggtgcatggaccggaactctggcagccagtctgttagacatggactttaagtccagcgtaatagctgtaatgtgtggtgttgttctggcaggtgtgatcatgggactgctcagcatgggagtgttcggggcacttgggactattttttaagaaaccggagatactgtagctatggaaaacacagaagagatttataccgattttgcaagagtatatgatgaactcatggacaataccccttatgaaatgtggtgcgaacgtctgaaccgactgatcgcagcctatggagtgtcgaagccggagcgggatgcggagggaattctggattccgagcgtaatctggtggtggatctgggctgcggcacaggtacgttgacggaaatgctgtatcaaaaaggctatgactgcatcggcgtggataattctgaagaaatgctgaatattgccatggataaaaaagcggagagtggttcggagatcctttatctgcatcaggatatgcgggagctggatctgtattctaccgtgggtacggtgatcagcgtctgtgattccgtcaattatattttggaagaagaggaacttttgcaggtattccggctggtgaacaattatctctatcccggcggggtatttatctttgattttaataccgtctacaaataccgggaagtcatcggtaataccactattgcggagaacagagaggattgcagttttatctgggagaattattacgatcccgaagaggagatcaatgagtatgatctcaccattttcgtgcaggaagaggaagatattttccgcagattcactgagacacatttgcaacgtggatatactgcggaacagatgagggcgctgttggaacaggccggacttcatgtcctcgaaatcatggattccgataccggagaggcagcaacggcgaccagcgagagagtatatattgtagcaaaagagcagcaaaaggagctgccgacagaaaggtacgtgaaataaatgaaagattatatggtacgtgcaactgcagcaaatgcacagatccgggcattcgcctgcactacaagagagacagtgaagactgcacgggcggcacataatacaagccccgtggttacggcagcgttgggaagacttctcagtgccggggttatgatgggcagtatgctgaagggagacgatgaactgatcaccctgcagatcaaaggagacggtcctatcggcggactgacggtgactgcggataggaacggacatgtgaaggggtatgccaatgtgccggatgtgatcctgcctgccaatgcccagggcaaactggatgtgggcggtgcagtgggtgccggtgtcttgagcgtgatccgcgacatgggcctgaaagacccctatgtgggacagacggatcttcagaccggtgagatcgcagaggatctgacttattattttgcagtatctgagcaggttccctctgttgtgggactgggagtgctgatgaacagagataataccgtaagacaggccggcggttttattgtgcagctgatgccttttgcagaggaggagacgatcagtaagctggaggagaacatcaaaaatcttgcttccgtcaccacaatgctggatgccggcaagacaccggaggaaatgctgggtgttctgctggagggaatggatctggaagttacggatacactgccggtgggattttcctgtaattgcagcaaagaccgtgtgagaaaagctctgatcagtattggaagagaagaattgcagtctatgatcgatgatggcaaagagatagaagtgaattgccatttttgtaataaaaactataactttaccgtggatgaattaaaggaaatgattcaggattgattcagtaaagcgaggaagcctatgaaacagggatttgtcaaagcagcatccgccacaccggcgatccgggtggcggatccggtttataatgcacaggtgatctgtgaacagatggaggaagcggtctctcatggagcaacaatagtggtatttccggaactgtgtatcacggggtatacctgtggggatctgtttcttcagaacctgttgttggaagaggcaaaggaagcattgcttcggatcacggcgcagactgcaaaaatggatgccgtgatactggtgggacttccgatagagaaagacggccggttatacaatgttgcggcggtattacatcacggagatatcatgggaatgatcccgaagaaaaacattccttcctacggagaattttatgagggaagacatttcactcccggggaggagaccgtaacggaatatcaattatccgggcgggaaattccctttggaataaaccttctgtttcgctgcacagaacttccggaactggtgatcggctgtgaaatctgcgaggatctgtgggtggcggaaccaccttccacatctcatgcacttgcgggagccacggtgatcgcaaacctctctgcatccaatgagactgtctccaaagatgactatcgcatgttattggtaaaatctgccagcgcaagactcctgtgcggatatatctatacttccgcaggagagggagaatccacccaggatctggtattcggaggacatgacctgatcgcggagaatggtacgctgcttgtacagtcatcccgattctcttccggaattgtatatgcggatctggatgtgcttcgaattgtgaatgaacgcagaagaatgggaacgttcggacagaagccggagaaagagtaccgcgtggtccctttttccgtaaagcttgcacagacccggttggatcgtaaatttgccgcacatccttttgtgccggaggatcctgcacttcgaaacagacggtgcgaggatattttgtccattcaggcatacggactgaagaaacggtatgcgcataccggattaaaaacggcggtcctcggaatctccggaggattggattccacattggcactgctggtgacggtacgtacctttgacctgctgcaactttccagaaaaggaattatagcagtgaccatgccctgcttcggaacaaccgaccggacgtatgaaaatgcctgcctgttggcgaagactctgggtgtaaccctgcgggaagtggatatcagagaatctgtgaccagacattttgccgatatcgggcaggatatggaatgccatgatgttacctatgaaaacgggcaggccagggaacgcacgcaggtgctgatggacatcgcaaacaaggaaaatgcactggtcattggtacaggggatatgtcggaactggcattgggctgggccacctacaacggagatcatatgtccatgtatggcgtcaatgccggtgtacccaagacactggtgcggcatctggtggactattatgcggatacctgtgaaaacagggaacttacagcagtattgaaggatgtgctggataccccggtcagtccggagctgctcccgccggtggaaggaaacattgcacagaagacggaagatctggtagggccttacgaactgcatgatttcttcttattttatatgcttcgctgcggatatgctcctgataagatctacaggattgcaaaagatacattttcgggaagatacagtgacgaaatcattaaaaaatggttgataaatttctaccgaagattctttgcccagcaatttaaacggtcctgtctgccggacggccccaaggtgggaagcgtggcattgtcgcccagaggagacctgcggatgccgtctgacgcctgcgcccggatctggctggagcaactggagaaaatataaaaatattgttaaaatttcgtcgaaattcttaattttctgtttttaacttgaaatggaaaacgcaaaatcgtatattatagctgtaccaattatggaggatatgcggaggaacaaatatgactaaggcggagattttgaagaaagaaatattaagacagtatcgcagtgtcagacagtttgcgatggagatgaatattccttacagtacactggtaacagctcttgagcgcggtattgaagggatggcgtacggaacagtgatcaaaatgtgcgacaagctgagcctgaatcctgtggatttttcctctctggagagagatgcatctctgggggcacagcttttggaaaatcgtgttatgcagaattatgtgaagctgaatcagacgggacgtgataagatcctggaactgatggacgattttgtacagatcgataagtataaggccaaggcgaaaaaaacaaaataaagacaaacaaaaacagctactgctttgatctgtgaaagaatcaacagtagctgttaaacatcatgccgctgtaagcactggtggtgtagggactgataaaattgtgaccgggatttttgtaggccactatttttttgtctacataatccatagggttcagggagacctgatcgctcttacgcaacagggaactgctgaaatccttcaatacgctgaaagatgatagatcatttcccgctgatgccgctgcctgctgtaatttttcatcgttgacagagagaataccgtcatcctgcaggtgcattcccatattttccagagaagtgccgtaatgggaagcaattgatgaaaattcacggaccagctgtctgcttctggactgggtctccagataagaagctgcagaccggatgaagctattgtagctgccgatcagctggttgatattgtcagtaatggattcggtgtctgtcttcagaccgatatgcaccggcttatcttcggaacttacggctttgatctgtacatcgaacagcttgccaaccgtgaaatggttggaggaagaagaacgctcttcaccattgatcaggaagcatgcattgccggcaggatggttgatataattcaaccccatattgcctacgacacctgaggctttgctggtgtgatcgtcacttacacggaaatgataagccttgttggccggtacaccggtagcatcagaggtcagccggagcgcgtaacgggaatcggattctgcaacatttgcctggataccgatatccgcattgttgatcagccgtgagagacgatccatgatctggcggttcgtatctccttcgttgatattgaactggaattcatagttcatatcgttgatggaaatatcaaaggagtaggtcgcaggagaaagcgtggtagccagatccgggagaaaatatcccaggttctcctgcggggtggccagttcttttacctcaagatcaaattccggagaagtacttgtcaaagtgtcggaaccgatgtaggctgcttctgctacttcggtgtctgtggaataagcactttttttacggaacatgctgtcctgttccagaccgccgagctgtgcgatcgcgttatgaagctcacgggcattttccttcagagatacggcatagtgctgtgtgtccttgttggtggtcggaagataccagggagcatctttgttcagttttacaatggaattatatacgctgcggagttcgctttttttatgtgtgtcatacttcgtcagctgtctgggagaatatgctgccagatagttgttgtataccgtgttgagaacagcacccatagatatctcctttctcctccgtgatcaaggatattttataaaaaaatacagtcatccacttttatgaggctattatagcatatataataagaagaaacaagaaaaacagctggattttcgggaaaacagttgacgaaagccgaggattatgttatagtatccaagcgagatgagatttaggtcttttttttatgcttaaatttagagatcagaaaacacgtggaggtagaaaaatgcgtacaaaaattactttagcatgtaccgagtgcaagcagcgtaactacaatactaccaaggataagaagactcatcctgatagaatggaaaccaagaagtattgtagattctgcaaaacacatacattgcacaaagaaaccaaataatcagccgttctagcatgggaggtcgaaatgggagattccgcagaaaaacagaagcgccccagtttcttcaaaggcgcaaaagctgaatttaagaaaatttcatggccggacagacaatccacattgaagcaatccgtagcggttgttgcaatttcagttgtagttggtgtgattattgcggtgctggattattttattcagtacggcgtaaacttcttaacatcattatagagcgagggtgattgtatggcagaggcaaaatggtatgtagtccatacctattcaggatatgagaacaaggtcaaagccaatatcgagaagaccatagagaacaacaagaatctggcagaacagattcttgaagtaagagtccctatgcaggatgtggtggaactgaaggacggagcccgcaagacggtatccaagaagatgttccccggatacgtacttcttaatatggaaatgaacgatgatacctggtatgtcgttcgtaatacccgtggcgtgaccggattcgtaggtcccggaagtaaacctgtacctcttacagaagctgagatgaagcctttgggcattaagaccgaaaatgtatcgatcgactttggcgagggcgacagcattgctgttgtggccggagtatggaaagatactgtcggcgtggtgcagaaactggactatggcaaacagacagctacgatcaatgtagaactgtttggaagagagacccctgtggaaatcagctttgcagaggtcagaaagctttaagaaagcttacaaagatattttcttccggagatatccggaataaaatataaactctcggatccgcaagggcctgagagaggcagcacaaaaggaacggcaacgttccagtgggagcaggaggcaagcaacaaggcagcctgcgccgaattaccacattataggaggtgccacaatggcaaagaaagtagaaggatatatcaagttacagatccctgccggcaaagcaacaccggctccccctgttggtcctgcacttggacagcacggggtgaacatcgttgaatttacaaagcagttcaacgcaagaacagcagacaagggagatcttatcattcccgtagttattactgtatatgcagacagaagctttagtttcgttacaaagactccccctgcagcagtactgttaaagaaagcctgcaacatcaagtccggttccggcgttcccaacaagaccaaggtagctaccatttccaaggctaagcttcaggagatcgctgagatgaagatgccggatctgaatgcagcaagcctggaagcagctatgagcatgatcgctggtactgcacgcagcatgggtattgttgttgaggagtaacttataaatatttgggaggcaatcgacaatgagattgccgctggaacctaggaggtaaaataatgaaacatggtaagaaatataccgaagctgccaagctggtagatcgcgctacattctatgagcctaacgatgctatcgctctggttaagaaaactgcaactgctaaattcgatgagaccatcgaggttcacatcagaaccggttgtgacggacgtcacgctgagcagcagatccgtggcgcagttgtactgcctaacggaaccggtaagactgtaaaagttctggtattcgcaaaaggcgataagatcaacgaggctgaagcagcaggcgctgattatgttggcggcgaggagttgatcccgaagatccagaacgaaggatggctggacttcgacgttgtagtagcaacccctgatatgatgggtgttgtaggtcgtctgggtaaggttctcggacctaagggcttaatgcctaaccctaaggctggtaccgtaaccatggatgtaaccaaggcagttaacgatatcaaagccggtaagatcgagtacagacttgacaagaccaacatcgtgcatgttcccgttggtaaggcttctttcactgaggaagctctgcaggagaacttcaacgcacttatggacgctatcgtaaaggctaagcccagcgcattaaagggtcagtatctgagaagcatcactctgaccagcaccatgggccccggcgttaaggttagcgtagcaaagttctaatctgatctctaatctaattagataacgaatgctaaagagccgcttcactgcttacagtgaggcggtttttgcaaaaaacattttgcaaaaaaatactaaataatccttgacaagcacagtctcctatgctattctatctgaggttgtaaaaccatgccgaagacagcaggtgcaagggagaccgagcgtaagtcctgccgaggagataagtatgatgatatcatctctctgtgtcttcacagagagttttttttactttataggattttatcctataaagcaaaacgctccgcgaggatcgcactgcggcgaagtggaatatatcgctaaagcgattcgccgcaggcgtagaatcctgcgagcaggattctatttatattcttcttatcggcacaaaatctataaggaggtaaagaaatggcaaaagttgaattaaaacagcctgtagtagaagagatttctgctggtatcaaagatgcccagtctgtagttctggtagactaccgtggacttactgttgagcaggatacccagttacgtaagagcttacgtgaggcaggagttagctacaaggtttacaagaacaccatgatgaacttcgcgttcaagggtacacagttcgaaggtctgtccgagtatctggaaggacccagcgcaatggcttactctaccgaggatgcaaccgctcctgcaagagtactggctcagttcgctaagactgctgataagcttgagatcaaggccggtgtggtagaaggtactgtttatgatgctaagggtatggctgcaatcgctaacatcccttccagagacgtactcatctccaaactgcttggcagcttacagagtcctatcaccaattttgcacgtgttatgaatcagctggctgaaaaaggcggcgcagcagcttgcgaagcagcagcacccgcagaagaagcacccgcagctgaataataattgcagctaattgacaatcaatcaaaatatttcaaatggaggaaattaaaatggctaaattaacagcacaggaattaatcgatgctatcaaagagttatctgtattagagttaaatgatctcgtaaaggcttgcgaggaggagttcggcgtatctgcagcagctggcgttgttgtagcagcagctggccctgctgaagcagcagaagagaagactgagttcgacgtagagctgaccgaggttggcgctgagaaggttaaggttatcaaggttgttcgtgaagtaaccggtctgggcctgaaggaagctaaggacgtagttgacggagctcctaaggttgttaaggaaggcgcttctaaggaagaggctgaggacatcaagaagaagcttgaggaagttggcgcaaaggttactctgaagtaatttttaaccagtatatgacggaccatgtgccggcacctgccggtgcatggttctttcttatttattattttctaaattattcattttttcaaaaatattcaaaaaaattccttgacgctattttatcattgtgctattatggatagtgcactattgtgcggtgctatgcttatttgtcatgcataaaatttgacgtttatatatactgcattgttgccgacgcaaaataggctttaaatctgaaagaacggggtgaaatgtcaatggaaaagaacagaatacgtccgattgccggtaccaaggttatgcgtatgagttattcaagacaaaaagaggttttagagatgcccaacctgatcgaggtccagaaggactcttatcagtggtttttagacgaaggcttgaaggaagtctttgacgacatctctccgatcgctgactacagcggtgccttaagtctggaatttgtggattttgaactctgcaaagacgacgtgaagtattctatcgaagagtgtaaagagagagatgctacattcgcagcacctcttaaggttaaggttcgcctttataacaaggagaaggaagagatcagtgagcatgagattttcatgggcgatcttccgctgatgactgagaccggtacttttgtgatcaacggcgcggaacgtgttatcgtcagccagttggttcgttctcccggcatctactacggaatcggacatgataagatcggtaagaagctgttcacctgtaccgtgatcccgaaccgtggagcatggctggagtacgagacggattccaacgatgtcttctatgtacgcgtggacagaacccgtaaggttcccatcactgtattgatccgtgcactgggcatcggtaccaatgacgagatccgcgaactcttcggtgacgaacctaagatcgaggcaagctttaccaaggacactgctgagaattatcaggagggtctgttagagttatataaaaagatccgtcccggtgagcctttaagtgttgaaagtgcagaaagcctgatcaacgctatgttcttcgaccccagaagatatgatttagccaaagtcggcagatataaatttaataagaagttagctctgaagaatcgtatccgtcatcagatcctggctgcagatgtggtagatccttccaccggtgaagtgatcgcatccgcaggagacaaggtgaccgcagagctggcagataccattcagaacagcgccgttcctttcgtatatattcagacagaggagaagaacgtaaaggtactgtcgaacctgatggtagatctgactcattatgtagattgcaatcccagagatttcggtattcatgagctggtatattatccggttctggcacagatcctggaagagttcggcgatgatcccgagaagctggcagaagcgatcaagaagaatgtacatgaactggtacccaagcatattaccaaggaagatattctggcttccattaactataacatgcatctggagtatggtctgggcaatgatgacgatatcgatcatctgggcaacagacgtatccgtgcggtaggtgaactgctgcagaaccagtatcgtatcggtctgtccagaatggagagagtggtacgcgagcgtatgaccacacacgatgctgaggagatctctccccagtctctgatcaatatcaaacccgtaaccgcagcagtgaaggaattcttcggatcttcccagctgtctcagtttatggatcagaataaccctttgggtgagctgacccacaagagacgtctgtctgcactgggccccggcggtctgtccagagatcgtgccggattcgaagttcgagatgtacattattcccattacggaagaatgtgccctatcgagactcccgaaggtcctaacatcggtctgatcaactctcttgcaagttatgcaagaattaatgaatatggtttcgtagaggctccttatcgtaagatcgacaagtccgatcccaagaacccccgcgttaccgacgaagtagtctatatgactgcggacgaagaagataattaccatgtagcacaggcgaacgaagcactggatgcagaaggacattttgtgagaaaatccgtctccggacgttatctggatgagacacaggaatatcccagggaaatgtttgattacatggatgtatccccgagaatggtattctctgtggctactgcactgattcctttcctgcagaacgacgatgcgaaccgtgcactgatgggatccaacatgcagcgtcaggccgtgcctcttctgagcaccgaagcacctgtagtaggtaccggtatggaagaaaaggcagcagtagactccggtgtctgcgtggtagccaagaaagcgggaactatcagttatgtatcttccaagactatccgcattgattatgatgacggtgagaaggaagagatccatctgaccaaattctcccgtagtaaccagtccaactgctacaatcagaagcctatcgtattcaagggcgatcatgtggcacagggacaggtcattgcagacggaccttccacttccgaaggtgagctggcactgggtaagaaccctctgatcggtttcatgacctgggaaggttacaactacgaggatgcagttctgttaagtgagagactggtacgtgatgatgtgtatacttccgttcatattgaggagtatgaggcagaagcacgtgacaccaagctgggaccggaagagatcacccgtgatgtacccggtgtcggtgatgatgcactgaaggatctggatgacagaggtatcattcgtatcggtgcagaggttcgtgccggtgatatcctggtgggtaaagttactcctaagggggagaccgaactgactgcggaagagagattgctgcgtgccatcttcggtgagaaggcaagagaagtaagagatacctccttaaaggtacctcatggtgaatatggtattgtagtggatgccaaggtatttacccgtgagaacagcgatgagctggcacccggagtaaaccaggcagtccgcatttacattgcgcagaagagaaaaatctctgttggtgataagatggcaggtcgtcatggtaacaagggtgtcgtttcccgcgtgcttcctgtagaagatatgccttatctgcccaacggacgtcctctggacatcgtgctgaatcctctgggcgtgccttcccgtatgaatatcggacaggtcctggagatccacctttccctggctgccaaggcactgggcttcaatgtggcaacccctgtcttcgatggtgcaaacgagaaagatattatggatacgttggatcttgccaacgattatgtaaatcttcctttcgacgatgcagagagtgcagagtggaaggaaaagggtcaggagactactgcagacggtaagccctggtccggagagacctttaccagcaagcatggtgaggagcttctccctgaagttatgcagtatctgtccgagaacagagaccacagaggtgtatggaagggtgttcccatttccagagacggtaaggtacgtctgcgtgacggtagaaccggtgaatacttcgatggtcccgtaaccatcggacacatgcattacctgaaactgcatcatctggtagacgataagatccacgcacgttctaccggaccgtactccctggtaacacagcagcctctgggtggtaaagctcagttcggtggccagcgtttcggagagatggaagtatgggctctggaggcgtatggtgcatcctacaccctgcaggagatcctgacagtgaagtccgatgatgtggttggtcgtgttaagacctacgaagcaatcattaagggagacaatatccctgagcccggtattcccgagtccttcaaggttctgctgaaagagctgcaggcactgggtctggatgtcagagtgctgcgtgaggatcagaccgaggtcgagatcatggagaccgtcgattacggtgataccgattaccgttatgagatggagggtgatcgtaagtatgatgacgattacgacaagggttcccttggcgagatgggctatcagtcacaggagtttgacgacaacggcgaactggtgaattccgaagacgactatgtggaagacgattacaccgatgatagctttgacggcagtgatgatgaattttaatgctttgtatagaagggagtgccattaatgtcagaaacaaaaaatgaaacaacctatcagcctatgacatttgatgccatcaagatcggattagcttccccggagaaaatccgggagtggtcccatggcgaggtattaaagccggagacaattaactatagaacactgaaacccgagagagacggtctgttctgtgagagaatcttcggacccagcaaagactgggaatgtcattgcggtaaatataagaagatcagatataagggcgttgtctgcgacagatgtggtgtagaagttaccaaagccagcgtacgtagagagcgtatgggacatatcgagcttgctgccccggtatcccatatctggtacttcaaaggtatccccagccgtatgggcctgatcctggatctgtctcccagaatcctggagaaggttctgtacttcgcttcctatattgttctggatccgggaaccaccaaccttgagtacaaggcagtgttgtctgagaaggaatatcaggatgcaagagagacctggggcaacaagttccgtgtaggcatgggtgcggaagctatcaaagagctgctgcaggccattgacctggagaaggatgcagcagaactgaagaccggactgaaggaatcctccggtcagaagcgtgcccgcatcattaagagactggaagttgtggaagctttccgtgagtccggaaataagcccgaatggatgatcatggatgttattccagttatccctcccgatcttcgtcctatggtacagctggacggtggacgttttgcaacctccgacctgaatgatctgtacagaaggatcatcaaccgtaataaccgtctgaagagactgttagagcttggtgctcccgatattatcgtacgtaacgagaagagaatgctgcaggaagcagtagatgctctgatcgataacggcagacgcggacgtcccgttaccggccccggtaacagagcactgaagtctctgtccgatatgttaaagggtaagaccggtcgtttccgtcagaacctgttaggtaaacgtgtagactattccggacgttccgttatcgtcgtaggaccggaactgaaaatttatcagtgtggtctgcccaaggaaatggcaattgaactgttcaagccttttgtaatgaaagagctggtagccaagggaatcagccagaatatcaaaaatgccaagaagctggtagagagactggatacgcaggtatgggatgtgctggaagaggtgatcaaggaacatcctgttatgctgaaccgtgcaccgacactgcacagacttggtattcaggcatttgagccgatcctggtagaaggtaaggcaatcaaactgcatcccctggtatgtaccgcattcaacgcggatttcgacggagaccagatggctgtacatcttcctctgtcccaggaggcacaggcagagtgtcgtttcctgctgctgtctcccaataacttactgaagccttccgatggtggtcctgtagctgttccttcccaggatatggtactcggtatctactatctgacccaggagagacccggttctattggtgaaggtaagtatttcaagagcgtaaacgaagcaattctggcatatgagaaccaggcgctgacactgcattcccgcattcatgtccgcatgagcaaggtaaatgcagcaggtgagacgatcaccggcacggtagagtctacactgggacgtttcatcttcaatgagattctgcctcaggatctgggatttgtagacagaagtgatcccgagaacttcctgaagctggaagtagacttccatgtaggaaagaagcagctgaagcagatcctggagaaggtcatcaatactcacggagcatccaagaccgcagaagtactggatgacgttaaggcaatcggttataagtactctaccagagccgctatgaccgtatccatttccgatatgactgtgcctgagaagaagggcgagatgttggcagccgcacaggcaaccgtagacaagatcgcaagcaacttcagacgtggtctgatcactgaggaagagcgttatcgtgcagttgtagagacctggaacgagaccgataaagagctgaccgatgtactgctgtccggtctggataaatacaataacatcttcatgatggcagactccggtgcgcgtggttccagtcagcagatcaaacagctggcaggtatgcgtggactgatggcggataccacaggtagaaccatcgagctgcccatcaaatcaaacttccgtgaaggtctggatgtactggaatacttcatgtccgcgcatggtgcacgtaaaggtatgtcagataccgcactgcgtaccgcagactccggttatctgaccagacgaatggttgatgtatctcaggagctttctatccgtgaagtagactgctgcgagggtcaggcagagatccccggtatggtagtcaaggcattcatggatggtaaagagaccattgaaggcctgaaagacagaatcacaggcagatattcctgtgaggatatttatgataaagacggtaacatgatcgttaaacacaaccacatgatcacccccagccgtgcagctaagatcctcagcgtaggtgtaaatgcacagggtgagcctattgaggaagtgaagatccgtacgatcctgacctgccgttctcacgttggtatctgtgcaaaatgttacggtgccaacatggcaaccggtgaagctgtacaggtaggtgaagcagtcggtattatcgctgcacagtctatcggtgagcccggtacccagctgaccatgagaaccttccatagtggtggtgtcgcaggtgacgatatcacacagggtcttccccgtgtcgaggagctgttcgaggccagaaagccgaagggacttgcgatcatcgctgagttcggcggtaaggcggagatccgtgataccaagaagaaacgtgaagtagtaattaccaatgaagagaccggagaatccaaggcatacctgattccttacggttcccgtatcaaggtaatggatggccaggtattagaggccggtgatgaactgaccgaaggtagtgtaaaccctcacgatctgctgaagatcaagggaatccgtgccgtacaggattacatgctgcgtgaagtacagcgtgtataccgtttacagggtgtagatatcgccgataagcatatcgaagtcctggtacgtcagatgctgaagaaagttcgtatcgagaataacggagacaccgaattcctgcccggtactctggtagatgttctggatttcgaagaaatgaatgagaagctgaccgcagaaggtaaagagcctgcagaaggcaagcgtatcatccttggtattaccaaggcagcactggctaccgaatccttcctgtccgcagcatccttccaggagaccactaaggtactgacagaggctgctatcaagggtaaggttgataatctgatcggtctgaaggagaacgttatcattggtaaactgatccctgtaggaaccggtatgaagagatatcgtaataccagactgagcaccgatgatgtggaaaccattgatttcagtggcgacatgtatggtgatgatgctgaactgaatctgagtgacggaacagatccggaagctgagaatacagatgttaacaccgatgcagagactgtggaagtgggaacagatgctgataaccagtaaaaaaagaaaagatcttataaaaaagctctccggggattccccggggagcttttttaagctgaaaattactgtaagtcctctgtattcagtacctgccaggcggtgatccggtaaaaggtgtcatccgcagacagagggtataagatctcaatggtaacctgtaaggattgcagatcggaaataggtatcacatatgactttccgtgtcctacggagccgtaatacgcatcctcgctgtcggaggctttgtagacgcgacgcagcgtattgtccataccggccagagactgctctgcctgattgcaggcatcatagtaggcagtagtacgttccaaaacacgggtgctgagcctgctgtcggcattagcactgacaatagacagtacggcaaaggataccagacagaggatcacgaataccagcaggatcgaagcggagccgatattcataccgaattgttttttctttgaagagttactcatggtcccccctcctctctgcagtgtgatgcatgacagaaattgtataaataggcatctccggtgcagacaagtcatacacggtgatctgggcttccatgataccggtaccttccgccggagtatgtaccagctcggcctgatagctgccgccattttctgcggaacagaggttccagcagctgtcaaaagtaagtcggagtgtatcgtcgctgatctgttccgaaggagagaacagatcctgcatggcatttatgtcgccctccagcgcgaggtacgattccgccagattctgtgcctggatgacagcatggttctgatttactgtctgtgtgctcagcagatgggacttggcaaacagctggatacagacggcgctggccagggagaaaaacaggatcgctatgatcatttccattaaaaataaactggatctggaatgcttcataataagttcggaatcctttctgcccggtgtttattccgtggcattacagtgaatatggatataaaaggtgtggaactctccggaagccgtttgcagggatgcacggatcaggtcattggagacataggaaaatgtcaggtccttaagctccatgatatccgtaccggcaggcagaacctgtccgccgagagaagtcccttcccgcataaagagctcttttaaatgtccgtcgtagaaatagaggtaggtacagtaggtctcatcctcgatccgggaaagcatgcagagagccggggtatcttccagcgtggccagagagatactgtccgtggtatcattctgccggactttttccaggatataggacacggcagtcctgctttcgtaattgacacccatatcttccacggtgtgttggtatacatccgctccgatggtaacgagcgccagcgcggagacggcgaatacaccgaacaatgccagaacgaacaagatatccacaataaaatgtttttcctgatttctattgttcataatgtcagaaactcctttagtgagcgccggttctgcggagtacggtgacttccggaagaaggttgctgccatagtattcatagtcaacgaaaaaactgttcttatcatacaacagaccgtaatgctgctccagatattccagagaaggtggataacagccttctacggcatagcattgagaaatgctgcgtcccagggcagtttccagactttcatgctgcttggtcaaagtagattcactaacggatccaattccctgtaaaaacagaacaaacaataccagaaatgccagaatgggaagcagatagaccagtttgcgtccgaaggacatgcttttttgctcaaaacgattcatgatatcactcctatccgatgctggtcataatacccataagaggcaggatgaccgataacaggatcagaccgacgatcactgacagaatgatgacaagggtcggttccagaacggcgatgatggactgtaatctgcggttggtattttcctcatagcggtctgcgatttttcgaaggaccatatctacgttaccactgcggaaacctacggataccatctgagaatacaggtgattaaaaatacctgcaccggtcaatgcttccgcaaaattggcaccggcatgaatggcttctttgcagtttaaaatcttctgtttcattttctcattgcctaccagtgcagccaccatgtccagactggaataggtatccataccactgctcagagtcagggccataccacttgcaaaacgctcgcaggccacactctcataaaagcgtctggtgagaggaaaccagttcagaaaacgcgcggtagtacgcttgccaccctgggttctggtggcgaaaagatacagaagcagtatcacacacagaatacttacgaagataaaggaataacggttcagatgattgccgagacgtaagagggacgcggcaaaccccgtcatctcactgccaagctccacatagacctgttcgaagatcggcataacacggctgaccagcactacgatgacagcagccatcatggcgatcataataaaggggtaagttacggcatcccggatactgccggcgatggcatcttctttttcgtaataatctgccagagaattcatgcagacatccagattaccggattcctcgcccagagcgatcatatgcagacagtaatcgggaaatactcccgtggcttccagagccttgtgaaaactttctccctgccggcatacggtaaggatctggtcgaagatcgccttcccctcaggcgactgtgcatcactttgcaggatggccataccctccaccggaggaatgcctgcctgaaacagcatggcagactgattgcagaaagaagcgatctcttcattagaaagtaatttttgttctgtggtcttcatgtcgttttgttccctttcactaatacattttctgaaggatataattgctgccgtcaccgatgaactttttcagcgtcttgttatccgtgttggcaccgaaggtaggatccaccagggtccagacattgccgtcgaattcgatgatgccgttcagccaaccggtgtcggcggtgtagacgctgatccaggcgtgataggcatcctgcgcgtaaccgacctccagtctggtagggatccgctggcttctgagcatgctcgccataacggcggcatagtccagacagataccggtgccggaatccaaaatggcatctacgtcggaagtatagccggtggggggatcggaagccttatcgtagtcgtaggtaatatttccggtgatataatcatagatccgggtgatcacctccagatcggaggatgcaccttctgccagttcctgccccttggcaacgactttgctgtctgacgtaaaattcacgtactgattaggatagagaaaaggactgaattcatccgggatctgtacgtccagatccgcatacaggcaggtggcatagttcgtaccggaaatattttcgtagatcgtcacatcataatatccgtcgcccgaggagagaggaaacgtctcgtagccgcctccgtgcagatcataggtatagacaacggtgtcgggaccggtgatgcgcagtttgactttgggacaggtgccggtataattggcacagacatagccatcggacatatgagaataatcgatgacagctacatcattggacaccaccgcggtgccgtcggcctgtggtacgaggcagacgggagtggcatcccgcagaggtcccgcaggggaagtgttttccgtgtccggggaagcagtctccggggaagaggtgtcggtatccgcagaagcgggatctgcggaggactggtcgtcgtaagtgcccgtcacagaagcatccacaggcagagagtcagaagcggaaccgcaggcgcacagacccatggccatacaatatgtaattaataaaatgcgcagccgcgcagatgatcttggtatccgcatagaaatcattacatcctgttgttattgtgccaggcccgttacattatcgggagtaaagagcaggtggagggtctcaccgttttttacgggaacataaatattggcttcctcggaaagaaaagggaaattgatcacacccttggaggtgtctacggagagcggttcgatgatctcgccggacagcgtctccataaaagcctcgtcatagagaatgttatctccggtaaacttaaggcttaaaacattattctccacataatccagagtaagctccgcgggagcgggggcaaacattttctcgttaaattcggagagcggaacgatgactaagggcgacagaaaggtcagcacgaagatcaccgctgtggcaacgatcagacgattataggaagcggcatttacttttttacgaagcaccagcttgtcaaaaggaatggtattgaccggctggttacaggtggacaggatattctgcagagcattattggcagtcgtcatgtccagttcatatcggttctttttatgaaaaaacataatctgttatcctttcattctttctttcaaatgatcctgtccggaggcaatatagcgtttgacgctgctgcggctgatctccatggctgcagcgatctcttcgagcttcatgtcgttatagtagcgcatgatcaggacctgcttctcattgaaaggaagctgctctaaggcgtccgccagccgggaatattcatccttctgctggtagtgcagttccggattggtgtccagatggggatcctggacgatatccagaatctcctggctcaagacctggcagtcgttctgtggtcggttcttctgagtcatgtcatagcagacgtggaagcagatgcggttcagccaggcgataaaaaccgtgggatcattcagttttccaatgtttttcagagccagtatgtagacctcctgcatagcgtcctgagcgagaaagtcatctctcagataatgcctggtgtagttgtatactttattataggtaagagcatacaattccgcgaaggcatccgagtcgctgtgctgggcacggatcacaagaccggcaatgtaaggaatgttcatgtctttcatgcgttcgtctcactgcttggttaacgggttccttaagcgtggagcttattgtatgtctctgtaagcagagtggagaaatactccgcatgtgcttcttcatttaaaatatatgcgtacttgatctgaatgggcgcattactgtgttcctcgttgtattccttcagctgctgcgccagactttcgataaaatagtccatggtatcatgggaaccgtgattgacgatcattaagaattcgttaccgccgttacgtcccaccacaccgaaggcatcaccgacactctctaagataccggagaaatccttcaacatctggtcgcccacgacatgtcccatggtctgattgatctcctttaagttggtgatggtgaccatatagcaggctacatgctccagagattccggggagtcgtaggtctcaaagaccacatccagtccgtgtctgttgggaatgccggtcagatgatccaggaaagccgcacggttcagcgcgtggctttcttcggcaaaggtgcgtaatttataaaaatcgtataacagccatatcagattaaataaagcaaggatccaggaaagtgtgcataagataaacagggtccggtcttcgaaaagcttcgtgcccaacgccgggttcagggtcagcaccagaacatacgcagcttccaacagaagcagaaggactaactgcacggttttggtgttacggaaggtttttacgaatttctttttctgtatcatagggtcgctcctttaaaagctagtgtcatgattttctttgaatgtattatagcatattgtctgtcagaaaaaaagataacgatgccggcgttcactaatttgattttaaaaactttgactgttagaaattaaaataaaaaaatattaaaaatttgacccttttttgtgagacgaacagtcttaataattagaaagacacaaaaggagcggttttaccggcaactccggaagaaaggagtagaaggagacgatggaagaacgaaggaggatcgaccgtgttggctatcaggctaagagcgttatcgtagtatgtgattcgggagagagcatttttgtcgaaacatgcaatgccagcccactgggcatagcttttacgatgccggccggatctcctgatcttaaggggaaagacatcataatcgtagcggatacgatgatcatgtatgcagatgtcaccagacaggaggagcaagaagacggaggatttaaagtagctatttcggcaaagaaattcacgccggaggtgctgcagtatttatttgaacatattgttgaaaaatagaatggagaggaaaaatcatatgagaaaaaacagtaagaacgaaaaagtgattcgtgctatggcgatcggcatttccgcaatgctgatggcatcttccccgctgactgcactggcagcagagggagagggcaccacacccgaaggcaatgatgatcataatattgttgtaacaccggaagccggtattgctgaccgggcacaggcggcagcaaaagaagctgacaaggcagtagaaacggcagaaaagagtgctactgatgtgaagtcggaagtggctgaccaggtagtggcaggggaagctaaggatacgcagggcaaggatctgtctcaggctgttctggatgccaatgccaaagtagaggataagaccgtgaagggcggttcttctctgaaggacgcagagtctgctgtggagagtgcagataccaaacttggcgttgcagaagcaaatgataagctttccgacgcagaactgaataaggcagctgatgcagtggcaaatgcaggacagactgcggcagaagcaaaggatgccatgcaggctgcccaggataaggtaaatggacagatcgagaatatcaaggatgctgcttctatcaccgatgccaatgctgcctatgaagaagtaaagactaccgtagatcaggcacaggctgatttcgatgcaaagcttggggagtacaataccgccaagacagcttatgaagaggcagcacagaaggtggcagattatgaaaaggcttatgaggctgctataaacagtgcggatgctaacgctgaggcagcagctgctgagcttgcaacagcgaaggcaaatgcagaagcattggcaacggctttggaggctgcaaagggtgcagtggataagtctgcagcaggtgctatggatattgcagataaggaaactctgacccagggagacaatggactgaactggaaaaatgaggatcagcttttcatttccattatgcagaactactatctgcccgaggtacagaagatcactgccgatgatattaaggttgtccgcagacagggtgaagacaataataccaagaattattttgaagtaacctataccgatgagaatggtaataagcagacaaagtattacaactatgtgatggatgacaaacagacttccaaggacaatatcgtgatctttgagaagcgaattgaggaagtaaactggaagacggcgcaggagaccaatccggatcagtatgtgaagggaaacggggatactatcactgtttccgaagtggaaaaaggtctgaaagacggaaccattattgcagtagatggaaagaaagtgatcaagaacgacggaaccgagagtatcattatttctgacaataaccagaagaccgaaaacggcgaggttgatactgatgtaaatgaggctaccgagaaggaatcctggaaactggatgagaacggcaacctgatcaagaccgtgaccgctgatgtgaccaccatcacctataccgatgcaaaattcacttcttccgaacagtatcagacagaggcagagagagatgctgcagctgctgcaaaggaaaaggatttgaaggacgctgccggcaaggatgtaaccgttacaggaacagaaaaaacggattatacttataccggtaacggaacctacattcctacctttacgaagactgtggatgtgaaggatgaagaggttgaatggaagcatacagataaaaagacggattatggtgtaagaacagaggaagaagcagtagcaaaggttacgaaagagcaggagaaggcgttaagcaataagattaacgatgatgacgacttatacctgatcggtgtaagcagtgatcttaaggtaaccggctatacagaagatcactggtatgatgattcagacttcctcgtatccggtaccgtatccgcaacctacgcaaaggtaactaagaagacagtagaccagagtacattcggttccctctggaatgacatcaaggctctgtttggtaatggagaaactacgaacaagaagctggaagatgcagccagaaaggcagtcgaggcagatggcggtattttcgtcagcgccaactgggatgactggaagttcggtaaggctaccatccgctatgtagcaggtgtcagtgtcaagaccgatgagaagaccaccgcagcggatgcacagaatgcggtacgggatgcagcactggcacaggcaaaagcaagcggcgcaaccggtgtgtacaatgtgaagactacagatcccgataccattactcataccagctattcctatgagattgattatctggagaaaaccggagagaccacaaccaatactgctgtcagaactgagacttatgcaaatgcagaggtgctgaccggtcagatcatccagaacctgaactatattcagggcaacattaagctcacccaaaaggatgaagcctatcgtaaattcgtagatgatgccaaggctctgacccaaaagtatcagaagctgttacaggatgcacaggacgcacagggtaaggtggaagatgcacagggcaaggtagaagagctgaaggcagagatcgaagctctgaagagtaacagaaccagtaaccttggagctctgaaggaactggaaggaaagctggccgtggctgaacagaacaaaaaggatgcagaagatactctgaaggagattctgggcagcctggatgaggcaggcggagagctggataaggtgatcgatcgtctgactcctgcacccacaccggcagctcccgcaggcggcagcaacgataccggagagactgttgttaacccgattgttctggcacccgcaccggtggcacaggcaacagtagtgacccagaatcaggcagcggcacagggcgtgacgcagattgctgatgaagcagcacctcttgcagcaaatgttgaggaagacacccagaagacagcagaggaagcacctaaggcggaagaagcagtgaatattgcagacgaagcagttcccctggcagatgttgccgtagagagcgaacaggcaaagatgtcctggtggtggtggctgatcattttgatcctcggtgcaaccggatatgaaatgtacaagaagcacaatgagaagaagctgaaggctcaggcagaaaatgcaggagatatcgaagaataaaagataacaaaaacgacatccatcgggatttccccggtggatgtcgttttttagaccttggaaagaaaattactcgaagagctcttcgactttttccagatcaccgtctccggtcagcagaagagtcactgtggtctgggcactgctgatatcggttgtcccctcaacgcataattcaccgtcagtattgtagagagcccattggaactctttgacagaggagggccagtctgcttccatagagatcgattcctgatccgacagggaatccagatttacctgttccccggtcacgggatcaatgaccgctaccataccgacttcgatgccacacatattgactaccgacagggtgagtgccctggtatcctccgaagtggattctatggcagacgtatcggaatccggggaaacatcggcaggcagggcggcaacagtctcagacggggagggggaagcagtcgtggcggatgatgtttcctctccggcagaattctgactgcatcctccgaataacagacaacaggacaatatacttacagtaaaaatatgccgtatgaagcttttttgcataacagtctcctttgtgtgaaaatctatatcaccattatatcggatttcccataaaaagtaaatttatgcgatgaaaatttccggaagcagaccggtaggaattcctgaaaaaaatatcgaaaaatgtgagccgtttttcatggataagtagtctttatagatagagactaagaaataacggaggcggtcgagatgagcggcatgttatattccatacctgtgattttgacaggttatcgaatcgtacaaattgaagatgaagcgacaccgcttgcacaggcagtaaagagtggatattacggtgatacagtagccggaatgctgggtattggtgttctattactcttgctgatttacttcatattatgcagaaaataccagaaaagaatcatagaattgcaggaaaatgcgcatcccggctggaactggtggaagcttagaaaacaggcaaccgaactggaggataaaaaggcagaaagaattgttgaggatatcaggcgggcagcgcaaaactatatggctgtttaaattgggacaaatgaaatagggttgaaatagaaaggtccggggagcgttccccggattttttttcgatataatacaaaaagtaagtatttcgttgctgatgtctgacggtaatgttataattatgtatgtggtggttccggagaccggtgccataagcattaagaaagaaaaggaaggcattctatgaaagtattggtaacaggcgtaaagggtcagttgggatatgatgtggtaaatgaacttacaaagcgcggcattgaggcggtcggtgtggatattcaggacatggatatcacggatgctgccagtgtggaaaaagtgatcggtgaggtagcaccggatgctgtgatccactgtgcagcctatactgcagtggatgcagcggaagataacgtggatctctgccgcagggtcaacgcggacggcacacagaatattgccaatgtctgcaaaaagttagattgcaagatgatttatataagtactgattatgtatttgacggcgagggtaccagagcttgggaacccgacgatgagcgccatccgctgaacatatacggacagaccaaatatgaaggggaactggcagtgcagaatactttggagaagtattttatcgtgagaatctcctgggtattcggtgtcaacggcaagaactttatcaagacgatgctgaatctgggcaagacccatgatcatctcacggtggtgaatgaccagtttggttcgcctacttatacttatgatctggcaaggcttctggtggacatggtgcagactgataaatacggcatctatcatgcgaccaatgaaggcatctgcaactggtatgagttcgcctgcgagatcttccgcaaggcaggcatgaacgtggatgtggctcccgtgcccgcctccgagtatcccacgaaggcaaagagaccggagaacagccgcatgagcaaggagaaactgaccgagaacggatttgagagacttccttcctggcaggatgcgctggaacgctatctgccacagatacagtagcggttccttatataagcagcccctgtatagggggaaatttatgggaaatacttcatggagcggtatcggaaacggtactgctcctcttttggttataataatatgaaaaagtggtgaaaaaccctgtaaatttcacgaaaaaccagttgacaacgggagttggaacaagtatactattaaagcgtgccagaaaaggtgcgtctattatactattaagaaagaggtgaaacagaatgccaacatttaaccagttagtaagaaaaggacgtcagacctctgtcaagaagtctactgcacctgctctccagaagggttacaactctcttcacaagaaagcaacagacgtttctgctccccagaagcgtggtgtatgtactgctgttaagacagcaactcctaaaaagcctaactctgctcttagaaagatcgccagagtacgtctttccaacggaatcgaagttaccagctacattcccggtgaaggtcacaatctgcaggagcacagcgttgttttgatccgtggtggtcgtgttaaggacctgcccggtaccagataccacatcatccgtggtacccttgataccgccggtgtcgctaacagaaaacaggctcgttccaagtacggcgctaagagacctaaggatgctaagaaataagtagtatccggggcgttttgaacgtcggaccgagagttcgatgaaaatccgtaaggatttttggagacgatgcggacatcgtctttgtaccacaaaaacgaaactaagaaaagtgttggaattctgtgatacagatataacagcgcgaacacttggggaaacacatgtgagtacctatgatctaacgtaaacaatttgttaaggagggaagaaccgtgccacgtaaaggacatattcagaaaagagatgtattagcagatcctttatacaacaacaaagtggttaccaagcttgtcaacaacatcatgttagatggcaagaagggtgtagcccagaagatcgtatacggagcatttgctaaggttgaagagaagagcggcaagcctgctctggaagtattcgaagaggctatgaacaatatcatgcctgttctggaagtaaaagcaagacgtatcggtggtgctacctatcaggtacctatcgaagttagacctgagagacgtcaggctctgggccttcgttggttgaccatgttctctcgtaagagaagtgagaagaccatggaagacagacttgctaacgaaattcttgacgcagccaacaataccggatctgcagttaagagaaaagaagacatgcacaagatggcagaggcaaacaaggcttttgctcattacagattctagtaggagggaaaaaacttggctggaagagaatatccgttagagagaaccagaaatatcggaattatggctcatatcgatgccggtaagaccactactaccgagcgtatcctgtattacacaggtgttaattataagatcggtgatactcatgaaggtactgctaccatggactggatggctcaggagcaggagagaggtattaccattacatctgcagctactacctgtcactggactcttgaaaaagagaccaaacccatgcccggtgctctggagcatcgtatcaatattattgataccccgggtcacgtagacttcaccgttgaggttgagcgttcccttcgtgtactggatggcgctgtcggcgtcttctgtgcaaagggtggtgtagagcctcagtccgagaacgtatggcgtcaggctgacacctacaatgtacctcgtatggcattcatcaacaagatggatatcctgggtgctaatttctacgcagcagtagatcagatccgtaccagacttggtaagaacgctatctgccttcagttgcctatcggtaaggaagatgagttcaagggaatcattgatctgttcgagatgaaggcttatatctacaacgatgagaagggtgatgacatcactgttaccgatgatcttggagatatggctgatgaggctgctttatatcatgatgagctcattgaaaaggtttgcgagctggatgatgatctgacaatgatgtatctggaaggtgaaattccttctgttgaagagatgaaggctgctttgagaaaagctacttgtgagtgcagagccgttcctgtatgctgcggtactgcttacagaaataagggcgttcagaagctcctggatgctattatcgagtatatgccttctcctcttgatgtgccggctattaagggtgttgaccttgacggtaatgaagtagagagaaagtcttccgatgaagagcctttcgctgcacttgcattcaagatcatgactgacccgttcgtaggtaagctcgcttacttccgtgtatattccggtacgctgaattccggttcttatgtactcaatgctactaaggacaagaaggaacgtgtaggacgtatcctgcagatgcatgcgaacaagcgtgcagagctggaaaaggtttactccggtgatatcgcagcagcagttggattcaagttcaccactacaggtgataccatctgtgatgagcagcaccctgtaatcctggagtccatggagttccctgagcccgttatcgagctggctatcgagcctaagaccaaagctggtcagggcaagatgggtgaagctcttgcaaaactggcagaagaagatcctactttccgcgctcataccaatcaggagaccggtcagaccatcatcgccggtatgggtgagttacatctggagatcatcgttgaccgtctgcttcgtgagttccatgtagaagctaacgtaggtgcacctcaggttgcatataaggaagcgttcaccaaggctgtggaagtggattccaagtacgctaagcagtccggtggtcgtggacagtacggacattgtaaagttaagtttgagcccctggaggctaactgtgagaagtttgactttgatccgaaggcaaacattctgatcaacgatcctcctaccctgttattcgaatctactgtagtcggtggttctattcctaaggaatacatccccgcagtaggtgaaggtatccaggaagcagctcaggctggtattttgggtggattccctgtactgggtgttcatgcgaatgtatatgatggatcctatcatgaggtcgactcctccgagatggcattccacattgcaggttccatggcattcaaggaagcaatgcagaaggcagctcctgtactgcttgagccgatcatgaaggttgaggttaccatgcccgaggaatacatgggcgatgtaatcggtgatctgaactcccgtcgtggtcgtgtagaaggtatggaagacatcggcggtggtaagatggttaaggctttcgttccccttgctgagatgttcggttactccacagacctgcgttccaagacccagggtcgtggtaactactccatgttcttcgaaaagtatgagcccgttcctaagaacgttcaggaaaaggttcttgctgcaaaggcgaaataagcgctaaatcaataaaaataacttgaaaaacctctgattatttaatataatcagaggtagccgagttaaaaagcgccgagtgcgcgttcgccacttcggcgagtagaaaaatataaacagtttaattattttaaggaggacttaaataatggctaaagctaaatttgacagaacaaagccccattgtaacattggtaccatcggtcacgttgaccatggtaaaactaccctgaccgctgcaatctccaaggttctttccgagagagtacccggtaacgagaaggttgacttcgatcacatcgataaggctcccgaagagagagagcgtggtatcaccatttctaccgctcacatcgagtaccagaccgagaagagacactatgcacacgttgactgcccgggccatgctgactacgttaagaacatgatcaccggtgctgcacagatggatggtgctatcctcgttgtagctgctactgatggcgttatggctcagaccaaggagcacatccttctgtcccgtcaggtaggcgttccttacatcatcgtattcctgaacaagtgtgatatggttgacgatcccgagctgatcgagctggttgagatggaagtaaccgagcagctggaagagtacgacttcaatgactgccctatcatcaagggttccgctctgaaggctctggaagatcccagcagcgagtggggcgacaagatcatggaactgatggatactgtagattcttatatccctgatcctcagcgtgatactgataagcctttcctgatgcccgtcgaggacgtattcaccattaccggtcgtggtaccgttgctaccggtcgtgtagagcgtggtgttctgcatctgaatgatgaagttgaaatcgttggtatcaaggaagagaccaagaagactgttgtaaccggtatcgaaatgttccgtaagatgctggatgaggcacaggctggtgataacatcggtgctctgcttcgtggtatccagagaactgaaatcgaaagaggacaggttctggctaagcccggtactgttacctgccacagaaagtttaccgctcaggtatacgttctgaccaaggatgaaggtggacgtcatactcctttcttcaacaactatcgtcctcagttctacttcagaacaaccgacgttaccggcgtttgcgaactgcccgctggtgttgagatgtgtatgcctggtgataacgtagagatgaccatcgaactgatccatcctatcgctatggagcagggtcttaccttcgctatccgtgaaggtggtagaaccgttggttccggccgtgtagctaccatcatcgagtaatctttgatagatagtatatagctcttattctggggaagtacttgtacttccccatttttttacacaataacgcagaatagtaattcagaacaataacttagaacagtaactcagaatcgtaacgcagaataataattcaaaaaattaattcaaagatcattttttcttttaaccatttaatgacacagttctgtgtcggatatttcaagatatttatttcaattatttgtataatagcattattttaagaggttggtttgtagaaattatacatacataggaaatatatgaggagcaacgtgtaaaatacatgcgagggaggggagaattatggattaggtatgtgccaaaggcaaaggaatacatgcgaaaaaagaaaaaagatgaaataggtatgtgccaaaggcaaaggaatacatgcgaaaagagaaaaaagatgaaataggtatgtgccagaggtaagggaatacatgcgagagagggtgaaattatggattgggtatgtgccagaggtaagagaacacatgcgaaaaaagaaaaaagatgaaataggtatgtgccagaggtaagggaatacatgtaagaaagggaaaaatagagataaaatgaaaagcactaaatgaaaaatgtacggcgggaggaaaaggctataaaggatttactatatgaacaattgataaaaagagaacattggttaagggatttgaaacaaaatttggaaacaagtatacagaatgcaccatcaggcaatctgaaaataattaactgcagaggcattgaacaatattatttggactctgctgaaactagaacatcctatccaaacggaaaatatctgcgaaaatctgatttcgaattggcaggtaaacttgcacaacgaaattatgatgagaaattgctgtcagaggtagaaaagcaattaaagaacatacaaaatattattaaaaaatatgaaaaacaagaaatagtacaggtagaagaactatatagtgtctatgacagaatgagtccatccaggaaaaaaatggtggattcgaggataatgtcggataaggaatatgtgaatcagtggtcagcacaaatatattcaggtaaagattttgaagaaggacaggcagaaatctacacagaaaaaaaggaaagagtcagatcaaagtcagaaaagatcattgcagatatgttgtaccataaaaatatcccatacaagtatgaatgccctgtaaccctaaagggattgggaacgatatatccggattttacctgcctgcggttaacagatcgaaaaacgattttatgggagcatttgggaatgatgacagatccgatttattgtcagaaagctatgaaaaaaatagacatttactccaagaatgggtttatacaaggtagagacattatatatacatttgaatcagaaaaatacagtctaaatacaatgagtgtggaaaatctcatcagtcaaatatttagtacataaaaaatgtctgaaaaaggatgcccgaaaaaaatcgaaaaaggatataaatcaatcccgtataatcaaacagcttctgataatatttgttgataatattttgaaatgcaatttttgataaaagaaataggtatgttataatgggacatatcagaagtgaataaaatacagaaaaatcagtgaaaaggtagagaaatggcagaaaatggcagatagaaggcttttgactttaagaaaaacaataatgttttatatttgtatatggaacatttttttattgatcggctgtgcgaagactgagatggtgtctgaggacaatacagtaacaaatgaaaatattgtcagtgccacaggaactattgcaatagaaacagaagcaatagaaacagaagcaacagaaacagaatcgcaggatgcaatccagccatctaccgaccaaccaccggaagccgcgccggagtacaagatcatcatggtaggggatatactgcttcacactccggtggaggaaagctgtctgcagccggatggaagttacgattatgattcgctgttttcccacacaaaagaggagatcgcggcggcagatcttgccctggtgaaccaggaggtgatcataggcggtgcggatcttggaatctccgggtatccctgtttcaatgcagattacagtctctgcgattcattggtgggagcaggattcgatgtcatctgtcatgccacgaaccatgctatggacaaggggcgtgcggggctggtaaactgtgcagagtactggagagacgaatacccacagatcactgtcctgggtattcatgatattgcggatacctccacttcctgcggcgcagatccggcgatcattgagctgggagacatgcggattgcagtcctgaactacacttacggaaccaacggaatttctctgccggcggatatgccctatgcggtggatcttttgaatgaggaacaggtggcggcagatattcagagggcagaggaattggcggacttcaccatcgtatgtccgcactggggaacggagtacaggctgacatcagatgcttcgcaggaaaaatggaccaagatatttgcggaaaacggtgcggatctgatcctgggtactcacccgcatgtcattgaacctatagaatgggtgacagatgaagcgagcgagcatgagatgctggtctattattctctgggcaatttcgtgaactggacatccgggacgggagagggtgtcgctaaccgtatggtaggcggcatggccgaggtaacgcttacgaagaatgataatggagaggtggagattgcagattatggggtgaaaccgatgatcagtcatgtggcttccggtcccgaaggtgtgacaacatattttctggaggattatccggaagaactggcagaggaaaatgagatcgtttcgcaggatccggagttttccagagaatactgtgtcaatttgtgtgattccgtatggggagacctgtggaagacagagtagacaagtgacatatagtctgttaaaataaaaaaagttgttgatgcaacaacaaaatgtggcctattttgtagaataatccataagaaatatttttactgccggcaaggcggcgtgttataataaaaatacatataggggtacgcaaacgagaagagagaaggcaaaggaggagttacaatgaaacaacagttggaaccgttgtttacgccgtggaagatcggaaactgcgagattaagaaccgcattgttctgacatccatgggtggcacaaacctgttgggatggatggaagtgaaccattttgacaaggatggtgcgaaatttattctggaggtagcgaaaaataattgtggtctggtgcttccgggatgtcagccggtatacaatcccatgtacggacagtggctgtataagaagaaaaaaatgtatgaggatctggcaaagtggatgccagagttccacaagacgggagcaaagctgttcgtccagctgacggcaggtttcggcagatcgtttaccatcagtgaaatgatggagaccctgtacaccaataaggcattgcgggtactggcgaaaccttttatggatctcgacaagattacagccgcacccagcccgtctccgaaccgttggtcagataaagttccttcccgggagatgactgtggaggagattcaggagttcatcaccgcattcggtaagactgcaaaattattaaaggatgccggtgtggacggtgtggagatccatgcggtacatgaaggctatctactggatcagtttactttaaaatatgtgaatcagcgaaccgatgaatatggtggatcttttgaaaacagatatcgttttgctgtagagatcgtaaaagagatcaagaaggtctgcgggcaggatttccctgtgtctcttaggtacagtgtggaatccaagaccaagggcttccgtgagggagcacttcccggagaaagcttcacagaagcaggccgtgatatggcagaatccgaaaaagcagcgaagtatctgcaggatgccggttataatatgttaaactgcgataacggtacttacgatgcctggtactgggcacatccccctatctatatgccggagaactgcaatctggaggatgtggcgcatatccgtaaattcgtggatatccctgtggtatgcgccggacgtatggatccggagacggctgcggctgctattgcagacggaagaatcgatggtgccggattcgccagacagttcctggcagaccaggaatgggtgaccaagctgatgaatgataaggaggacgacatccgtccctgtattctgtgccacaacggctgcttcaacatgtgtcactataagggagttcccaatgatcaggcattatctgattccctgcatctggcacgctgtgcggtaaatgccgagaccatgcagtgggagaagcacaagatcgttccgaccaccagcccgaagaaggtacatattatcggtggcggtatcggcggcatggaggctgccagagtactgaagctgcggggacacgagccggtgattcacgagcagacagatcacctgggcggaacctttattgctgccagtgcggaaagctacaagggaaaactgcgggatcttctgacctggtatcggaagcagatggcagatctgaaaattgagattcattacaatgaaaaagtggagagtatcgccccatttgccggtgctcctataatcatcgctaccggagcagtgcccagagtactgaaaaaagtgcccggttatgagaaaatggttgaggcatgcgaataccttaccggtactcccgtaggagaaaaggttgccgtcatcggcggcggactcaccggctgtgagatcgcttacgaactggcgctgcagggcaaacagcctgtaatcgtagagatgaaaaatgatctcatcgcccagaccggagtatgcctggccaacagttcctatctgagagagtggttcgcctggaagaaagtgcccgtatatctggaaactacgctgcaggaagtaaaggatgacagcatcgtatgcaaggatgcttccggaaaagagatcacaattccctgtgacagtgtgatcagttccgcaggatacattcccaatccactggcaccgaagggcagcaatgtcagcctggtaggtgactgtgacggtgtaggcaatctgcgaagtgtcgtatggcgcgcttatgaagttgccatgaagatttaaagggagggaaatcaatgaacttaacaaaagaacaacaggaaatatatgatggaaaacagggagcgaccctggcgaaggtcatgcagacgctggtgcgctacggcgagctgttcggtgcggacggtatggtgcctgtgaccagtaaatacaaccatctggtaacctctttcggattgaaagcactggcgccggtgtatgaactgatgaatcagctgatcgaatccggcaatgtatccaaacagaaattttccgccgatccgagaccactggatcccaatgtgcccagttcttttttacaggattttgtgttcaagaatttcatgtactccaagcaggatgattacgagaaacagcttacacagctgggtatcatggaaaaggatgcttacacctgcacctgttacatggatgaagtgggaaataccccggccatgggagaggtgctgtcctggtctgagtcttccgcagtggtttatgccaactccgtattgggggcaagatgcaatcgtaactccggtatcattgacctcatgggctcggtagtaggctatgtgccccgttttggtctgttaacggatgaaggcagaaaagccacctggatcgttaagatcgagaccacgaaaaagccgg

SEQ ID NO: 11459 - DNA, 3502 bp, Unknown
  gut microbiota DNA sequence
agaacttttttaaaactttttcttggcattgtcaaggtatttcttggtctcagccaccacaacaccatttaatgccagcagtgcgatcagattcgggatcgccatcagaccgttgaaaatatctgcgatggtccatactgccttaacagtcatgtagggtccaatgaatacgcaggcaatgtagatccaacggtatactttgatcgccttcggcttctgaccgatcaggtattccaggcatctctcgctgtagtaatcccatccgaggatcgtggtaaatgcgaagaataccagacataccatcaggataaaggatgcaatagagctgttaaaaggcagtccctgctggaaagctctggtggtaacatccacgccgtccagacctacgttccaggaatcggtaattacgatcgtaagaccggtcatggtacaaatgatcagagtatcaatgatggtacccatcatggagatcaggccctgcgtggcaggagaatcggtctgcgctgcagccgctgcgatcggtgcgctaccgatacctgcttcattggagaaaatacctctcgcaatacccttctgcatcgccatgataaccgctcccaaagcaccgccggctacggcacgcataccgaaggcactctgtacgatggtcacgatagcagagggaatggctgttacattaaagatcaatactaacagacaggctactacataagtcactgccataaaaggaacgatgacctgtgccacggtggagatacgctttaatccaccgataacaaccagtgccacgcagatggtcaaaaggattccggagatcaccacgctccaggaatagtccatgccgaagagctgtacggtatgtgcattgttcgcatcgaagaaattatgtaccgcactggtgataccgttgatctgggtaaaggttccgataccgaacaatcctacgcatacacccataaaagcgaagatcttcgccagccatttccagttcttgcccataccgttctcgatatagtagaagggtccgccgatgatgtgtccgtcctctgctaccacacgatacttcaccgacagcaggcactcggaatacttcgtagccgtacctaccagcgcagcgatccacatccagaacaaagctccgggaccgcctgctacaatagccgttgccacaccaacgatattaccggttccgatggtagcggacaatgccgtacacagtgccgcgaaactggatacttcgccgtcttcgcccgacttttcattggcaattaagtgtttgattgcatggggaagcttcgtgatctgcaaaaaatgaagtctggctgtgagaaaaaggcccgtagccagaatgaggacgatcagggggatgccccagacgaaatcatccactgtggtcagaaagttactaatcatgtctaacatattccctctccttccgtcacctcttgtgacgtcctatcgtagattgatttcttccgaagagaatgggaataagcatatagatgctctgtccttttgcctgagagattggcagctttactgccgtacaccttcggcgccttctatacgaaaatatgataattgctttccgcggaaggactctccagagtaaatctttaccgcactaaagcggcaacaaaatcacaatagcatactttttcacccattgcaacgtttttttatctttagtcattgatctggccaacacagacattgacttttatggtacctgattactataatataattcatatgaatactaacacgaacaatcacaaaacttcatattccattacatgtggactgtttttcctgatcatgtgttctgtgatttttacggtactgtactacagtctgcccaggcagaaccgtgagccggcaatatcggattatattgacttttcagaaggctggaccacctccgatggacgccccgttgatttttcccatatcagtggcacctgcacagtgaccaagaagcttcctgcgctgactcacgacatgacacttttctttttttataaaagttccaatgtgacgatcctgatagacgaccggcagatctatgagaccatgcagccggagagagttttcttcggcaagacaccgggagcctcttatgtctctctgccgatctaccgggaagattccgggcgcacgctcaccctgatgatcgataatccttacggagacggcagtggcaaaatcaatgatatgtatctgggacgtagtgaagatatcctgataagccgcatccgcgacaaggcacccggattcggcatcagcttcctgatcgcccatctgggtctggcatttatcctgttttatctgccattacacaagaagcacatcatcggcagtgagatgctttatctgggattgtttgccctgaatatcggtatcttcatgttggcagataaccgtatgctgcagctgatcctgcgtaatagccatatttatcatacaattgcggaactttttatgatgctgatcaccattccactgtttctgtaccttggcaaaatgtatacagagtactcccctgtgatggtacagacagtatgcctgatcagtgtcatggatttcagtatacgtttttgcctgaatctgaccggccgcaaggacttccatgaaagtcttcgtctgacccatattacttttagcattctgatcgcgcttgttatctacgccatcggcaagggattttatcagaatcaaaagcagcatctgaagcacaatctatatcataaccttggaattctgtgtctgtgctttggcgttctactggatatcctgctgctatggttcggcagtgttcccgagaccagcttcttcacacggatcggtgtgcttatgttcctgatcatggaagcagtccaggttaccctgcgcctcatgaccaactatcaggaaggcgttcgcatgcaactgctcagccgcctggcttatcgcgatggcctgactgacctgctgaaccgtacttcctatatggaagaattgaaaaggctggacgcatcccataattttcatgtgttgctggcactgtacgatgtgaataacctcaaatatgtgaacgacacctacggtcaccaaagcggtgatgaaatgatccgccgggtagcggatactctgttggcacatctcggttccttaggaaaatgttaccggatcggcggagatgagttcgtatttctgtcgaccgcagccgattctgaaaaagaatttctcaggctgcaaagagatttcgaagcgtctctgggagttctgaagcttccggacggttccgagcatcccattactgtagccatgggatattccgtactgaaccataacatgcctcgttccatggacgatgtggtccgggaagccgatgccaaaatgtacgaggcgaaacgacgaatgaaaacagaaaatcgatcataagcgttgcagatcttatttcattttgtaatgtaacttgaaagttagtgaaatagttgttctaaaatccacgcagaaagga

SEQ ID NO: 11460 - DNA, 304 bp, Unknown
  gut microbiota DNA sequence
tttctcgtcatgacggggccgcctttacgttgccatccatgtgcaccaaaagccatgcaagcatggcttggctaacgcgaacatcgtgttcgcgttgcccctgaggtccaaccactttccaagaaaatctcacagtctccgccgcatctacgcccgagggagcagtccttttctgctgggttatgaaaaacatcccaattatttaggcagagcatttgagaatacatgtgcagaagttaaaaacaaggatttagtatgtgcaaaaaagaaggaaatacatgcgaataattcaaaagtcaaaatt

SEQ ID NO: 11461 - DNA, 257 bp, Unknown
  gut microbiota DNA sequence
caaaactaataaatttcataaaattcgagatattatagaatttatgaaaaaaaggaatgtattttaggaatttttttcataaatatagtaaaataagtatctttttatgaaactaatagcccatggtagggctactggtttttgaaagcttttcaaaacgcagaactcccggcgtatgcggtgccatgtcgaagatgtttgtcggaggatgttgatattttctagaaaagtgctgaaagacagggggaaagcggaca

SEQ ID NO: 11462 - DNA, 11973 bp, Unknown
  gut microbiota DNA sequence
gcatgtatgataaccgggaaaacacatgcgcaataggctaaaatggaaaataggtatgtaaattgctttaggaaacacatgtataaaattttaaaaaaagaattaattatgtaaatgattttgtaggaatacagaaaccagcaacacgagatagacatagtagtttttcatgggattttcaaaacacagaacgcccacggcgaatggaatgtccttccgaagatgtttgtcgggaggtggtgatattttctcgaaaagtgttgaaagacagggtggagcgaacaggacgttctcgacaggcggatgttgccatggatggcaactggagccgtgcccgtacggattagaaccgctactcacttttcgtcagaaaattcccaccgggagaccttacatcgaggaaggatgtcccgtccgccgtgggcgttcgtggtttcttcactaactctccagttagtttggtgtaaaaactctagaaacaatgaattccgtacaaaaaaagtttctaaatcaggaatttttgtacggaatttcttcattttgcacgctcagcgaaaataacagctttttgcatggcaaaatctcatgtttttgtatttttttagaaaataatagcgtttttaatacaaacagaactccccgcgtaactctccatcaactacgcttggccgcatgttccagatagaggaaacatgccacattcaacacaattccaaacgcagtagagatgggggctgcgaggccgatattggtgaggcttgcgtccggctggatgctcatatagtaagcaaagggaaggcgtacgagaagggtctggatcagtccctggagcatgacccacacggtcttgccattaccgttaaaatatcccatcatgctgaacagcacagcagtcaatagcgtctccggtgcgaaacctttcagatactcataccctctctgcaccactgccgcatccgcggagaagatacctgccagcagattcccccggaagaacaccagtacaaagacgaagcatcccaccaaaagtccgatgccgataccggtgaacatggtcttcttcgcccgcttctgttctccggcacctacattctgtgacacgaaagaagaagtggactgcatcagtgcactggggatcagcatggcaaagttgacgatcttgcatgccacgccgtagccggaggaagcttccagtcccaggcggttgacaaaggcgcacagtgccaggaaagagccttgcgtcaggcactcctgcaaagctaacggcagaccaatctgcaggaatttaccgcactggggattccaacgaaaatcgtatccggtaatggtaaagggcagtccctttttcacaaggcgtacaattgcaaacactacgctcaatgcctgtgcaaaaacagtagccagcgctgctccaatggcatccatgcccagtcctgccaccagcaccagatcacccacgacattgacaatgcatgccacgaagacaaaaagcagcggtgaattgctgtcgccaagtcctcgaaagatcgcggacaatacattatatgccacgataaaaaagattccggcaccacagatccggatgtaagctgcggtcagctctaccgcctcttccggcgcctgcataagaactgcaataggccgggcaaaaccaaccatgaccacgaacaacaccagtgaaatcactgcaaatacaacggttccgccgccgatgatactgccgatctgctcctccttcttctctcccagataccgggcgatcagcacagtaatacccattgccagctgagtcaccacgaaagttaccaaattcagcacctgactaccggtagagactccggacaatcccgaagtggagccgaaccgtcccactacgagcaggtctaccgcaccgtaagccgcctgtaagattaaggctcccaaaatgggaaccatgaagcggagcaactttttcaaaatgcttccctgtgtaaaatccatcatgtcattttctttatttttcaaacttctctctcctctcgcacatcacctgataaaaggtctctatggtctgtatcatcactttcgcatctgcttcggaaatgctctccagatacggtgccagaccggcaaaataattctcattatattgttccgacagttttcgtccctcttctgtcagagaaatataggtgatcctgccgtcttccgccgcattggctttccgcagataacccttttcttccatttcttttactgttcgtgtcacgccgggacgggggatgttcagatagtcactgatatctgaaatcttcacagcaaccccctgcctctccatgatctggatcacatccaggaaatgaatataagaaggtgtcacgcccgagggcagcgcagggagcatctcccggatccgttttgcctgatagcaggcatccaacattcgttttatcgtctgaatcgtcattctttccctctctgatatcttttctatcctatattttatccatatagttaccttgggtaattacctttggtaattatatggaaacaatttcaatttgtcaataaaatattttcataaacacgaaaacatatacatgaaaacagcagactcttttgggagaatctgctgttttttctacagacttcattttttgtttttctttatctcaattcaaatcatacgattttaacttatagaactgtttacgcatccgatctggcataggcgtttttcatctgcccactgagttcatacaggactttgtccagagtatcggctgcctcacactgaagcatcccggcaatcttttcgttggcctcttcctgtatttttttacgagtttcctcatcggtctcctgctccagcaatgtatcgtaacggttcaggagctcgtgacttttcgctgctatgctttcctgataacgttcgatatggaacacggatttgctataagaagcatcggccatggctgcgatcatacggctcatccagtagaagttctcggtggagacttttccggtggttccggacaggtagccgggtgtcgtatctatgtcagtgtagaacggagccagtacattaaatgcattggatgcaaatgccagccactggatcggctcgccctccgggcgcatctggatcagtgccatgtcatcattacggttaatgccgatcgaacgatatgctccacacatagttttatccccatacgaagcataaggatcataaggcgttccctgataatgagaagacaatacgtattttacatcctccaccgtgatcttcttctcaggcaccatgcaccagggcagatcatccgaaaaaggagtgtagtccgcatccggaccatcccagacaagtgtccggggattcagggtccgcagcatataccaggctcttgcggtattgtatacatggtcggaatcgtcatggctgccaaaggcatctctggcagaaaagctgccgtcctgtgacagatccagatgattcttttcgataaactctctcagatccgcagagcacatatgattctcctgtgtgttcagagcatcctccagatcgaaagcatcgattccgaactggttcggcatcaccacatatgcttcatccggcactctgcgggcaatccagtgatgaccgccgatcgtttccagccaccagatctcgtttttatcggaaaaagcaatcccgttcatctcataggtaccgtatttttccaacaggcttcccagcctcgtgacaccctctctggcactatgaatataagggagcaccacagatacaatgtcctcctcaccgatacctccgggaatctcttctgcaccgtcctgcgccggaacatattccaccagtggatctgctcccaggactctggcattggaagtgatggtctccgtggcagtcatgcccacacctgccgcattgataccgtgcgctgcccagatgccttctccctccagcgcattgggcactgcggtataacgcaaagcctcctcgggcagatcgatctccacatgagaaagcacggatctgtattttgtcggctgttcttccggatgcaccaccacaaatttcttcggggtaaactgtccggagggggaatcatcgttccgggcgatcatggtagatccgtcataagatgctttttttcctactaatatggttgtacatggcataatcattacctcctgctattatgctacaaaaaatttcccgtgagtaacggaaatctgtttcctgtctggaaccttacaccagcttctgtccattcaccacaacattacggatcgtctccggtctgccctgcagaggctcaatcttcgtaaactgtctgcagccggtgacttcgatattttccatagacagatctctgaaatatgggatgtcctcctcattttccatggcaatggtctcattacggttcagagaattcaggacataagacatcgtaaggatcactgcctcgcccttgatctcgctcatatggatattgcggagtgtgatgttttccaccacgccgccgcgtcccagcgcactcttcatgcggacacccacatcggttcccacgaaagtacagttctccaccagaatatcttttaccccacgtgacatctcgctgccgatgacaaaaccgccatggccttcattcaccagacaatcatgaatgtagacattgctgcaggggccttcgatcctgcgggcaatggcatttttgccggatttcatgcagatagcatcgtcaccggtctcgaaagtactgtggtgaatgtgcacattggtgcaggattccacatcgatgccgtcaccattctgcgcatagtacggattacggatcttcacactgtccacggtaaggtcctcgcaaaaatagggatgtatgttccatgccggagagttcataaacgttgcgccctgtaacaatacctttttacaataacgcaggctgaccatcaccggacggtaaaaatcataataaggtgccgcagcagccagtgcctcttcggtggttccctggatgttatggcgattgccttccagaatggtctcagtaggcatccagatctccgtctccttcgtctcgatcacataaggactgatctgaaacagcgcatcccactgctttgccgtcatcttgaatttcttgactggacgccatttatcaccgctgccgtcaatgatgccttctccggtaatggcgatgttttctgcattttccgcggtaacgggagatacggtgcgaatgcagtcctgaccttcatagctggtgatccgcagcggatagtcctctttggacttgatgaattttaacatagcctgactgtccagatgaagattgacaccgcttaacagccggagcggagccaccgcccagatgcctgcgggaactcttaccgtaccgcccccctgctccgacacttcgcagatcgcgcggttaatggcctccgcattgtgtctgccggtctcgatctgcaaatcgccgctcttcgcgccgtattctgctatggacacctcccggtccgggaactggggaatttctactttataattctgattatacatggttattgttttctcctttgaatattttcatggatactttcacattttctatgtttctgattctagcgtgttccgtttcggacttccacccggtttttgcgtttttccgaagggttctactgcttatttgtgcccttccgcgcagatccagtcctcgccgtcttttaagtgaatctgtacctcttcaaatcctgcattttccagcagttcccggaattcttccggtgtgggattaaacagatggaatctttgaatgttttcccgcacctgttccggcagatcctccttctggtaaatgtcggccaccagtaaaaaggttccctgctccttcaatacccggtagacttctttcagattctccgcgggatccggccagaaataaaagctttccaccgtaatgatcttgtcaaaagcattgtccgcaaaaggcagtttttccactgaggcttccacgagatccatttttccctgctgcagtgcttctgcattggttttcccggaaagctccagtgaagtggcggaataatccactccggtcagatgtccgtcacgcacctcttcactcatgcgtttcagagttgctcctccaccgcagccgatgtccagaatccggtcattctcccggatcttccagtgttccagcgcccagccggtcactgcgtagtggctttcgttcatgcggcgcagcatcttctccccatcctccccgaccggtttcccggggttgccggagatggtgatctcctgttgggtgcgttcgttggtggttaggtttatggtattattttctgttttttcagtcatgatctttattccttcttccagcctctttctttttggatctttgcggttttctttgcaatttttactatctctattataatagtaattgtttataatcatgtaaagggcaatcccgttattaagaatatctctgaataagggatttggcaaaacacctgatacaaagtacaatctgcgaaagcatacgccggaaatgcagtggaacgcttgcaggttacggaaaggcatacattttttatgaaatattatcttgcccccatggagggactgaccacttataatttccgcactaactggaaccgctgttacggcggcatggacaaatattttaccccttttatctccaatcggcacatgaacagcagagaacgcaacgatgtgcttccggaacataatgtgggcatgtacaccgtaccgcagatcctgaccaataaggcggaggaatttctgtcgctggcagagcagctggccggatatggctaccatgaggtcaacctgaatctgggctgtccttccgggacggtggtggcaagaaaccgcggtgccggattcttaggcacgccccgggaactggaggattttctggacgaaattttcgaaaaatgcccgttggaaatttccattaaaacccgcatcggcatggaatatcctgatgaatgggctccgttactgaaaatatatcaaaaatttcccatgaaggagctgatcattcatcccaggctacaaaaggaaggctacaaggggacaccccatctggaggctttcgcagaggcggtggaagccctgcaatgtccgctgtgctataacggggatattacctctccggagacactcgcgcacatcctggaaaaactgcccatggtcgatactgtcatgatcggtcggggaatcttgcaaaatccgggactgttacagcagttgaaagctacttccactgatttcgatggggtgtctctgccgtcttcggaagattgtctggatgttttgaaggaattccacaattctctcctggcgggatatcaggtgatcatgtccggcgatactaatacactgtataaaatgaaggatctctggactttcttaagccgcagcttcgaatcccccgacaaatacgtaaaaaagatccgcaaagccacggatgtcagtgactataaactggcagtcaatgcactgtttagggagtgcgctctcaaatcatcctaaaataattctcttgcgcctttaaaaaaaaactctttaaaaaaaaatttgtttcttatgcaacttttttgaagactgtacagtctaatcatcagagacctgtaaaaaatggttttattacgaaaggagttttattatgaaaaacaaatttatctgtgcacttttaactactgtgatggtattatcttttgctgcctgcggcagtcagggaaacggagctgctgcctctgcggaaagcaccgtagcttccgaaagccaggttacagaaagcaatacagaagccaatactgaaaccgtatccaccgaaagtacctctacggcggaaggagcctatgaagacaactttgcagttcccacagaggatgctaccgctttcgctaaaaagatccaggatgccgtagccgctgaagacttgaatgccctcgctgatctggtcaattatccggtctatgttgctctgggcgatggcagtgtgatcgaaaccagggaagatctgattgccttaggtgcagacaaaatcttcacccctgaactgaaagactctatggctaatgctgatctgtccgaattaagccccagcatggcaggtttcacactctacagcaccggtgacggtcctaacatcaccttcaatgtccagaacggagtactcggcatcagcggtatcaattactaatcattctcgtacaaattgggggagcctttcatcaggctccccttactcgtgtcgaaactactgttgtcaacggtaccatagtgatgtctatgttcccgtctgtcttacgtgtgatcagcgtggctccacgctggatatattgctttgcgatgccggaatatcccagataatcaatggacattccgtaagtcatgcggatacctttataggtcagtgacaacgtattcagatgatcgtgtccacagaagatccatttcagccagccgttatccactgctttttcgaaaaaatgaggtggtcgattcgatattccgaaatactcattcttttctccgatactaccgtgttcatagatcacactgtgatcacctagtttcatcttctcgtaggcttccttgaactccgcgggcggcatgtggaaaaatgccatagccggtacttttctctcgttcaatttctccatacaccagtccgtctgatcctcatggatgcagtcgaaaccactgaaaaaccagccgtcgccatacatgttagagtccaggtggatgagtggcaggagaatcctgccttctccatcgatcagatcgagtacaaaatttccgacgccggcaatggggttttgaggactatgctcatatcttcctttggtaaaaacagcgtattttcccgttgcaaaaatctccgccagttgctctttattgcatgcagcccccatctcacagtcatgattgccaaagacaaacgtatagggaatctgaaaaccatccagaaatgttaacagtttttgcgcctgttttctattattcatcgtcccgcttttggggaaaaacgggaaaacggaatcaccggtcaggacgatcaggtccggtcccgtccggcggatcagctccgtcaccgcttccagcgccagtctatcctttttccgggaaaacatgccgaaaccaaggtgcaggtctgtcagctgtaatattttataatctctgtccgtcgggatgcgaagggaaaaagtctcttcgtcccgaatttgaaaattttgagaggtatacataggaatctcttttctgtcacttaatctgtttcactattgtatttgagtttttttgaaatcagctcaatgggatcaacgcaccgattgcagacagcagcgtagacagcaccatcagcacctgaaacggcactgtaccgatcacgccgcagataggactgctgccggcttttttcctggactttccataggtcagcaccagcatgatgctcaccagtaccacaacgccactcatgatccgggtcagaacgataaagctgttcacgccaaacacagcaaacaggatgcaggggactgtggcgatcagccagctgatgcggttgccgctgccgatctgctcatgaaccacatcgcggagggcgagagtattgctccagaacgtggtaagtaaagcaaacagggaaaatacgcctgccaggatcattgcccaggtaccgatgctctctcccaactgcatgtatgccagttctttttccagcgctcccttggttcccaggagaaccgtgcccgttacgatcaggacaaacactgaggaaagcccaaaaccgatgaaaatggaacggcggatctgtttcgcattgccatccagacctttcaccacctggatcactgcctgattggcggaagtggcgaataccaccatgctgtacagcgccagcagattattccagtggaactgtgcccgttgcaaagaattcagcggatgcataaatgtgcctaccgtcatcactgccacaatgcccatgaggacaatgactgcgtacttctgcgcgatgcccacggccttcatgccgataaacaccacaactccggcgatcacatagtacaaaacctgcgccgccacaaaaggcattccgaaccagttcacaaaaatctgggcgccaccgttgatattgccgctgacaccgatcataattgccaatccatagacaataaatacactccagctgaagatctgcttcattttcccatgaaacaactctccttcaaagctcttcaccagctggaaaccaccgttattgtaagacagctcggcaatgatcagatgcaggatcacgttcacgcaataggcgatcaataccatccacacgacatccagcatgctgttcttcgtggcaagatacggaacggcgatgatgccggtaccgatgctgttgccgacgatcatgctgatggcttcaaaggtcgtgagatgggcttcggattggatggggtgggacatagggaggcctccttggtaaaaatacactactttattatgcaatatgattgtttcgatattcatccgcgtctaccctgataggtacaagaatatctgttactagatgggcaatgtttatctgcaaggttgcttctattccttccgctccggcagcatccctttgatcttcacgccactcagatccacatccagcacgatcttcaccatccaaaagaacagcaacagtaccaacatcgggatcacacaggaagtaatgatcatcacggcaactgcctcgataaagtgattgagggaattctccaccttctgtaccagttcttcggtagaaattgtcacattttccacaacatttgccaccgaatctttagcgccggaaatagcgtcttttgcccagtcgaagatgtttgagacagatccggagttattgttttccctctcctgcacattacctgtaacagttccagaagcttctgttgttccgattccggatgtttccgtcgcattagtgtcatccaccatgtcactgttttccagtatgctctgtgtgctcttggcatcttcaatggttgcttcgatctgggcctgataggtgtcaccgatgaggtcggagatcttcacactggcaggaaccacgaaggagatcgccaagccgaacaccgcaagctttgctgccagttttcgtaccgtggtatttgcaaagatcagattgaatatccacaagccgcaggcaatcggaatcaggtaggtaaatgccacatagccggtaatcgtcacgagatatttttccagatagatagcgcagaggaccaccagcagatatccgctgacatctgccattttctccgcaatgggtgttgccgtgtcgcccggaagcaaggtaatcagtgccgaagtcaccgtggatgccgccgtcaattccatgacagtctgttttttctcatccagagaggcgatggtcttctgatgattctccggtgcggagacgtattttcctacaactgttatggataaaatggcgaccagcaataatactgctgctgtgatgcattttttactatccaaattttttttcacaattgttctccttttacttaattttgtaaataccactgcacgtgtttacattttcttattagcagacatttatatcaaaaatataaatgattatttagaagagatggcaaagaccatctatgactattggtttgtacagtttgattttccgaatgaaaacggtaaaccatataagtcctccggcggtaaaatggtaaattctaatggtcacattattccagaaggctggacattttgtaaagtacaagatattatttcaaatatttgcactggtttgaacccaagagataattttaaactaggaacaggtgatataaaatacattactgtaaaaaatctgactcctaatggaactttagattttacaggttgtgacactattgatgaatctgcacgaactatcgttc

SEQ ID NO: 11463 - DNA, 21636 bp, Unknown
  gut microbiota DNA sequence
cagggctactggctttttgaaagctttccaaaacgcagaactcccggagtatgcggtgccatgtcgaagatgtttgtcggaggatgttgatattttctagaaaagtgctgaaagacagggggaaagcggacacgatgtccgcgtcagccgattgtcgacatggatgtcgactgtaggcggccccgtcatgacgagaactactcatcacttttcgtagaaaattcacacccggagactttacatcgagacatgtgtatcgcatgctccgggagttcgtggattttgccaatgtatttcactaactctcaatttatttctcttccaccggaatctgcttcagattctccacagactccaggatctcattactgcggatgtcaatgataggtcctccggtaccttcgatgtattctctggtaatggtgactcttccgatattgtcatccttggggatctcgtacatgatatccagcataaaatcctcaataatggaacgcagggctctggcgccggtgtcacgtttcatggccttttcggcaatggcatccagggcatcgtccgtgaactccagtttcacttcatccagttccaggagcttttggtactgtttcaaaatggcgttcttcggctccttcaggatcttcaccagcatctccttactcagtccctgcagagtacagatgataggcagtcgtccgatgaactccgggatcatgccgaacttacggatatcctctacggtcaccttagataagatatcggtatctttatcgtatttgtcctttagttcggaattaaaaccgatggatgcggtcttggtcaggcgctccttgatgatctcatccagatccgggaatgcaccgccgcagataaacaggatattgcgggtgttcaccgtagccaggggcaccatggcatttttgctattggcaccgaccggtacttccacctcggcaccctccaataatttcagcatgccctgctgtacactttcaccgctgacatcccgggaattggtatttttcttcttggcgatcttgtcgatctcatcaatgaaaataatacctttctccgctttctctacatcgttaccggcggctgccagcagcttggatactacactctcgatatcatcaccgatatatccggcctccgtcaatgacgtagcatcggcgatcgccagaggcacatccagcagtttcgccagtgttttaactaaataagtcttaccggaaccggtgggaccgatcataaggatattggacttctcgatctcaatcgcatccatggtgtcggtagctactctcttataatggttgtataccgctaccgaaatgacttttttggctttttcctgtcccactacatattcatccaggcttgccttgatcttatgaggtgccggaatatctttgatgttgaatacaggcttgggaccttcggctttctttttcttcttgagtttctgcttgttggggatgccgccgtctccctggaggtctgccagattcacaaagctgatattggggaatccgttctgtccgccgaactggttcagatcgcccggattattcaacatgccctggtagtcgaactggctcacagtctccatggtcttgtgcatgcagtcatcgcaaatgcagatatgattaggcagcttgaacattctgccggctttgctctccggtctgcggcagatgaagcagacatcctcgtactcgctgctgtcctttttgtcctctgtctttttctcagcggaattttcacccgcagtatccgctacctgtgtgttctcgctatttttttcgttatcttttttttcgttcagagtggtctctgttttctcttcctcaggaatcacttctctataatcatcattgtaattatctgtcatgttattctcctctttgtctattgcgcagtgcttatctcggtatcacttcgtgctacctcgatatccgggcttcgccctacacgtatcgtgtcttacgtaatcccgcctgcaagcagtcggttttcgtaatccactattccttgctgctttcttctcgcagtgcttatctcggtatcacttcgtgctacctcgatatccgggcttcgccctacacgtatcgtgtcttacgtaatcccgcctgcaagcagtcggttttcgtaatccacgatccttgcactgctcatgcttacgcttattatatctaattcgaatgactgctacaagtgaagtttttctaaacaaaatccccgggagattcagacgatcttccgggggttttctatctttccaatattcggtattgggaaccgctatatttattttttatctgcaggtctgctgcccagtgtcagattcagttcgatagatacatattcaccgttctgaggtctctgtaccgttatggttacggaatcaccggctgcatagtactgtaacatcttctgaagatcagagtaggacgagatgctactgccgtcgaatttggtaatgatatcgcctttcatgataccggcattggctgctgcgctgccttcctctacagatactacatagataccttccggcatgttgtacatctgggagatctgggaagttacttcctgcggggagatgccgatgtaaccgacttcatcctcagctaccttggttctggtctgacgctccatcagatctgcaatgataggacttgccgaagtaatcgggatagcatatcccataccttctacggcagtaccaccgatcttgttggagttgataccgataacctcaccattcatgttcagcagtgcaccgccggagttaccggggttgatggctgcgttggtctggatgaaagtaccggtagagccgttctccagaccggtagagccgttctccagagtgatctcacgattcagggcacttacgataccgttggtaacggactggccgtatccaagagcattaccaatggcaattaccggctcaccaagcttcaggtcatcactactgcccaaagtagcaacggtaatggcattcttggtatcatcgctcagatcatttaaagatactgcgatcactgccagatccatatcggaatccagtcctttgacctgtgcctgtgcttcactgccgtcgataaaagtaacggtcagcgtatctgcgctctctactacgtggttgttagatacgatcagcagttcatcatccgtcttgcctacaatgataccggaaccactggctgcttcttcctgtgtatactgctgtccgaagacattagctgtctcagtaaaattattcacaatcgataccatggcaggcatgaccttttccaccacatcagatacatcagactctacataagtaacgttggtcgcaagctgcggtgtactctggctgctctctgttgcagcttcggaagtgacctcatctaccactgcggtatccgtaccggtcttaagcatcccggtgccctgctgtactgcatagaatccgatgccggcaaacagtccgaagaaaagtcccagactgacacttaccacagctttccggaaataacctccatgctttttggggttcttaggttctgtattgctaccggtgcttccgcccatctggtatgtggtgtaaccgtttgcacttcccgcagcgcttactccgctgaatgtaccggttgtatttttatctccggtttcataaccggaaaaattatcattctcgtacataattcttcctcctatcctatctgtaagtgagaaattttttactatttccatttcttcctctcaccttatgaacatagtatatccaccaaatgtgaccgaattgtgataactttctgaagcaattatgaaagatcaaaaaaccgaagaagttttcacctctccggatttttcttgttattccaccgtaacggattttgccaggtttctcggcttatccacatcacagccacgtcccactgccacatagtaagcaaacagctgcaacggaatgattgccagggaattggtaaagtacggattcgtctcgggaatgtataccacataatccgctgccttctcgatggctttgttgccctcgatggtaaccgccatgacaaaagcacctcttgcctttacctctaccatattactgatggtcttctggaacagagccggctgggttgccaaagccactaccagggtgccatcttcgatcagggaaatggtgccatgcttcagttctccggctgcataagcctcggaatgaatataggagatctcttttaacttcagggatccctccagggaaatcgcatagtcgataccacgtccgatgaagaagatgtctctcgctcccacataacggttggcgaaatgctggatcttctgcttctggcccagaagcagctcaatctgatccggcagacatcttaaatctgtcagcatactctggaacttctcctggtcaatggttccacgcaccttggcgaacttcatagccagcatgtaaagtgcggtcagctgtgcactgtaagccttggtcgttgcaacggcgatctcgggacctgcccaggtgtacataacactgtccgcttctctggcgatggagctgccgacgacattgacaatacccagtaccttgaagccctttgccttggattcccgcagagctgccagcgtatccgcagtctcaccggactggctgatgacgatgaccatattgcccttctgcaggatgggatcacgataacggaattcgctggccacatccacctctaccgggattcttgccagaccttcaatgacatattttgcggtaacaccggtgtgatatgcggaaccgcaggccacaatatgtatctttgtgatctcctgaatctcctcatcgctcatattcagttcttcgatgacgatatcattatccttgatacggggagaaatggtatcgttgatcgtcttcggctgttcgtagatctctttcagcatgaaatgctcatagccgcccttttccgcagcattggcatcccagtcgatggtcacgggggttttcgtgatctcttcttcgtccactgagaagaatctaagaccgtcttccttcagttccaccacttcctgattatctacataatatacggttctggtatatttcagaattgcgggaacatcagatgcgataaagctgccgctctcactcttgcctacgatcagaggactgtctttgcgggcagcgaagatcttatccggctgatcggcaaacatgatacccagcgcataggagccctctacacgatgcaataccttagtgatcgcttccaggggatttcccttataatagtagtctaacagatgcgccagtacctcggtatcggtctcagagatgaactgataccccttatcctgcatctttttcttcagtggaatatagttctcaatgattccattatgtactacagcaatggtaccggcgttattcatatggggatgggaattgatatcactgggagcaccgtgggttgcccaacgggtatgcccgataccggaggttcccttcatagcctcgcctccgtgtgtcaggttttccagaaccttaagtctcccgacagcctttttggtgttgatcttctccccatcaaaaatagccatacccgcggaatcatatccacggtattccagtttggacagaccgtctaaaatgatcggtgctgcctgttctgttccaatatatcctacgataccacacatagtcatacatcctttctgttctgtttccagtattctttgttggaagtaaaagcaaggacccattttccggggagcctgctatagttcttacctaatagataacctgcatatttacaggcacattgtatataaaaatggggcaatctgccggacatatgatgatcccgcaaatatgctgtcacatctttcaccattcgttttccctcggactccgaaggatatgctgcgaagacttccggatgttctgcctgggatacccccaggtcaaaattcctttggaactgctgtacattggtataattatgggaatgaatcacccgggcatccgccgcataagcgatcgcatatcccgcttccaccgctttcgccgcatagatcatatcttcattaaatatggtatgttttacgaatccacccagttcctcatagatctcccgtcggtatgccgcacacacattggagcagaaaaatgtcttgatccccaatgtcttaagatcttctgcggatttgatccgtgactgtgccggataattaaagcccctggtataacattccaccggtgcacaatcttctctcggcagctgtcttgcataggataccgccacctgatcccgcagcggttccgtcagttgttcgatcagattgtcgtctgccggcatagcatcctgggtcatcatgacaaaaatatctgcggaagattttttcacacccatacgtctggtgccgccatgatcaaattctcttttggagacatgatataccttaatgttctgatatttctccagaaatctggttccatagatcagctgctcaaaatatttttcctcggtgttcagcaggatcacttcatgtaccggcacgctctggctgtcaagcttatctaataatgtaaatagttctttccccggtttatacaggggaatgatcacatcgatctccattgcagagcgctccttactttcccaatctctggtctattatactttatccccgtctgttacacaagactttttcatatgacacgagggagctccggtgctctccggaagactccctcgtcaattccttttcttatttattcagataaggtgccgtatcggatgcaatctttctactgtattcctttacactgtcggttacggtgtagttcgcatcatcaaacaggaactgatgcaaccatacaacattgctctccagatccaaaggtactacactgcttccctttgcaccgatgttaccggtggcacgcatggtctcttcagggaagcctccctcgtccacaatacgatattttgtgatgttagccagcagatccagaatatccttggaatccaggctggtgtaaacatcatcgatggcactgttaaataccttggacagagtatcgtaatcggccttcttcgcctgatcttcaatcgcctgaattacttcacgctgtcgtgcggcacgcttgaaatcattacctgcggtataacggatacggcagtaagccgtcgcctgcagaccgtttagcagctgtactccggtctctgttaccggtgtgtagtcacattttaagacctctgcaataccgatctgatagttattgatatgcttgatttcctcagagtccacatcgatatagacaccgcccagaccgtcaatcacttcactcagtcccttatagcctacggttacaaagttcgtaatatccatatccagattcatgtttaacatcttaactgcctgctccgctccgccataggaataagccgcgttacacttctgataggagtccgtgccgatgttcagatacgtatcacgatatacactgaccagtttgatatcgccggtatccatattgatgctggcgatcataatactgtcgcttcggctgcccttgtacagctggctgtccttcgttgcatccacaccgaacagtgcaatgttcatataccccttcattgcttcgtcctgttgtacttcttccggaatccgaagctcttccgtctctaataccgttaccttggggccttcattatttgtgtgggtcattaccagatacaatactgctaccatgatcaggataaccgcaatctctacaccgaagatgataacctttcttctcttcttggcagcacgctgcttggcagatactctcctctgtccgttactgttgccggcaggtctcgatccggcaggtcgctgtcccgcaggtcgctgtccatttccggaaggtcttcttccgcttccggctggtctctgaccatagccgccattgtagttagaatttgttgccatcttgtcttctccttgtgttaataagcatttttattgataaatcctgtgaaaaacgtcataagaatgatcttaatgtcaaaccccaaagtccagttctcaatgtaataaatatcatactcgatccgcttcttgatggaagaatcaccacgcagaccgttgacctgcgcccatcccgtgagccccggtctcacctgatgttttaccatatatctcgggatctcttccctgaacttttccacgaactgagggcgctccggtctcggtcccaccaggctcatatctcctttcaggatgttgaacagctgcggaagttcatcaatgctggttcgtcttaagatcttgccgattccggtgactctgggatcgtttcgcaccgtccaaccctttttctcctccgctgcagtctgcattgccatactgcggaatttgtacatataaaatgatttattatgaagtcctacccgttcctgcttgaagatcacaggtcccggactggaacattttaccagaattgccgacaacagcatgatcggtgacataatgatgatgccgaacagggaaccgacaatatccatggctctcttgatcatcatatttccggtgttggtcagcggcacataccgaatattgatcaccggaagtcccatgagatcctccgtgtaaggtctgctggggatcagactgctgtagtcggggatgaatttcgtatgcacgccggatttctcacagatatccacaacaccttccagataatcataatctttcagagaaagcgtgatcgcgatctcgtccagcttgttctccggaagaatatactccagattccccaaagttcccaggactttcactcccttataggtggtccctcccggaatgtgctcatccagaataccgcataccacatatccccactggggattgcttaagattctgtcaatatactcttctgctgctctggaatatcccaccagcaaaatatgcttcagattgtatccctttttccggagtgtccgcaacgcttttctcattatgatgcgggataccgaagtcagaaatacattcagcacataaaaaattgccatgacggatcgtgaaaagttgatctcacggatgatcatatacagtataatgatcaatgccgccaggccgatggtatttgcctgcagaatgctgtaaatctcatgtctgcggcggacggttcgcttcggggaatacacgctgcaccggtaatacagaaacatatatccgggtacaataaaaggaagcagcttataatactcctgcacaggcaggacaccgatcccgggaccgtcgttcaatatataaaatttgatataataggcaaggacaaaggatatggctgtgatcagcgcatccattatcacaagaagcctgttaaagactttctggttgtcttttatcatatgggtcacccaatctgtaagtctgaaaagcttctttttaacgatttcattctacaataacggtgtttttttctcaacttaagaatttatgaagccatttcttaagatttcataagaattcgaaacacattgaaatacagctgccactggatcttcacataattccccagatgatgccaccggaagggaactttgtgctgtcttcctgtggttcctacagatcttttcagtccagctgccagtcctttcagatatagttttcccattcttttcttacaaaaaaacaaaaactttatgccaaatccaagcaaaaaaaacggcaggttcagaatacactgcaaaagcggcatattcttgccgatcacataaatactgttggcagacgcaagtaacgttttccggggattgtatctggatcccgtggaagcactgccataatgcagcacagccgccttcggttcataccggttctcatagccgtagatccgggcacggtagccgatatccagatcttccagataggcaaaatgttcttcatcaaaataaccaatctcttcaaatacggatcgtctgtagattgcggcaccgccacaggcggaaaacaccgggacagacttatcataatccgccgccggtcgtcccttcccccgggaataggcccatcccagcacgcagtaacggtctccggcatcatcaatgagctccggtctgtcccacatcagcatcttcgcactgacggaaaatattttttcattttcgcggatggcatcatataagcctcttacaaaatcggcttctgcctttgtatcattgttcagaaggatcacatatggtgtcttcgcttccctgatccccagattcactgcatgacagaatcctgtgttttccggtaaagatatcaggcgcacaccttccccacaccattccttttgcagatattccacgctgccgtccacggaagcattatcgatgatcagcacttcatatccgggggcattttgctgctctctgcacagagaagtcatgcactctgccagatatttcattccgttgtaatttggtataacaaccgttatttcactcataatggtttaaactcctccggatattccggcagatagagtaatcttcctctttgccgtaacgcttcggacaactgcagacttaaggttcggatatccgcaccctccggcaacgtagtaatattaaatatcggctgttctttcggtagtctccgaatctcggtatacggaactcccacgattttttcaaacacttccctgcattcaggtcggatacggatacaacgaagatccagtgcttccgcatcctgggacagctccgcgcggtgcagatatccgccgaatcccttcggcagtccttcataaaatacggttccgtctgccgtcattctgccgccgatgatcttgccattcttcccggacaatactctgccgcctacagctgccacatccgacctggcttcccatacttctttatattttaaccgataaaatcccacatgtctggtctctgtcgcggtggccgggatatgacggcggtccgcatgatcctgcaatgctctcatccccgcatcatacgcatattttttgctgtttggattggctgctgtggatgcctcatgacatctccagtgatacagcaccttcggaatatggagtattctcttctccgcagtctgccctccctctgtcagcacttccgctacacagcgcagtaccagatcatagtcctgggcaccgtcaaatttcggacgaaattgcaggcttttcagcaatttactctccattaccagaaaatgacagatatagttattgctgagaattaaatcgtaattaaattcttctttataattgggctcatagtatctagtctcttctccatcgcacttatcctcatccgaataagcgaaggcgactttgacacctctgtcatatgctttgatgatcgcatcagccatttcgtacaacgcatccggtgtcaatacatcatcatgatccagcagaccgatatactctcccttcgcatagggaagcgcctgattggtattagcagcgattcccgcattttctttcagatgcacatagtggagcctgggatctgctgcgacaggttctgtctcgccatccgtcggctgctccttcaggaatccctgctgcttcagtacctcctccacactgtgatcctccgtggcatctgccaggatcagttcccaatggggatagctttgttgcataacgcttgttatcattctgttcagatatgcttccggcgttcgatataagggtaccacaatactgaacgtaatcggcttctcccattttctatcactctgccttaccagctctgcttccgaacagggcacaaaaaaatagcggtctgtctctgtcaggcgctccctcacagagatccaggtttccctcaggccgttacgttgcagataatatagagttttcttaaggtttgccttgtttagctttgccacagatacctccagcttttcataaaagagcaaaccgccctgctcgggcgattcgctcttttgaaaactaatatgatttatggagcactgccttacagtactgcctttacatcctcagtcagcttctctaccttagcctgtgcatcctctaagctggttcccttgacgcccatgtagaacttgatcttgggctcggttccggaaggacgtgcacagcaccatgcattgtcaggaagctcgaagtacagaacattggacttgggaagtcctgtggtagtcttctcaccggtctccatgtcgatgatcacatcgttctgatagtcacggaatttctccaccttcaggtcaccgaatgccttcggaggattcttacgaagcttatccatgatctctgcgatctgtcttgcgccgtcgatacccttcatggtaatggtatactgggtctccttgaagtaaccgtacttctcatacatggataccatcatatcccacagagtcatgcccagcttcttgcagtaagctgctacttcgcacagacacatcactgctacgattgcatccttatctcttgcgtgggtacctgccaggcagccgtagctctcttccagtccaaatacgtagttgttgctgccggtctgctcgaagagcttgatctgctcgccaatgaacttgaagccggtcagtacctcgatcagctttacgccgtaagcctgcgtaataggtttggtcatgttggtggtaacgatggtagttaccagtgcgggattctcgggcatggtaccggtcgcagttttctctcttaagatatattctgcgatcagcatgccggacatattaccggtaaatgccacatactcgccggtcttggtatcttttgcatacacacccagacggtctgcatcgggatcggttgccagaacgatatccgcatccttctccttcgccagacgaagcgcataggtaaatgccttgggatcctcgggattcgggtaatccaatgtggtaaagttcgggtccggattctcctgctcgggaaccacatagacatgcttgaagcctaactcggacaggatacgtcttaccggtttgttaccggtaccgcataacggagtatatacgatcttgatgtcatctgccatttccctgatcacatcgggatgaatgatctgcttcttcagctctgccatgtacttgtcatcgatctctttgccgatcacttcatagagtccagctgccacagcatcctctctgctcatggtcttcacggtatgataatccttgatggactgtacttcggtaatgatgtccttatcgataggagcggttacctgtgcgccgtcctcccagtataccttatatccgttgtactcaggagggttgtggcttgcggtaactacaatacctgcagtgcatcctaacgtccgaagggcaaaggacagctccggggtaggtcttaaagattcaaaaatgtatgccttgatgccgttggctgccagacatcttgctgcctcgtcagagaactcaggagacatccgacgggaatcgaatgcgatggccacacccttactctgtgtaccgcgcttgataatataattggcaagaccctgagttgccttacgaacggtatatacgttcatacggttggttcctgcaccgatcacaccacgtaagccgccggtaccgaattccagttccttgtaaaaacgatcttccacttctgcttcattattgcggattgccagaagttcctccttggtcttctggtcaaaataatcatcatttaaccagaaattcagttcgtccatataactcattttcctatcctcctgttttatcgctatctttcaaatatctttcaatatcttcagtaaacgctctccggtgatattttaccatagattgcctttactgaaaagaattatttaacgtccgctaactgccggatccttcagtgcataatcacttcgatccagagagaaattcggattgtaatagggatctcccgcctccagttcagccttccatttttcacggaaatgctcggattctctgttgtagcgctctgccttttcgccctgatcgtccagtcctctggagatggattcgtaatgatacagctccgcaaagggagtccacacattcagaagtcccagtttacgtaatttcagacagaaatccacatcatttaaggagatcacaaagctctcatccagaccgcccacctgctcatacaggctctttttcaccaacagacaggcaccggtcaccgctgtaacattctgggtataacacagacgtcccatgtagcctaagttctgtaccgggatgcgataatgggtatgtcctgccgtgcggtgtgctcccagtccgatgaccacgccggcatgctggatcgtcttgtccgcataatacagtttggcgcctacggcacccacatcctctctctgggcatacatcagcatctcttccatccagttggctgtgataacctccgtatcattgttcagcagtaaaatatactcaccggaagcataagacgctcccagatcattgaccgcagaataattaaagtcaccatgatatgtcacaatggaaatccgtccgtccccgctgtgcaggataccgccgtcatggccgcagactgtatgcagcttgcatctttcttcataagaatcatcgccggacaatcccaacagttgggaataatagtccttgatctttggtgtggtactgttattttccacgacaatgatctcgtaattgctccaggtactgttcttctgaatcgaagtaatgcaacgcttcagatcctcaacgtgatccttattggcgatcacgatggagatcttcggatctcccaggatctgataccggatccggaagatcgtggcgcaggctctggtactggtgatctgaaaatgcttaaaaccatgcttcttcagatgatctgccacagctccctttgccgcctcaatggcataaggcttcgcgtcaatgctggctgcggtactgccctcatggcttctccagtagtacatcagtctgggaacatgaacgatcttttccgctctgtcggtcagacgcaggatcatatcgtgatcctgggcaccgtcaaatgcggtgcggaacagttcctctccctctaacagttttcgggaaaaaacgctgaaatggcagatataattattcgcccgcagattgtccggtgcatagtccggcttaaaatgcatggtcagcattttattaatatcattttccttgaaagtggtctcatcacaataaagataatccgcaccctgctcattgatctccttcacatacgcatacagtacggaaggatgtaaaatatcatcctggtcaaacaggccgatataatctccggtagccagcttgtagcattcgttggtgttataggagataccgccgttatgatccaggtgcttatagacgatacgaccattcgccttcgctgcgtactccctgcagagttcctcgatataggagtgctccgcgtcggaaccgtccgccagacacagttcccagttgggatacgtctgattcatgacgcagtccagcatctggatctggaattcccttttattgttccacagcggaaccagaatgctgatcttcggcatataagggaatatcgtctcttcttcctttttccgctgctccgcatcaggaaagcttccggttccgtaggactccatcaggctcttctggcgactcttgttgcggatcttacgcaggatatccttcggtccgccacaatgggacaagcgatccctctgtctctgtgcgaaatggatcagacttctcgccggacccgtggctttccagaatttattctttttgatccggtccagtttgaactgcaggtcctctttttccgattccagcactacgatcttgtctgccagatccgcacatttttcgtgctctctctcgtaggcttcttgataattgatctcagacatgtttttcctccgtcaaatattttcccgttgtattccacagtttcagcttactgatccgatggaccgcaagaacggcgattccataattccccggaggcagctgccctgttttccgtttcacacagaaacctcccagcgccacatttttctggtccggaagattctcctccagttcctgccgatatgcaggtaaaatcttcatggaccataccttccggtccgcctcccgctgtccctgcgtatcttcgggaagcaatactaaaagtttatcataacatgcgttatcatctcccaggatcacactgtatccctggatccgctccggccctgcagtctccacccgtgccatcaggcagtcatcctgtcttgcattttccagaagctcctgccagctctcacatctccatgccggctcctgtaaaatattccggtctgtaagatatgccggaaccacacggctgtccagtccttcccggttcagtcccatagggtaaaaaggatccactccgcggaactgaggatgcatctggtaaagcagttctctctcttccgtcaggcgtcgcattttctcgggactttcgtcgcttccgcggctcagggattcatgatgatatgcaaaacagtcattcagcaccacattgtaatatcccatttccaccagacaaaatcccagatccacatcattataggccacccgcagtgcctcccggaatccacccgtctcccggaatacctctgtccttatcagcagacaggcacccgtaactgccacgcaattcagatcaaaacgatttctgccaaaataataagacttatcgtcttccatgaactggagcttatgcaccggtcccaccggcagattgacaataccgtcgtgttgtattttcacggaatccggataatacagctttaggcccacgcttcccacataaggctgcatagcgcggatcaccattttgtccagccagtcattgccgcacacttctatatcatcatttaaaaacagcaaaaactttccttccgccagttcggctccccggttgcacatcgctgaaaaattaaattccgccggttcataaatataacggacagggacaccgctttcccggatccgtccgatcagttcttccgttttttgcttattttccgcactgcttccgttatccaccagcaaaatttcaacagggatcctgccctcagaccttctcgtcagggaacgcaggcacttctccagtacctccggattatctttggagggaatgatcaccgagactttaagctctcctgcgaataactctttggcaccttccgccgccctggaggccagttctaccgccagctgcggtgactccttcgtcagctggtaattttcccagggagtgcactcccggctgtcccggtctgcacgtacatccggtccctggattcctattccgtctgcagaaaaagttccatggaacaacacggtttccatatgaccgatggaatgacaatctctctcgaaccctccggctcccaaaaacaggcgatccatcagcggacggatctctccggcatctgtaaaaataatttcctttccggtgctctcgttctctgtcacgaccggattttctcccattctctgcagcagactgctccgtaccgcaacgacacttcccacatagaaaaaggctctgtacagatccggtgaccaacagggtttgtaccagggaatgcaacgctctcccttctcattcatcaggtcttcatcaccgtagacgatttctgcttccggatgctttgtaaaataagcgttgatccgctctatcgcattatctgccagtcgtcccgccgcctgtcggaaaatgacgaattccacaagtcccgcaatttcccggtgttccgcgctttcccggtcctgctccgctgcccactgttcataggtgaccttaagctgcgccagttctttttcgtattttttatcctgctgtgcgatcagcacctgcttcaccgctgtccgaatacccaagctgccgctcccttcttctccactcccatcatatcttttgccattgcctgagggatctgtacgatctccattttcacagacaacgtattctccgcctgccggttcagcacatctgcccggatcgtcatattgggatcctccgtggcaaatatcacgctgggatggtccgctccctcttcggatttcaggatttttccgttggtagtaaacactttcttatcctgcagaggaaccggctgtccgttcatggacagttcccgaatcttacagatgcaggaacacattgccggatccagccgcagataatgtacgttaccgtcgaatttcacggtaaactctgcctctttttccgcaacatagacattttccggaaaataagaattttcttcggaaaatccctgtcccttgtcttcatagatctgtacccgcagttctccttccgactggcgaaaacgcccgatccattcggtgggtttatagatttcgccgcctaagagattccggatctcacccatggacaatttctgtccggtgacatatttctggaatttccgctcctgctctctgtactgtcttgcctcattttccgtgatgtccagacgatctaagatccggtccagttccaacgcattgcgtctttcattctccagaacataacagtaaattgcccggaacgccagtgctttcgtatctatgacacggtcaaaggtccactcgtaatcgatcagtgtccagtgatccccgtccaccagaatattggcaaagatcaggtcaaaatctgctaccggaacttcttccccgaatcctaccctctccagatactccgcaaacaggctgtggaatccttcgatatcctgtctgtccagacattcatccatcagttccgacaacggtctgcccgatacgaattcaaattccgcataagggatgccgtcctcttctcccggatgacagacattaacgtccagccggcttccggcataacgtccttttaatttttcatacgcttccatcatatggcgcacatgcgcctcggcttcttcggtcagcggatatttccgcacgatccgattcccccggtcatcccgcaggatctccgtacggatgcggaagctttccgcacggtcgttggaatatctgacatatttcaggtccagaggcttgccgatcactgccagataagaattggaaaatacagaaaaaagcccctcttccacgattccgtcaaaagcacttttttcatcgaataacaacattctgtcacggtcgaaattccgcagattattggacagttctccccggcccggcagatatgcatccgaatagaccgtggtcatgaatttataatcgggatacggataataaaaactgcgttctcccacaccgcaggcatcgaagatcttctccagttttttccgggaaaaagtacgcacgacgccgccgttcggataattttcgattccggaaaaccagtctcccaggtgatcttccttgcagcccgcaaaatatttcagtccgtatttgttctcaatagcgataacgattcgtccacccggtgccagatgcttttgcagaattttcaggaaatcttcataaggtgtgctgccgcctatgtaagcctggccgtactcgaagacaccaatgaggcagatatagtcataatctgcgggcagatccggttccacatccgtaaaattgcctatgtggatcgtcacattttcactttcactgtgccggtacgcattgatcagactgcgcttttttgagagatccacgcaggtcaccgatccggctttccgggacagggctcctgtaatggctccgcagccgctgcctacttccagcactttgtccgtctttttgatcggaagaaaatccacgatattttcccgcagagccgacagatgatacaggatcggccagctttttctctctgcgatgatccggtcatattccacggtactgtatttttttacaatctccagaatctcgtcttccacactgccgtcacaataataatcctctccgggatacttatccagattcagtgttactttgccgatggtctctgtcattctttatttctcctccgcatcccacactttcgtgttggaatccatgtcataatagcctacggtgtttttatcggatactactgtaatattcagggcatcatacagtctgtgatagacctcaaaggtatcctgattgtaccccgtcactcccagagacagcagatattctccgccctgcagattcatcttctgtgtaaaagtcacatttttcacatcacctggttccacactgtctaagaacgccttctcgatcatggtattggtaccggtgatctccacaccgatgacatttttcacggaaaatgcaaaaatcggtgccggtataggatccataaaccggaccttcatatggatggtaaacattgtccccttcaggatggcattggtaggcacacccctgtcatccgtaatgtaaaattcttcgatctgtgcctgctttgtaccgtattccagggcattgggattctgtcccttcgcctccgcggaagcctcagcagcatctttggctacgccatccgcctttttcgcagcggctctctgcagatcttcatcatctaagagattctccgattcctcaccgacattttcggattcatcgtactgtcccaccagtacccgtttataagtatcgatcatggccttggggctgccttctcccagaatatttccctggttcagcagatagacgcggtcgcaatatttactgatactgctcagatcgtgactgacgaaaacgatcgtcttgcccattttcttgaattcttcgaatttatgataacattttgcctggaaaaatacatcaccgacgctcagagcctcatctacgatcaggatctccggctcgatattgatcgccactgcaaacgccaggcggacgaacataccgctggaataggtctttaccggctgatagacataatctccgatatccgcaaagcttaagatctccggcagttttgcctcaatctctttttcggaaaatcccatcatggtaccattcagatagacattctcgataccgttgtattccatattgaagccggcacccagctccagcagagcggagatacgcccgttgaccaacacccgtccggaagtcggattcaatactccggtgatgatcttcaggatggtggacttaccggaaccgttggtaccgatgattcccacggtttccccctgatagatcttcatactcacgcctttcagggcatagtggagcttatgtttggtctttttaccgaatccaaaagcttccttcagacggtccgaaggtttatcatataatttatagattttctggacattatcaacttcaattgccagttttctcttatcctgcataatgtcttaatccttttctttcagtgttacactgtctttatggtaccacatggccagagaacggttggcctcattgtccgcatcctcggagatttctcccatgcacaaaaaccacgggcggaactgataggccggcagctgcacatctttttccggtccggacagaattgccacccgctccagatattcctgatggaaattataagcttccccggtgtgcacataataataggctccgtaggaagaatagtgacccgcctgattgggtgataccttaaacatcataagacacatcacaccgatgatcacataataccaccag

SEQ ID NO: 11464 - DNA, 53319 bp, Unknown
  gut microbiota DNA sequence
cagggaatacaggctcggtgtatagccggtcgcatacagacagaaggacaaggcgagtacgatccccggataacgaaaacggtaatccgtgcttttcactgcctgccagatcataggtaccaacaataacatcaccatcagaaccaccggtccggtatattctggaatgtgtttcacggcttccaaaaatgatctgccgatggactccagcggtccgtaaccccagcccacataactgcgggcacgtacggaatttcccggagccgccacattcaggccgaaacctatgatatacaccagtgtagacggcagcagccacagccccgtcctgcgccgttccactaccacgctgaccagaaggatggtcagaagacacaataatccctgcaatgccgtgacgaaattgcttcccgccgtaatcatggcaagcagaaccgatgcagtgaataacagacctttcgcggttctgccctctgctctctccaggcagatggccacagacaaaaacaaaagtccgaagccatgcattcccacatagtggatcccgccgttataccagtagaagccgctctgcgcggaatagataaacataaattccgctatggtgatcactgcctgaattgccaggctgctccatttctccattcggaagactttccgcaggatcacgtgggtaaacaccatgcttcccgccaaaagcagtaacagaatgaacaccggtcctaagaaataatactgctctccccagacagccggcatcagtgtcatgaaaaaaatagaagaatacgttccctgccatgcataccactgggttctggaacaatccagtgcaccggagattgccgcccatttcgactgctcctgctctatggcagctctggcaaatcttccaaagttatagtcgtcataataaggaaccgcataaatcgtcagtcgaaacagtgggatcagtgctaacaacagcagtccgcaacagcccactgccagcagtaccctgcccggcttccataacaatatttttcttaacttttcaagagcacccttcaattactttcaccctttctgtttcccccacaacagttccgtaatgcagtcccccgttccttgagctctcggaattgtaacaatccatcgtactatagcacatctgcgaaatgcactttcagtctcttaaagatcacagcacccagtccgaacaataccaccgtcacgatccagaaatacatcgtggagaagaaatcccggaaaaaccattctttctcgtagatcgcactgcggtagccattcacgatatagaccagcggattcagcttcaggatcatgatccactccggagacagcgcgtccagattccataagatcggagtggcccacatgccgatctgcaatccgatgctgatgatctgggacagatcccggaaaaacaccactaccgcacacgtggtgtagctgagtgccagcacaaatataaacaggcaaaaactgtaataaatgatctgtgtagtgtagattgtggggtaatagccgtaaatagccgccacgatcaacaggagacacacgaaaaatacatggataaaagtagccgcaataatcttgatgatcggcaggatgctgatcttaaatactacttttttcaccagatagttgtactctaagagtgcattggtgccgttgttcagtgcctcactgaagtagaaccagggcaccagtcccgctgtcaggaaaagtacaaaaggcacttccacgccctcccgcaggggtgtgctggtatttcccatgatcttgtcgaagacgatgtaatacattgccacggttaccaccggctgcgccatcgcccagaccgcgcccaggtaagaacccgcatatctctttttaaaatcgtttttcgccagcttccagatcagatgtctattctggaataactctaccggcagtccggtaaatttatcgtaccagcggataaacgcaaagcatgccgccgcaatgacaacgcaggagatgatctttttcgccagctcctgactctgatccacagcaggtcccggattcttatggaacacgatgagcagagccatgatcactgccgctgtcacgaacagggcaatgcctgttttcttactgattttcacactttttttcatgctctttttccttcatgtactgttccagagtgccccacttggtatccttctcggataatgtcagttccataccttcggggatgggccattccacaccgatatccggcgtgttatatgcaataccgccctcatcatccggatgataaaaatcggtacatttgtaacagaactctgcgtaatcggacagtaccagaaatccatgcgcgaaatttttcggaataaagaactgcttcttgttctcctcagacaaaagtacaccataccactgcccgaaagtcttggagccttcccgcagatccacagccacatcatagacttctccgcggatcacacgtaccagcttgtcctgcggaaaatgcttctgaaaatgaagtcctctgagaactccttttttagaagcagactgattatcctgtacaaacacttccgggattcccgctgctttaagatcattgtaattataagtctccatgaaataccctctggcatcaccgaataccgtgggggtaatgatcttcaatccttcgatttcacatgtttctactgttatcttgcccatttatttcatcctcactctttattattttcattcataggtgatattcatatcgactctgccttcgataccgtccacttttcccttggaggtatactgccaggtcttgtaatatccctgatataacggcacactgcggtactccgcaagccagatatgatagttctccagtctggcggtctgcagattattgttgtaccagttgcggctggcatagacgcctgctgtatatccggcattttctaccgtccggcaaaaagcctcacataccagggttctggtctccgcatccagtccgtccgcccggccgtttcctccggcaccctccgtatcaataaatacaggataggtcagttggaaatcacggatcagctccagcacggcagaagcctcttccaccgcctctttctcatctgtagcctgggtaaaaaagtacacgcccaccggaatcccagcggctgttgcacctttcatgttggcgacaaactgtggatcctccaccagacttcccgtaaccgaaccgcggtagcccgcacgaacgatggcaaactgtactccggcatttttcaccttatcccagtcgatagtgccgttccacttggacacatcgatgccgaccttcgcattgccggatgtagtctgcagcttttggatctcggtcttgtccgcatctgccaaagctcctgccacagcactgtcctcggcatccgcatcgacttcatcctctgtcttgatcaacagagaaatatcatcaatggccagatattccactttttcttttacatgcactttggtctcggtgatgggaactttatatccttcgatgggtaacagttccatataataatcgccggaatccagatcagcaatgtagatcacgccgtcctgatccagatccttgtaatctcccagaccgtccacccggacatagaaactctctccggtcaccggtacaccttcattgtccacgatctggatacgcagatccttttccacggaagtcgccaccagtgacaggcggtggctgttatctttcgccgcctccaggatcggattcacatccggatcaaaaaaagtattatcttttaaaaaggctttcaggtcattgccgatcctgccatccgcttccgcggtgtccgtctccccggtgccctccggcacgggatccactgcttcgccgtcacctgcattctgcgctccggacaccgccgtgttctggccggatgtgggggacagttgttccctgttcacatacattaccgccagtgccaccagcaggatcaccgccatggaggccaggatccccattttccgcagcttagagtccatttgctacctctaccagatatttaccgtaattcgtcttcagcagcggctctgccagtgccagcagctgctctttatcaataaatccacgtttgaaagcgatctcctcgatacaggaaatatacaatccctgtctcttctggaacgctgccacgaaatctgccgcatccagaagtgcatcgtgattgccggtatccagccatgcgaatccacgacccagagtctctacctgcagagttcctctgttcaggtactcgttattaatactggtgatctcgatctcacctcttgcggagggctttacgttcttcgcgatctccactacatcgttatcatagaaatacagtccgggaactgcataattgctcttgggatgctccggcttctcctcgatagaaagtgccttgccgttctcatcgaactccactacgccgtattctctgggatcgcgcacataataaccgaagatggtcgcgcctttttctctggcggctactttacgaagcactgccgaaaagctctgcccgtagaaaatattatctcccagtaccagtgccactctgtcgttaccgatgaattccgctccgatgataaaagcatccgcgaggccacggggtttgtcctgcaccgcatactcgagacgcatgcccagctggctgccgtctcccaataactctttgaataccggaagatctctcggggtggaaatgatcagcacctctctgatatctgccagcatcagggttgacaggggataatagatcatcggtttatcgtacaccggcataatctgcttggatattgcttttgtcaggggataaagtctggttccggaacctcccgccagtataattcctttcataaaaacctccttaaaatacttgttttttaacacaccgaatgggaacgacgttcatcgttcccatttagcagatattctttacttttcctcatacatttcattgtagtatttctggtaatcgccactggtcacattgttcatccagtcttcatgctcgaagtaccaggcgatggtcttgcggatgccttccttgaacatggtctcgggataccagccgatctctgccttgatcttgtccggcgcgatcgcatatcttctgtcatgtcccttacggtcttccacgtaagtgatcagatcattgttgatatgtgccttgcggggatcggaatcgggaagcatctcctgtaaggtctcgatgataatatggatgatctcgatgttctgcttctcgttgtgtccgccgatattgtaagtctggaacagtcttccctgctcctgtaccatgtcgatggccttcgcatgatcctctacatacagccagtcgcggacatttttgccgtctccgtataccggaagcttcttgccgtgaagggcattgttgatgatcagagggatcagcttctcggggaactggaaaggaccgtaattgttggagcagttggtgatattggcagggaaatgataggtatccatgtatgccttcaccagcatgtccgagcttgccttacttgcggagtaagggctgtggggatcgtaaggcgtggtctcatagaagaaagcattgtcatcatcgggaagagatccgtagacctcatccgtagatacatgcaggaactttttgccctccttgaagctgccgtccggaagctcccaggctgccttggcacagtttaacatcactgcggtacccagcacgttggtctgtacgaagatctccgggttgcggatacttctgtctacatggctttcggctgcgaaatgtaccacgcggtcaatatcgttctccgcgaaaattttgctgatggcttccttgtcgcagatatttgccttcacgaaagtgtaattgtcgcgtttctccacatccttgaggttctccaggtttcccgcataggtcagggcatccacattaatgatacggatctcgttatcgtattttttgaacatgtaatgaatgtagttggaaccgataaaaccggcaccgcctgttaccagataagttctcattttctctccgttctgcgcaggtgtgcgcattttgctatagatagcgatattttaccataaaataaaggggatatcaacacggcttctccgcacttcgtgctctcgaatccgtgacactcattcgcattccggactatcgtcctacttgctcatgtgtgtttgatttgctaataaagcaccagacctgcctgcgagcagtcggtctgggctttattgcaaatcttaatatcccaggtagctgatattcaaatcgactttgccgctgatgccgctgacttttccgtcggatctgtactgccacagatcatatcttccggtataggtcggggtcttggcatactgtgccagccagatcttataaccgctcagagcgcctgcatccatcttggatgtcagccatgttttgttggcatagacaccgggagtatatcctgcattcttgatcgtgttgcagaatgccttgcagactgcggttctggtagcagaatcgatggcatcgcctcttccgccgctgccttccacatccaggaataccggataagaaatcttatatccgctgatgcggtccagtaccatggatgcttcctgtactgcttctacctcatccactgcctgtgtgaagaagtatacacctaccttaaggcccgctgccgtagctcccttaatgttagtcttgaacttgggatcctcgatcaatgctccctgggatgatccgcggtatcccacacgaatgatcacataattcactccggaattcttaaccgcattccagtcaatgctgccgttccacttggacacatcaatacccatagtgcccgatcccactaccagggacccgtcacttgcgaagttatattttgcaccctggatgacctgctcaccggtcaccttgctgccgtctgccttgaagaaatataccttaccgtctaacgtctgccagccggtatatctggcctcctccatgaggaagaacttggtggcagtgtaataatccgcatacgctgccgcccggtattggttgtcaccgatggatacatacagctgtctgccgctggtatcctttaacggtgtttttgtatcctctctgggattcacatcgcccgctaccgtaactgtaaaggtggcttttgcttccgcgctgccctccttatatgtgacagtgatggttgcggttccttttttcacaccggtaacggtgatcgttttgccacttacagctaccgtggcaatattcttatctccggaatctgccgttatggttccgcttccgctgacagaggctgttacagcagccgtagatttcggataaacggttacagctgtcttatccaaagtaatcttgattccattagtgaccttcactgccagatccagtgtcttagtctcagttcccatcgttacggtgactgtgatcttcgcatcaccggctgctacacctttcactgtgatcttaccgtttgcatctaccgccgcagtggctgctttatcattggaatttgcagtgatcttataagttgcacctgtgaaatttgtaactttaacctgtgctgttgcttcttttcctgcttctacgttcagggatgccggttccaaaacagcggtcggctttttggcttccgtaacggtaacttcccaggtataggtcttctgcgtgcttcctacctgtgcatttgctgtcggaaggatgccgcctcccatggactgcgcagccgcctgcgactcacctgaggagccaccttcccctgttcctcctgtaggtgtaccgggcgtttctgccggagccggtgttgtcggggtcgtctccggtgttgttggggtcgtctccggtgttattggggttgtctccggtgtcggtgtaggcgtcggtgtaggtgtaggcgtcggtgtaggtgtaggcgtcggcgtaggtgtaggagtcggtgtagcactgccagcctccgtatacgtacatgtgatcgttacaggtccacctgccttcacgccggtaatcacaccattatttacactggcaacccctgcattatcgctgctccagctaacaaccgtggctcctgccggcggattcagctgcttggtctctcctaccgtgatactgatcttttcatttgctatgcgcaggaatcttccgctgtaagccgtctgtttttccggatttaccacggtatcctttgacacctctctatagctaggcggtaacttcttactttctacccactgcacggtatcttccagaatagactccaccacagtatcatttttcatggtgtcctcttttgccacattgacctcggattccttcttgatctcgtttgccacatcgacctttttataagcgatatcctttctgacttctaccttctgggtaccggtaggcagtgtgtaatccttatatttttcatcggtcagggtatttaccgctaccgtatagttgccgggggtaatgcccttcttgtagataataccgtccatgtcatcatcggtccaggtatcagatttacctttgggatccgtgatcgtcacgctgaaaggtacattggagatcagtttaccgctctttttattggtaaatttgatctttagatccttctgcacggagaccagttccagttcaacggtaccaccgttggtatactcggcctcatcatattctttttgttcctcattctcatcatcgactgcattggctgctgcgatctttgcaagctttgcatctgccactgccagcataccctgctcaccgatcatctggatgccgtccagttggctgcccacactgacgaactccgatacctgatgatccaccatacgtgcgctggcatatacactgcctgtcacaatggccaagatcagcactgccacaccggttgccgtcataatgcggtccatggtgctcatgttcaggaatttggtccagatagcagctattttattgccaccctgctttttactctttttccgtttaccgccacgagcaggtgccatatcatcgtcggcatagtactcttcatcgtcggcgtaatattcttcgctgtcctggtctccgatatactcctcgtcgtcggcatagtactcttcgccatcctcgtctccggtgtactcctcgtcgtcggcatagtactctccgccgtcctcttctccggtgtactcctcatcgtcggcatagtactcttcgccgtcctcgtctccggtgtactcctcgtcgtcggcatagtactcttcgccgtcctcttctccggtgtactcctcatcgtcggcgtagtactcttcaccgtcctcgtctccggtgtactcctcgtcgtcggcgtaatattcttcgccgtcctcttctccagtgtactcctcgtcgtcagcgtagtactcttcgccgtcctgctcttcatcccaatcgtaaccatcctgtacgtcttcttcccagttacggtctggacgttttgtatggttaaataattttttcattttatctatcccttctgctcataattcttcaatgtacttcagtgtaataattccgtaacattataacattctatttccgccgcttcaagctgttcgtccatttcttcagaatttcttaaatctttctaatattgtggactttctttccgtataatagtaaaatcagaataactctttttaccacttaaaaacatatacttgaaacggagagatggaatgaaacgaaacgaacatgtgaatgacatgcctgatattgagattctagacctggaaaatgaaactgtgcaagacacagattttggaaaatctgatatttccgatgatttcgagggaaatccggatgatgaatatgaagaaaatgaccgggaagaggaacatcccgctcctaagggtatccggcgttttctgaatcttcatgtcctttttgccctggtattgcttgtggtggtaggcctgctgggttatcgcattacgcattggggacagcgggtaagccagtcggatattttcaaggacggacagggatcctatgatgacagctgggattctatcctccccctgaccgatgagaacggtaaaatgatagtaaacgatgcttctaatattgtcgtgttcggaaatgcaccctttgccgatgaccgcggttcttccgacaatctggccagcctgattgccaaggagaccggtgctaccgtatacaactgttccatcagcggaagttatctggccgcgcaacacaccaattttgattccacccttgcccctatggatgcttactgtctgtattggctggtgaatctggccgccggagttcccctggacggctattacaatgatgctgcagaagctttgggtgacaagactccacccgaagcggaagaagtcgtaaacactctgaaaaccctggatttcaacaccattgataccgtggcgatcatgtatgatgccaccgattatctgatgggaaatgctatgtataatgatgacaatcctacggatcctacgcagttcaccggcaatctggaggcaagcctcgaagtcctgcagcgtctgtatccgcagatccgtattattgtaatgtctcctacttacgcatatgcaatagatgaggatggcaattatgtaagttcggatatctatatttataatggtcgcgatgttttatccacttatgtgatcaaagaatgttattcctccaaccttcacagtgtttccttcatggataacctgtacggaagcatcacagaagataatgccaaggaatacctgaccgataacctgcatctgaacgtaaaaggacgaaagctcattgccaaacgctttgaatacttcctgaactactattccaagggttacgcttcacaggaataataaatagaatcgatgattgcatacttctgccacccggatgactttgctgtcttttccgggtggtatttttttgctttgatgttccggtctttactgcctgaaatcagttttatgctgctgaagcagtaaagtcctatgtaggagcagtattgtaattgcattgttaacgcaggcttgccaccggctagacgaactcctcctgtgcccttcttctgcctcaacgtgggcacaggtgacaggagcaagcttctctgtgcccttcttctgcctcaacgtgggcacaggtgacaggagcaagcttctctgtgcccttcttccgcctcagcgtgggcacaggtgacaggggcaagcttctctgtgcccttcctctgcctcagcgtgggcacaggtgacaggagcaagcttctctgtgcccttcttctgcctcaacgtgggcacaggtgacaggagcaagcttctctgtgcccttcttccgcctcagcgtaaatagtttatgggtatgagttacttattttgttgctgatacccacgttagggaaagtttgagggtatgcgaagcttgtttggcttctgatacccacgctgtgaaaagtttatgggtatgagaagcttgttttgttgctgatacccacactgagaaaagtttgagggtatgcgaagcttgtttggcttctgatacccacgctgtggatagtttgagggtatgcgaagcttattctatcgcagatacccaaatcgtgaaaaacgaaggtataacacgaaagctttatattccaaaacgcagaattcccggagtatgcggtgacatgtcgaagatgtttgtcggaggatgttgatattttctagaaaagtgctgaaagacagggggaaagcggacacgatgtccgcgtcagccgattgtcgacatggatgtcgactgtaggcggccccgtcatgacgagaactactcatcacttttcgtagaaaattcacatccggagaccttacatcgagacatgtgtatcgcatgctccgggagttcgtggattttgccaatgtatttcactaactctcaatttatttcataaagtaatacagatccacggtagcatctttatagatgacgtatccgtgcattctcccgaactcttcatattctaggtcttccagtttcccgaacagtgtcttcgtctccggcaggataatatacgcacattgctcttcgcgggccagtgtcgccagttcgccggcgtctatggtctcctgctccatgacatcgtagagatcgttctgtaccgtccacttgcttacgacaatattgcggccataaggcatacacaccagattgctgtactggcggacatactgtaaaagctccccggggaacactgccatgacctcccggcccgggacttcaatggcatcacagatatccactacactctggggtacatgatagacattctctgctttttgaaaatagggattgcggtagatcaggcttccggacagcataaacaggatcagtgcggccgttatccccacatatttcagatatcccctcagctttccacagagactgaccgcagtgaatgcaacgaccggtgtcaccggcagaagccacagaatccggtaataaatttctccatccgccagtccggatatgatcttcgcaaccagcggattgaagaagatcagcaacaataccaatggtacatagacaaacaggatgcggatatgttttctcttctctgtcacccacagatataacaggctcaccaggaaccagatcatgatcagtcccgttcccatatattcctgaaacagcttcaacgcttccatttccatcctccctcgtataatatcttatcccagcagcagatacattcccgcatagatcacacagggaatgcagcaggcggcgaggggcagcaataaccgaaatctcttatagcagacagctccgcagattcccgccactcccatcagcatacaggccagcaacgctcccatggtacttgccagacaacaggaaatcatcaccgctcccaacagcacccagaatccgactgtgatctttttctcctcctgcagtctgcggaacagccaaagcagcaggaagaagatcatcgggatcaaaatacttcccaaagccgcctttccctgtctgcttcttgcgatcatgaaattctccacggtataaaaggaataatcgccgaacattaccagcacttccgtgcagatcagaaataacggaaccgattgcccggaaaacaggatcctgcttcccagcagataaaatacgccatatgtcatagagatcagtaccaccggcagcaatgttttggccaccactaccgtggagatcccggtcatccgcgccagccatgcgatccagatgggaaaaggtgccagtccgtgccgcacatccagttcggtattcatgccagtataaggaatcttctggtacattttcccggattcctgtgccgccgtggagatcgccacataataagcatcatcgccgtccccatataccatcacgaccgccagcaccagctgtatcaataatagcacagcaaaaatcacccagagcagaacctctgtcttctctgacttcgctgccttctcctgccgcaccggacgcagtccccggggattccggaaccaaaataccgttgccagtacaagtaataccagaaggtataccgaatatccgatcataacatgccgaaatcgcccctccaaaaggatcaccggaacgcagatcacctgaaatccggcccagagtaacatctgtccgcttatccacaggaatactgcatttttatgaggtttatccacagctgcgaaacagtggcccacccatatgggaagtgccagcgtcagtaccgccagccatatcagacgaactacgatcatttttatattcattcctttcgcttcattcaggctcaaaacgtcatgaacatacttctcatttccaaactttactctcgttttgcgttttcagatgtttttacaaacaaattgatcttatcgccgtgtaccccttcggaaagcaatgcttcctccggttccaggccgtatttttcctgcattacggagatcactgagctctcttccactccgggtttgatcagtaccgcaacccggtccagggactgtaccgacgctacatccttacgatctgtcagttcctctgccgtcactaacagagtgctgtcataatgcatgaattccggaagattctcataatatccgactccagcataaacacagatacagggaagaagcgcatgttcctccgccaattgttcctgctgtccgtatccccgatagagatattccccatcatagccggccaaccgcagtccctgcaccgccatgatccatacgatcagacagattcccgttgcccgttctgtccatccgcatacctccgaaagctttttgcccaggtaacacaataacagcgccagtaataacgcagccagcggaaacaacggcatcacataacggtccacaagataaggtgacattctggatgccaacagaaaataaccgatcaccggtacgatcagcagactcaggattcccgcattcgatcccgcattcggtcccacattctgtcctgccttctcagtcccgtccctgcgatattcccgatattcctgatatttatgccagcctgcggtcaccgccagaaccactcctgcaagacatgccgcagcaagtaacggcccacctaccgtccggtcggccacaatgttaccaaagcttagaagtctcgccccgtaaccggagaacccggaagccagattatccaacgcctcggtgcctcttccactggaaaatacatccgctaccgcaaaaggaaacagcgcaagaccgatcactgccgccaggatcatcgaacggatatagatccacagttctctcgttctcttaccgcacagcagtccggctgccgtaaccgctgccagaaggatacaataaaacaggaaaaaatactgtgttaaaaatcccagtaccgtaacagcgatcaggcctttatttttccggtcgaatccatgatccttccacttctccacatgcacagaaagcagtgccacacacagacaggacaacagtccgtacatccggatcagcagtaccgttgccagtgctccggtgctgagtccatatagcagcactgccagaattcccagctgtctgcccctttcccgcatggaaaaaatatccgcaagctgtctgcccagtcgcagtaacagccacaacgtgatgcccaggcataccaggttgatgaaacatcccagccacggtgacagcatcccaccgaacagggaactcatggtatgcagcagcataaaatgtaccggcggatgattgtcatctttcacattaaaatagaccgacagataatcaaaggcatcttcaccgtccacggtaacataatcccggaactgttccgccgagatccataccggctcctcataaacatccgctttatacgacagaagcttactgttcccccggttctgaagcacatcctttaccgtgtccgtcagattggccactgtctccgggaagctgtctccctgaatttcctccctcacgaacttcgccagtcgtccctccggctgtgtgggtacgatccagggattgtatctggcattggccagctcaaagcttaagagttcatccatgtgataaccttccttaaagctgactcccacgcacatgatccccagacataagataactgccagaagctccggcaggatttttttccatctgttgctttccttcatgctaatctccgttccgcagacgattcctttcgtcggaggaatcgcgaatctattttgtcgccggactatttttccatgatccgatagagatagatgcggtaataactgtcctctgtctcaaacgcttcctctctcaccggttccagtcccgtattctcgctatgatcgatatacgctgccgacagcagataagtgcctcccagttctctcaggcgttccgtgtcgatctcatagttctgaaaatagaatccacccttttgaatcgtataatatccggggcattccgcactgaacagataacagcggttcccccattggtcaaaattatcctcgaggtactcgctcttggcaagctccggcgctatgatctcccggaaacggtgtttatattccagggaataattattggaatatccgtccaggcagtaaaatccatgatataatgccgccgccggatcgatccctaagctgaccactctgtaatcttccggccgctccccgaaattgtcataaatatattcctgcacctgatccagtacatctatggcataataatcccggaagctcatggctccatactcccggttcactgtcttttgcagattcggtttcagattgctctgaaagagaatctgttccgcagtcgtcacggtgagaatcattgtaactgtgaacagaatcacattcctcacgcaccgtttctcgcagagctgccgcagcagcagcaaaaggcagcatcccagagcaaaataccacaggcaggggctcagccacaaaacccggttggcctgaaatcccttcaacgctccccagccggagcgcaggctcacaccgatcccgctgtcccacagtgcggccgccgttgctataaatacaatacatccgcaggagattgccagcgagcggaaaattcttttactgtcaacagcccttcttcggatcacggcgatcaccgtaaataccgctatgagcaggatccacccgtgataatccacactgtgttgtccgccctgtaacaggttcgtcttccattgttcccaaaaagataccgcggtcagcgcatactccgccttatgcgaaaccgtgctctctcccacgccgaagatctgcaaaaacagagcaccgttctccaacagataagtgagaagcagtaaaatccatgcaatcccctgtgctgccgaatactttctgcgcagtgccgcaatgatctcccatacggcccagatccccagtaccgcaaatccggacagtaccagagaagaatttgcaccgaaaaatactacataggcataatacagcagccgctcgcgaatagatctgtcccgttcccgtagccgcagtacacaatacaggagcatcggcagtccgtattgcgacaatccgtacaccggcaaaaagggcagataggcatacatacaacctaccgtcatcgccaggaaacctaccgttccttttctcccgcttaatatttcggaatcttccgctgcccaccaaagcaggaggaacattccaacatatccgacaaagctcccggccacctgcatgcaggcaagcgccgtctccgcaggcagcagacggtataacaatacgcaggccggtgccggcatggtaagagcggtcctcgccgcgccgttcataaattccggcaaaataccactgccgtcccacaggtgtctcgcctgcagcagataagcgatcacttctccatccagctgatcgtgatacacaaatatagcatctttccccagtatcagataagggattcccattgccagcaccgccagtgctcccaaaaggaaccagacattttccggttttttcattttcctgcgttctgtcatcattcctcctgtgtcagacaatgatatgccaccgagatcattcccaccagccataacattccggggagcagtccgtttttataatcccagcatcccgcatcctgcatggtgtaccatactgccatgccaagcgccgttatgccacacatacacacgacctcccaccggatacgctttttcccggccaatgcgccgagcagtgccgcaatactccccagcaggaaccacacactgctgtatttcagcaggaaattggtcagctgcagtgctccggtcatcatcagatccacatttctggcagaaaaagaatcatacccccggccgtccagcaacagctgcagcatcacgggcggcatgacatatccagccatgtcccatgcgatctgatgtatattatcggaaaaataagccttgagatgataaacagcatacttacggaacagctgctgtgcgccgctgacgccaagtgcctcttccgcctttttctgcagatccgtcggcatcgttcccgcataccgcccggactgctgtatttcctcccagctgtacagactgcgcaattcctccggccaggtgtcgtattctctttccacccgcatatgagaccaggtaaatctgcgcatcattgccgcactcaccgtattctccgccttaccataactgccgggcgtctgccacagagataccgccgtgaataaaatccccgcgactgccgccagcagcaccagttctcccagcactctctgttttcccagctgtctgccgcggatcagatgcagaacccataccaccgcaagcggcaccaggccaagccacaggttctccacgacaaacactgtgccaagtgcccaccagactccggccgtaaacatctgtcggagagggaattttactggatcgccatccgcatcctgacgcaggatccccataagcaccgacaattccagtagcaggaaagaaaatcccggagaattcggcagcaccgccacatgacactgcagggcaaacgggcaagtcagaagtccgagacttccccacaccagccacactttcttcgtcatgccacaggatcttaaaaatacgacgccactgtaaaatgcgaacaagatctgcaccatgtacacaaaaaaaggataagggatagaacttatggattctatcccttttgcgagcatcagaaaaagagggtatccgatccccatataatcatcacatacaagagtatccgccgctctcagccacagataactgtccccaaactccgggaaaatgccaaaagctctgatcatccaacagatccccagtacgatctgtaccgaaatccctatgaacagaaatctgcctgcgatctgcgcaagcgccctgcgtgctttctgcattctactgctcctctaactcaaagaaatcttttatcagaccacagatgtagtctacctgatccagcgtcagtccgtaatacatgggaagtctggccagacgttcgctctctctggtggtataacggtcctccccatggaatcgtccgaatttctgccctgcgggagcggtatgcagcggaatgtaatggaatacgaccagcacgccgttctccttcatatagctgataaaccgtgtcctctgctccaggtctcttgccttgatatagaacatatgggcattgtgtacacagccttccggtacggtaggcaggtcgatcttcccagcatccttcagcggcttcaactgctcataatagcggttccagcaggccagtctggcctcattgatctcatctgcgatctccagctgtgcatagagataggcagcattcatatcactgggcagataggaggatccgtaattcacccaggtatatttgtcgatctgaccgcggaagaatttgctgcggttggttcctttctcacggatgatctccgcttcttccacatccttttgatcacggatcagaagagcaccgccctctcccatgctgtagttcttcgtctcatggaagctgtaagcaccgaaatcaccgatggttcccagtgcttttcccttataagtggccataatgccctgtgcggcatcctctaccaccttcagattgtgtctccttgcaatatccatgatggtatccatctcacacgccactccggcataatgtaccggtacgatggctctggtcttctcggtgatcgcatcctcgatcaatgtctcatcaatgttcatggtatccggacggatatccacaaataccgggatcgcgccgcggagcacgaacgcatccgcagtggacacaaacgtataagaaggcatgatcacctcgtctccgggtctgatatcacacaaaagcgctgccagctccgtcgcatgcgtacaggaagtggtcagcagacatttgccggttcctgttctctcctcgatccaggcgttacattttttcgtatactcaccgtctccgcaaatcttctgatttttaacacactcctgaatgtaatctgctgctttgtccacataaggcggtacattgaatttaatatctatcataatgcatcctcttttctgctatgctttggttatgttctaattctccctgcactcccgcttccagcttcccaccgctgtacccggtacattttccgttacatgactgataatatatttgggtcttcccttgacttcttcataaattctggcaatgtaatgtccgatgatccccaggctcagcatcaggaatcctccgatgatcaggatcaacaggatcacggtggtgaagccttccacagctgtccccatgatatatcgtaccagtgtctggatcgccagtaccacgctgaaaaatatggatatcattcccatgatcgtcaccaactgtaacggcagggtactgaaggacgtcgcattggtgatggcatacttcatcaggctccagaaggaccatttactctgtccgtactgtctctcctgcacttcgtattccacggtctctgtctgaaatccggcccagaaggtcagtgcccggaaaaaggtattgcgctccggcaattccagcagaacccgaaccacttttctgtccagcagtttaaaatcggaggaagcattcatatccattttgatcagcttgctcatgatcttataaaacaggcctgcggacagcttatatcccaggctctcacgccctctgtcagacttgatgccctccacgatctcggcaccctgctgccatttttcccacatctgagggatcacctcgggcggatgctgcaggtcacaatccattacgatcacggcatctcccgtggtcagctccagtccggcaaaaataccggcctccttaccgaaattccgggagaattccgctccccgcactctcggattcttcgctgcctcttctttgatccggtcaaacgtgccgtccttggaaccgtcgctgataaacaccagttcataatctatcccgtgtcggtccagcaattcgcccagtaccttcgcggtattcgcaatattttgttcttcgttatatgccggtaagacaattgacaataaagacatcttcttaatcccttccgcagttctctgtcttgacataaaggatcccatccaccactttcgtagcattcggtccagggaatgtatccatgtcaatgtattcctgtgtcatgtagatctcacccaccgtatcgggatccaggaaattcagggttgcccccagataattctgcataaatgcctgataatccgctcccttatagatgagataatctccgctgagtccgatcataccgtccgtaaccttccccgtgatatccgttgtagggaattcatcatagccgatgactcccaccaatgcaatgggaatcccctgataatatccgggagtctgctcgatccggtccaacaggcgtacacaatacgcatacgtcttctcgtactttttctccagattggaatatccgatattatcggaaattccataatcgaacaccaataccaccgccgcacacaatgctgcccattgcaataccacgtccgtacgactcccctcagcggtataccggtccgcgaacgccgtcataaggatcagatacaatacccactggtatcgcatcagcaaatgataggtcaggttcggagaaatgagcaatatcacattggtcagaagcggcatattgatgcccaacagaatcattataacgaaaaatgccggattcttccaccattttctccaaatcatactgcggatcactaaaaatactaccgttgccactaaaataatgcaggccgccagtgaaaaaatattgttcacaagaacattgccgtgaaccgtaaatgccaggaaatccacgtacattccctttatggttgccagaattcccatgccggttcccatctgctccatggaattgatcccctgataagtatccagcaccctgccctgcagcttcaacaggatctgcaggatcacataatacaatactccgccggcaattcccatccccagataatggcatacatatttcgccttttctttccagcctttttcctccatgaaatagagcaggagcttatatacacacagcagtatcgtaaaaggcaggtacgcctgatagattcccatactgaatgccagacacactgcaccggccagatagcctctgggatatttcgccgtaaacagaaccgccagcactgccaggaacagcgccagcatgtaaccatccatggtaaacacataggcaaaagtagatgccagcgccggaaaagataccagcagaccgctcaccacagtaatggtcaccggatccgtcagttccagcacttccgtaagtaccaccgccgtaagtgccagccatatcagtccgatcagtccgatcacccagggtatggtaaaataagaagaaaatccacaggcaacagttaaaaaccagcggccggaagtgatcatattctggtcaaaatacatgctgctcagtccgtcatgattcggaatatccgacagcatcaccggaagatggatcagcaatcccagcaccagcgccgatacgaacgcgatcctccaggtcgtctttatttttgtcttgctctctttcaaaagttcccacggtgtcttcatccgtctgtcactcctcgtctaacgtctgattcaggtagtccgccagtgtctgggcaatcttctcccgccccgcttcgttgggatgcaatccgtcatccgtatagagatacagatcgtcccagttgtcatgaggataatagtcatgataaatatcgatcacttccacatccaatgcttcacagatcccaatctccgcattgacataatcttccagtacgccgcctcccagatcgtactcttcacaggttacctccggtaccgtataccaggtatacggcggcgtgataaatatgatccgcagatccggataagcctcccgcagttcctttacaatactgcggatcgatccgcaatacgtatattcatcatacggatccgtcacggactcaatgggattccccgcgtgataatcattcagtccggatccgataaacaaaatctgtaccgtatcaaaatcgatctgccccaggtcacccagcgtatcttcaaaataatcagttgccggttcccggatccgtatcgtcttctgcacaccgaaatcctttaccgcaaaagatctcaccagtcctgccgcagacagagaatccttggtatatcccagtcttctctccgcatccgctcttcccagaaccgttccgcccagtcctccgttataacacttcaggcctgtcttctcctgcagtttggcagcaatggaggtctcatcccggcacagtccgtacacactgtctcccagaaataccacatcgtagggaattctctgatactcgcggtcccccgggaaaaacagcaccaacagtaccacgaaaatcacggctgcaatcgtactatatattatttttactctgctaaattctatcttcttcataaacccggcaaagttcctccgcgatcctgctggcaccatttccatctaccagatgacgttccagactgctgtaatgttcccgcagttctctgctttgcatcagctccatcatatgttccacgatccgccccggcataaggtcaccttcggtcaggtaatttcctccgtaacaggtgattttcttttgataaaaggtctctacaatcttctcctgattatctacaaacgaaaaactgatcatgggaactccgatggcggaaagctcatacatggtagaaccacctgccgttatggcaatatcgcattccctcatcagctcagacatccggcttacattacggtgcacccggattctatcatccgcaagcgccatacggcacagcgcatcataatgcggattaaagattccgctgaccacatggaataccacagctagctccttcggcactgcccgcaggatctgtcctgccagatcatagcggtcacttcctccggtggtcagaagaactgcttctgcctgttctcttacaggatattccacattgcgaaattccggtctgaggggtgcataagctgctcccatgagactgtaagccggctccggatgatacaggcttctgtccccatatatattataattgatgatcatattcaccggataagagtggaagcttttatcatcgatatagacggtccatacctgtcccgtcagccgctgtagataagcatccgagacataataactgtcgatcagcagcatatcgggatgttcttcttccatgacagctgtcagtacaggcagttcctcctccatgcggtcataccgggtatgcaggatccttacctttttgcctctgctttttaccagctgcgcagctgcatcatccgccatgacaaaacacaccggtacccctgctgcctccaatgcctccgcaatagcgaggcagcgcatcacatgcccggttcctatctgctcattgccgtctgcgcggatccataccttcatcagctgttttcgtccttcctcattgccttttcataagctcttttaaaatcgccaatcttcatattccagtcaaaatccaccttttcccggattgcatccaggtccttcattctgtgataagtaacggggcctgcctgcttcacgggtatgatgcttccttcccggatctgctgccagttctcccggaataatttctctatctcctgaagcagtgcctcataggtggatgcaaaggtttccttttcttcatcaaaatgcagttcccgctgacataaaatatccccttcatccagtcccgcactcataaggtgaatggtcacgcccttgggcgtatcctccaggaaactgaaaaagttcggactagagccgcggttatagggcagatacgaggtatgaagattgatgactctgccgggcatcagctccagcacctcctgtggaatcatatggcggtaattgaagctgatcatcagggaaggcttcatctgtgcgatcatctgtgccgttactttattctccacccggtatacctgttctccctgctccttcagccaccggtacagaccgtctgtattcgtattattggtcaaaaacagaatactgcccttctccagggcatcaaaggtaataggcgttcctctctccatggcatgatccgtccgcatccccaggacatctttccagtatttgggtttgatgccgtaaccgggacggataatgcggatattttcttccgtaagctctgcccctgcgggtatatccttcactgcaaaaatagatctgcggaacactctgctgctctcttcctgtttttccacgccgtaggtcggtgttcccagggcagcctccacattacggatatcctgcaccatctgcttatattcttccggtgtcatggagaacgaagcatccggattctcgatctcgcggcttaagcagaaatgcttctcaataaccgatgcccccagggccaccgccgtcacagcactcatggaacccatggaatgatccgacagaccaatgggcaggtcgaaacgtttctgcatatcggtaatcgtccgcagatacatctgcgccgggtctgcgggataagcgctggagcattttaacagcaccagctgtctgttgccggtgtgatataccgtctccacagcttcccggatctcctccagcgtagccataccggtagacatgatgatcggttttcctttcgatgccacgtactctaccagcggcagatcgatcatctcaaaagaggcgatcttgtagaattccagtcccatatcctccaggaaatccactgcagtattatcaaagggagtggacaaaaagtcgattcccaccttatctgcctctgccttcagctggggctgccactcccacggagtgtatgccttaccgtagaggctgtagagattctcgccctcccaggtaccgttattcacctgaaaatatttgttgtggcaatcaattgtcagggtatccggcgtatatgtctgaatcttgatacagtccgcaccgctttctttggcggcatgaatgatctcctttgcacgttcaatactccccgcatgattcgctgacatttccgcgatcagatatgccggttccccgcttccgatcagacggtttccgattttgatcttaagatgatccttttctcccatactttgtatcctcatgccttccccagcatatgatatttcatctctgccagtttccagtcctcttcattgtcaatatcctgcacctctgtctccggaagctccatgggtactgttttctccatgatcagattctgctgtgccaggaaagacgacacccgcagacagtagaactgtcccgcatcatgataataaggttccagatcctgggaacgactgttacgatactccggccatttgaacttaagatacccttccgcatcctgtaccacgcagcgctggggcggaaagctgaaacgtacgaccggaagcagggtgtccccctttttttcttccaacaggcgcattgcctccgacagcctgtcaggtgtaataaaaggagcggtgggatagatacagcacaaggtatcaaaatgttccccgcgtttttcatattctgccagcacttcttccagcacatctttcgtagtggcataatcatttgccgtcttctcactgcgcaggaaaggaacttctgctccatattttcttgcgacttctgcgatctcttcatcatcggtagataccatgacccggtcaaatactcccgaagccagtgctgcttcgatggaatacgccaggatcggctttccacagaattccttgatatttttatgagggatccgtttactccctccccttgcggttatgatcgccactgctttaccggctgtctgcattacaaattacctcttttcttccagatccactgtttcatacgatagtaaacaaaaaataaaagatccgatctgctctgcatccggatcagcttctgttccggtgcccctgtgcgctccagatagtagggattctgtgcaaattcagggaaacgttcttccacacccttgcggagctgtctgataaaagccagcttaggatgtgttacccctcccatataagagaacagggtaatgacataatacagttccgtataacgatactcgatctcccgtgaatattccgtaaggaaccctcttctctcacattccgtgtataaaagctcagctgccttcatgcgatccctgcatttttcttccgtaatatgatgcactgtggataccgcgtgctgataataatagtaaagcggctcctccactctcgcaaaatgccggaaatacaggctccacaaaggtcctgcgcaattatcctcataaaaaatatgttccggaaaatccagccggttctcccggatcacactgtgcttataaatcttcaagaccatgctgccgggccggataaacagacttttatgctgttcctccatcagttccccggtctgatccggtgtattgttgacaatcacttttccgacggtaaaggtatgatgatccaccagactgtaatcgcagcccaccagatccgctccggtctcctccgcttttttcagaagcttctcataataatccggagatacccagtcgtcactgtcgatgaagccgatccattcgccttctgcgttttttagtccaacattcttcgcaccaccctggcgcagattcaccgcattgggaatcacacagatcagttccggataacgtttctgataatctaacaggatctccagggattcgtccgtggaagcatcatccacgcagagaatctcataatcatacactccccggatggtctgtcccaccaggctgtccaaacaataattcagttttccctccgccgccatattgtagacgggtacgatgatgctcaattttttactcatagcttataggcttccccgttcgattttcgccctgccgtcttctacccggtagacaatgtcacatttttcgatggtctgtaatctgtgggcgataatgatcagtgtcttacggccgtgcagtctgttgatggattccatgatggcggcttccgtatcattatccagtgcggaagttgcctcatccaggatcagcacctcaggatcgttgtacagtgctctggcaataccgatacgctgcctctgtccgccggagagacggataccccgctcgccgataccggtctctaagccttccggaagcgtcttgataaattcatccagctgtgcttccttcaatacttcccacaatctgttctcatcgatcttatcctcgggcacaccgaatgccacatttttgcggatggtatcgtccagcatgaagatcatctgcgggatgtagccgatatttttcagccatttccggtaattgccggggtccttcacatccacgctgtccgcgtagatatgtcccgtactcggctccagcagtcccagcagaatatccaccaccgtgcttttgccggcgccggaggtacccacgatccccacggaagctcctaccgggatcttcagatccgcgtgatcgaagatcagacgctctgtgttgggatacgcatacgtaatatccttcatctcaatgctgttctttacatccagcttctcctcttcatcggtagcaaaggacatgtcaatattctgtccgttgatctcatcctgcagattatcgctgactcccatgaagaagggttcaaaataggcaatggagttgatctgattgtttatacggttgacacagggcaatagcaccagtgccgctgctgccagggttccgaacaccgtcagcatattttccgtggatactccggtcgccacaaggaagatcatgtagcccaccatagtagccacacaggcagtctcgatcagcagcttcggcacctgattatacaggctgtaacgctgtacggcatccacatatcccttaccgcacttgcgatactcggatacgaaatactgctccttgccggagatcttcacttccttgatcccctgtaccgtctgggagatccatttgaacagaccgctgtaatagtcctgattgtccttacccgccttatacatgacaggcttcagcactctcttgatcagccacatgagagaaagcaataccactgccatcagaatcgtcatggttccgctggagataaagcagtaactgataacgaacaacgataccaccgtatcggacagcagctgtaaaagtgccaggatcagggcatacatattattaacatccgaagtgatgcttcgctgcaccaccgcggtatccgcattcaggtaaaattcatagccacggcgcagatagttgcgcatcatgcgttcggaagtgtaaaactggttcgtatagacaaatgacaatgtcagcttctgctgtacataagtaaacagattcttcactacgaataccaggatcagcagtaccatgacaataatcgagaaggtccggtagctctccactcccaggatctcatagcaggcttccgccacccggctgtgctgtactgcctccggatcaatgacgatctgcatgacctccaccagcatacccacaccggcggtctgtaaaaatgcgctgatcaccatgaggatgatcagccccaccatggttctcttctgttttttgtccagcaggacattcattttcttaattatctgtaacatagagttctccagttctccggttcttcatttctcagatctgttcattctgtctgtggatcaggggatcttcataggcatccatgaaatccggtcccagacgcaccgcttcctctgcgaagggcagccccttcacttccgtcagcactcccactacttttttaaacctcagtcccgggaaaaaattcaacatttccataggcacggtagcatcgaactgcggatactccgggaacaatttccggtaatccagttcatctctgggatgcggtttaataaaaatacttccctctttttcgtacattttgataacgtcccggaatatcttctctctgacatccaaagtacacagaggatccgtaaggatcagtattttatcccctaccttgttgctttcagcaatctggtgctccagctcttccttatttttcacaaacgcctgaaggatcagctgcttgtccgcctccgtcaggcggtccaccagctctttcctcggctgttcaatgtatcttggacagggataatgaattgccgagatatcatttacctccatatccatgcagtatttgccgtaaccgttctgtacaaagatcagattcagatacctggataaaaaggccttgagcttaaaatggcctctgttgtcataccgggcggcatcgaaattcttcagacagttcagaccgtcctccactgcatgataacggatatgattctgattcagataatacccgatggggtcggaatcgcaatagacataaatatccttgtattccttcaggttcaccggtacgtaaggtgcctccagtctggcatattcccgcgtaaaccggatacggttcttcagattccccaggaaattcccggtatccaggcggtattttgccagctccgggaaatagtcctctctcttctcatcgaactccaggacttcctcaaacaggcccgtgctctccacccgggccttcagattttcaaaattgttggacattttggacagcactaaagtagcagttcccgccttcctcgcaggatctgcctctgcccgtatttttaactctttcaaaaacgtcacatatgcatgatagtaagtgtgacatatataaattctgtctttcatataccagtctctactattgttacgtatattactttattgttataaccatttggacttactataacacacttttctcttccagtaaaaaatcttatgaaattttaagaaagtgaaggtaacagttcagccatcacagttcatacacccagattccccaataagagtcgtccgtttcataataacctacgagctccagacccatgcgttcggcatcaccgatctcggcgccggagaacaggtattcacatcccagttcccgtaatgcatccatatcgaactccagcccttcatacaccagggtattgccctttttcagttgcatataattaccggtaatactgttgaatagataacaccggtttccccacaggtcaaagtatacccgtacttcctcatttttctccagctctgccgcaataacttctcgaaagcggtgcttatattccagagaataattattggaatatccatccaccgtataaaaaccatgcatcagggacggagccggactgatccccaaatgtgccacacggtaagtactcttgtcccggccgatagcatcgtctatttcctgcatcagatcctctgcaaaccagctctcccaggagatatatcccgtgacacctgagccgttattgatctggttcacattcagatacatgcctgaattcactttgagcagctgaagtgtcggaagcagacagatcagaatgaccgcaagctttcccgcctgcatccgcgcatccgtatgcggcacttttgttctccatagcactgccgctgcccatgcgaactccagataccatgctgccgggtacagccagtagacacggtgcatctgaaaataatgcaaaaatcccgtggcattgtttttccagtcaaccactgccgataaatgacaaaatgcataaaacagggctatggcgatcaagaataaaaagttgatcacagctgccttataaatgttccgatcggtctcttcctttttacaaaatgctcccaggatcaggaacaaaataatgggcaatatcaaatatttatgtaacgacagtgcgtgctgtgagctgtctaggaaaacgctccggaaggtctcaaaaaacggcgttgcggaggatatcatttcctcccggtggctgatataactgctgttgccaatgagtatctccaggatcagcgccctgttaacgatcatatacgttaacagcagctctccaaatccccatagtggccatgaattctttctttttaggatcacagcgatgatgatcgccaggagccacagacctaacaccacatacccggtacataccagatggctggtcaacccaaacaacaacgtagacagcacagcgaaaatgaatctttttcgcttccaaaaacataaaaatgcatatattaccaagggaatcccaaattctgtaagaccgtagatcgggtataaaggcaatacacaaaagcagctcccggtgatcaccgccaaaatactactctgcgtactctctttcaccaacaaatacattccggcaaaggcaatcagaaagcaaataatatattgcagcagaaatgcgattctgggtgaaaacagaatatacaacggaaggaacaagattgcagaaggctgcatcccgctggcattaacaccaccaagcatttccggatatacattacttccatccaggaaatgccttgccggaagtatataattcataatactttcatctaattgatcgttgatctcaaagatacaaccctttcccagaataaagtaaggcagaaaaaagattgctgcaatgatcagccccagccaccacaagggaagctgatcgatgcgaagcagttctttttccactctgttatatgctctgattaaaatatttttcactctgctcattctgtttactcctgtaggtcaagcttccggtcaaaataataaatacgatattttcccccatgtgatacggtcagttcctcctcaggtacccctatcgttccggttttttcttccagatacggcaggatttcctcaagagcctctaccccgaaatcatacaggatcacataaaaaccattttgatcatctgtaaaatactgcttcatggcctgtttcatgaccggactataggaaaaccacgtacctgataccatgtaattatgaggtccgttaaatcgattatccaataccgcccccatataatagctgaacgaaaaagaatccatcagataattgcattcgggatggctgtctacataatcgtaaagctccaccaatccctgcatatattgttccatgccttcattctgacttttcaaaaaacgatactgttgtctgccactctgatatcccataaatatcaggatcatacacgcaaaaaccgcacctgcttttttccatatgctcttctgctccacggtcacgattgccaccagcatgaccgtcaggtagattgcagcttctccaaaatacaagggcagaatcactctgtcaggcattcgccctttatagatcagatatccccatatcacaaaagaccccactttgaccaaagacaccggtatcagataaagatattgtccgtaaataactataagaatacctgcaacaataaacgaagccactgtaattctgtttccatcccacacaccgtctttcagcatcacctgctgataggttttcaagacttccccaatttcaggaaatctgtattttgctttggcatatgctgctattttttctgcacattccgtattgagatttccatctaatatgatatatcccttgtaagcttcatactcagccctgctcacaccatactcgctgagaatgtctgagacctcttcatattccggttttccataataatcaaacatttctgttctggcattattatatcgaagatattctttccattccgcattatgatagccaactgcagttcccagctctcccagagcaaaacagcctatgactatccccagggtcagaagcagaaatctgatcttatcccgcacattttttctcttatctgtcagaagcaatccggcaattgccgaaagccccaaaggctgcagcattagcatagcatctcggcggagcagacaggcaagcagcataaaaactgcaaataccaggaatttccaggaatccctgccgggcatatatattgcacacagcaagtaaacgtatcctgcaacagccagcacgattgccgtggatgtatattggatttttgcaacggaataaaaattctgcaaaaacaaggtcattacgattccgatactgatcagaatttttaatttacttctgccaagtttgatcaccgtgtcaaggatcaatacataagacatcatgtgaaacagtaaaagcatcagaccataccacgggatctgcagcgtaatccggtataaaccggacaaaagcacagacagccaataatttacatataccgtatgcgcatccggtcgtcctccaaaggctccactcagtatttctgtaatatttctgtcgtcattactttcaaaatatatccccgcacgaaaataaaccgccagaagcatagcagcagcaatcccgacagacatgccaaaacgtgctaactgatatgctcgttctttctctttagaaatgaacaataatatagtcccccttatccacgatatatccatcctgtggatattccggcagatccagtgactcttcttccgcctccgcatatctgtcgatatccccgcaatccaccagtgaatgcccgtgcattgcgaaaaacttcaccagctccgcatcggaatcaaaggcataacggccccagtcgatgaccgacaatgccggggtctgcgccacccacacacctctggaaccacgattgtacttatccagcagatccggatcgatgagatccgtaagtcgtttcatcttataatatttgctatcgccgtagcttacataggcatccttgacgatactgtaaggaatttcataattccccgtgaaaatcaccggctttgatgtatcgaaatcccgctccagatccagtgcgatctgatcgaccgtctgcaccgccgcatcgtatttctgtttatcaatgtagaaccatttcgtcatatccatgcactggttccagacgatcaccgccagcacaagaatcgcaatcccgcgcacgccacggcaaatgcgactattttgagacttctgtgtcttccgttcccaccatgctgtcaccttccataccgcatagacaaaaagcagcactccataaccgcagaaaacaggcaaaaactgtgccgaacggtacagcgttgcctttccttcgataaataacagcgaaaatgccgccagataagccgtcggcaggaggatcagggcccacaggtctctgccgcggatcacccgcaccagggtaaccactgtaattacgaccgccgataacacaaaaatccggattggcagataagcataagcaaacacaccgtacaatacaaaagtacgtttcaggatcatgatcagctcgccgaaggctccggtctgcaccatccagcctaacatctccgtcacggaacgctgtaccgcttctccctgtaaatattccagatgaaataccttcgtcacgacgacgatcatcagactgcgcaataggattgccaaaagtgccgctgccgcaccggcggccaatactgcaaagatacctgcctccatgccacagtgcttcactgtgctgttctcaggcctgcttttttccgacttttttgttcttccgctgcagtgtacagtttccatgcctatccgctctgccagcagaagcaataccaggcccgccagccacagaatcataaaggactcataacagcccatggcaatccataaaaataccgcagctgccgcaagcttcgtcaccgccgggcagtccggcttctcccggagaccggatcccttgcgctgcttccggatactgagctgccactccctcatacagcacagactgactgcacagctcagatatccgatggctatcccattgtggagaaaatatgtgaatacttcgctgatcaacggacaggatacaaatactgctgcgaaataagcatatcccgtcatcgggatcttctcaccgaacaccgaatagaacaatgccgaccacacgattgccgccgcgatcagaagaagtaccgcagcaaaatccgttacaaacggggcaaattccgccagggatatcactttattcagcagaaacaatacccaccgccccacaatggcgatcagtccctcttcaaaatagtataaagatggggtgtcatcgataccgatggtaacatttgttaccttataaccgtacgcacatactgctgtaagcagcaggattcccatatacagccggttcccacatagcttatgaagcatcccattccagtctgctgttgttttcgtttctctgtatttctccattcctttttgtctgcccctgttcctgatcttattgctgctgttctatcgtcttcggctctatgcgataaatcacaaaatcataatacatataatggaattccaacgcttcctcgtagtcatattcgtcctccagttcattgggtgttcccccctgaaaacagatataccagagattctcgtaggaatccagctgactgtaatccgtgagtgcgtccgtattgacgaaaggaagactgtataatttatagccgatgatataataatgcagctccggatgatatacattcaggaagatcgtatgcgtataaggtccgatgaccgcatcgttgtccgtcatctgtgtctccgcaaaattctcatagatctccaggcctccgtcgtactccagacggatctccgagctgtactgaagcaggaagcacagacaggccgtaccgaggatgccaccggcccaccattttctcccgtttgtgccactgctctccaggatctgtgcaaatcccaccgcataccacagcatgacaaaccccatgcccgggaatgcataacgccccatgaagcaattattgacggtagcagagatcacccctcctacgatcccggtgaaagcaaacgccgctgccccgatggccggagctgcattatggtgctgacgtacccagtccacggcaccataactcaatatcaggcacagtgccattcccaacagcaccacaatgccgatgggtgtctccaccgcggaaaaccattccttgaaataatccatcacagaattcagggtcgccagttctgcggtagaaccgtcatcataacgcatccgcaggatgaactgtctgcaggtcaccgccagccagggggagaacacgatcgccactgtgaatccggagatgaaaaatccctttaccagatcctttctgcgacagatcagaatcgccgccaggaaaagcatataaaataaaaaagtctgtatcaatgcaaacgtatgacagtacaccgtgcatatgctcgccacacagaacacgatccattttctccgggtcgcttcccgaaaaatatcataagccgcaagtcccgccagtgtcaggaaaaacaatgccatggcatacatccgcacatttcccgcctgcacactgaaaatgggcatcaacagggaaaatgtcataaaatataccgaaatcttccgatcgaacagcttcgccacgtaatattttcccagcagcatatacccggtcataaaaagtacagacaaaagtttcagtgaccagaaatgcgttcccccgccgcacagatgataaaacagcttcaggatgacataatagaacggcgaatgatcatccgtcgccgtaatatagatcagccgtttccagggcagagataccatcgacgctgaatacgcttcatcataccagaggttattccggatgccgaaagctccccagaggagcagtgcgatcaccggaagcgcatgccacagcaacagccatccttttgtccgtataaaattatctgttttcctgctgcatgtctccatggaaccttctgtccttccgcttcctatcttcttatattccctgacttggctgccagcggatgattatgtgctccgcactcccacaatcctcaatatctgcgatacagcaccatatccgcatctcttcccagttcttcatacccttgttcgcggcactgcctgtcgatctctcctccgcttaccgtagccagatatctgctctgaagctccgtcagatgctccagaagatattctctctcacagcagctgataccaaagccttccggcgccccatacagaagctgccatttcagattccggttcccctccggcgtatcgtccccgaaggtccagatcaccacattatcgtaattcggtacctgatcggtattcatgaccagcttctctgcgaagatctgtctccagtattccacctgctcttcccggtcctccgtgacatacggtacctgataatcataaggctccaccgccttgtaactgtacagatacaggaaagctgctcccaaaagcaccgctttcttatagtatctggtctggagcatactcacgatgaaaattcccgccgcaataaaagtcaggaaatgtttgcttccttccaccattttatacatcagcagatgggcaaacagcatcgcgatcagactgaaggcgaaatgcacttctatgatcagctggttacgcagcccggtctgtttctccctgcggtatgctctgagatccagaaaactctgcaccagcagaatggaaagcagcaacagataaccgtcaaaaaaggctccggaagccaggccgctcttcataccggacacacaatgtctgtagaattccaggcccttccagtgcagtgttccgaggaaattccggacaccggcaccgatgccgtcggtgaaaaacgtcgtgatccagtccgtatagaacagcggggtaaaatattccgcacccagatagtgcttgatcagcacatacaccactcccgtgacagccaccaccagagtggaaacgatccatccgctcttacggcttctgcgaatccggaaaaagcaggccagcagcaaaaacaaaagcatgtacggccgcatcagggtcaacaataccgagacaataaacatggcaatcagcttgccctttgtctccttattcagataggaaaaagccagtccgtaaaacaggatcagcatgccaaagcagatcacctccggcataccggacagcatgtatctggtgaacagtgtgtacaggctgaaaagcaccgtcaggatgcccagctgtttccaggtgggtttcaccagccatacgaacacgaacatggtgatcgtcagcagtacgatattacagatcaccggtgacaacagattccagccgaacaccagtccccacaggatccagggaaataccagcacgggactccaggctgcgaaagacagctgcagtgcatgactttcgttaaatccgaaatatcctctgggaaatccgtatttcacaatgctttccacctgtttaaaataaaacagttcatcgttccattccgaagaaggcagatacacctggccgatgctcctcccctctgccgccgtccgcaccagacagcacaccacgggaagcagcgccatcaataccgccttcaccagtgtcagatatcttttatcctgtttccaccagtccgtaaattgctctttcttcataaaaatatttctctccctattcctccagatggatcttctcacggatcacatactggggagaattattcatgctgatgtagatacgtcccacatattctccgatcagtcccagcatgatcatgatcatgccgccgaaaaataccagtgccgccatcaatgcgctgaagcccatagggacattgggattcaccagcctcttgatgatcgtatagattccatagagaaaacccagtcctgcgaagcccacaccgagagatgtggcgatccgcagcggtttcacggaaaatgccgtaaatccgttgaaccacaatcccagcagcttcttgagcgtataaccggaattgccctcttcccgctctctgtgacacaccggcacgttggtaatgtttttcgtggcacggagcaccagtccgatgacataaggatacgaattctcatagcggatcatatcctccaccacgaaccgcttcaccgcaaaatagctggaaatatacagattcgcgggcttgtttaacatcatccgcgtcatcagctcattgaccttgctgcccagattccggaatgcggagtgctgcttgtgttcataactggcatagacagcatcaaagccttcctccagcttatttagcagcttatccacttcatcggcgggggtctgtccgtcatcatccaggcacaccacataatctccgtcggaatgtctaagtcccgccatcagcgccgcatgctgtccgaaattcctggcgaatccgatgcccttgatattatcgtatttttcacacagctcccggatcgtttccatggtattgtccggggatgcatcatttaccagaaaaatatcataggtatactgtgacagctcctccattttctcccggatctccgtaaccacatggggcagtgtatgctccgaacggtagcaggggattacaaagcttacttttttgattctgtccatttttgttgctcgctccttcttagtctgccggattcacggctgccatccagacaatatcccggtacacaccgtcaatacacacatcatctcttaacagtccttctctgacgaatcctgccttttcatagcttcggatcgcctgcaggttctccgacaatgcccgcaggtagactctgtgcagcttttccttctcaaaacagtaccgtagcatcagcttcgccgccgccgtgccgattccgcggcctctggcgctctcttccccgatgaagattccgtactccgccttattgtgatgtctgtcaatatcccggatatacacagatccgaggggagtatccccttccaggtcgcagatgatcatctgcaccacatctccggtctccacacgggtccggagccagtgctcatgggactgcctggtaaaaagctcctgatagataaaatttttacgcacggcatcgctgttacgccatgccacgatacggtccgtatcctcataggtcatgaggcgcagacagatcccggcctgcgtatcccggtagttctcagaaattgctttcgaggttttattttccaatcttttattgtctgctgttactgtctgcattgtgatctccttactgtctgtaagcattacacagctcgatgactctccggatctcatcctcccgcatctcggggaacagcggcagtgtcacacaatgtgctgccaggtattccgcattcgggcagtctcccggcttataaccaaggtttgcatatgccttctgtaaatggcagggcaccggataatgcatgttgcattccacatcattgtctgccatatacttcacaaaatcatcgtgatccggtaccgtgatgacgaacagatggaacaccggtgtggtgttctccggatgatgctgcatggtgatcagaggattcgtgatctcccggatatagcggtgtccgatctcctgacgtctcttcgtccactccggcaggtatttcaggctgacgctcaataccgcaccctgcagtccctccagtcgataattatatccaatctcatcatgataataacgcacatcgcagccctgatttttcaggcggtcaatatgcttatagtactcttccttctcacaggtgacacttccgccttctccgaaagcatagagatttttgcccggatagaagctgaagcatgccaggtctcccagggttcccacatttttcccctcaaactgtgccccgtgggcctgtgcgcaatcctccaccacgaacagaccgtgacggtctgcgatctcgcgcacgcctgcataatcgaaaggctgaccgtagagatggacaccgatgatccccttcgtcctctccgtgatcttcgcctccagcacggaaggatcgatctcccaggtatccggcgtacaatctgcgaacaccggcgtggctcccgtatagctgacgccccatgccgtcgcgatataagtattggcaggaacaatgacctcatctccggggcctacgcccagcgccagcatcgccagatgcaatgcggaagtaccgttgttcacaccgctggcatatttactgcccacgtaagcagcaaattccttgtcaaatgcatctgcatatttgcctccggaaaaagctgtctcacgacataccttctcgatagcttctctgtaagcatcttcatgggcttttacatccctcgtcagatcgattctcttaatatgtgccattctgtcgtccttctttcgcttatatgtgctttttgatataaaactcgttgaataaccttgcgatctgtaccagataattacagatcgtcttgaataccttaacggtagtattatagtcttcctgccactccaccggataatccaagatcttcacgccccgtttctccgcacgcagcaggaattcgatcatataaaaccacccgttatcccggctgcagccctcgatcagcgagagtgccgtctctctgcggacaaacgtgaagccgcagatggcatctgtggatttcatccgtaaaaacagctttaacagaatcaacagtccctgcgacgtaatcctgcggtaccattttctgcccctggtatcggattctctggcaaaacggctgccgttaatatactggacctccggctgcgtctcgaagagatgaatagcctctcccagatgcctgatattggtggaaaggtcgatatccatataacctatcacatcgccgtggcttacttccacacctctgcggaatgccgcacccacaccgcggacattgattctctcatatcttactttatcatattttttacacagcttttctgcgatctgcggtgtctcatcctcggaaccgttatccacgataatgatctcatagtcttcaaaagcaatgctccgcagatattccaccgtgcgggtcacaccgttctctaagcgcagacgttcatttaataccggaaaaataatcgtaaacatcattttgtcagtttttccactccttcgattacgtagtgctgtctcttaaagctcatattcaggatcacggacagatatttgaagatcagtgtcagcatgacggacatcatgaaaaatccaaacgatatcagcgtcatcagactcatccagccttccacgggacgtaccgtgctgaagatcgaatacacgatccaggcaaacatgatcatcatcacggagaacaggatcacactcaccagcatagagaacttctccaggacattggtgaaaatgatcagcgtatccagtgcaagactgctgcgggtgctgcgctcctcccggttcctggcactgcctgccttctttttattctcatagaccagcgtatccgcccttagtccgcaattcatatacatcgccttgcggtaaggaatgtacgcattcatctgattcacacggttcactgcgcggcgggatatgatacggaatctctcctgacgcagcttatgggtattacggcttcccagattatatactgcatagaacagccgcgaggtcagtgccacatctctccccggagcggctgccaccacatcatagccttccagtgctctgtcataaacatccatgatcagtgacggctcaaaatccggcaggcatctgtcgaattcgaacaggaaatctcccactgccaggtctcttccggcattcatggccatctcgactccctgataaaagcttaaattgatcatgctcaccacatgatttccactgctttcttccagaaatcgatggatctcctcgatggtattgtccatgcagcagtcattcacacagacaatctcatatttttcgaaatgttcttccatggtgccacagaccgtattcaggaaatcacggatgtgtgcaccatcgttgtgcagatacagcacgcaggatacaaaatttttctctttattcaggattgcggttctctccataacgtttcccctatatctattattatttataaccactcggaatggttatcctaatctaaaaaaggatccaggtcatataccgtgttgatcttgccggataagacgctgatgaaggtggggctctcggataatgcccggatcacggtaggtctcgaatcatcgatctccgaagccttcaggatcggcttcatggagaacagtgacttctcataactgaagctatattcttcccgcagatactttctcgccagcgtagacatatactcccatgcactctccggtctgccgggacaatcgttgcaattccccagccagccgcctctgcagatattgccgtccgcccccacgcaggagaactgcggtgtagcatcgtagcttgtcttatgcggtgtaaaagtcaccgaagtcagggaatgatatcccgtcctgccgaaaggcataatggagaaaaacggtccatccattactgtaaatccgatgtccctgagcttgtcacctgttttgcacaggatgatctcacataattcatacttcagtccgaagggttctgccgtgactccctttaccttttccagcacctgattcacggaagcgtaagtggcattcagcacaaacggtgcccggtatacctctctatggccctcatgcaatgcggtgatctcatagcagtccgattgttttacgatctctgtgatctgccgcccgaagtgcagcttcactcccggatatttcgcgatctcctccatcagatgatcccgcaggatatgggcatcgtaggtatactcctcggtgagaaaagctccgtcgcacagccccggctggaaatattcttccacaggaagcgccttacagggaatcccgccatcccggcagaacttcaaaaattccgccgcatccgtccaggaaaaatgagcggaagtagcataaatctgttgaaacgcggtatgaagacagaaggaatagtcctctgtaaaacgcttgaaatatccggcggatttcatggccgtagacagagacctcgggtagtgatatcccatgtgtacccgggcctgattgatatatgtggctctggtaaaaggagcctcttccatctccagcacctctacctgttgccctctttttgcacaatacagcgccgcatacaatccatacagccctgctcctatgatcagcttgtccattcctctatcctaactctgtctctgttttgtctctgttttgtctttgttttgtctctgttttgtctttatctctgatctgtctctgttttttcattttccgtcttccggccggttccgcacatcagtaccgccagatacggcagtgccagcatcaccggatagacatatcgcatctgcaccgtggggcctaacagcatcgtcccataatatccggcgatcaccgccagtggcagacagtagcgctttctgtccacgatcacaaggatcgccgccagcgccagatacagccacagataactgcccggcacgaacagatatttcagtaccggaagcttcagataactgttcccgtccgcccatgcctccaggcagttatacagtcccggccatttgctgtctttgtagatccctctgttgttcagggtatcttcttcccatcgtgtctgtatatatccgagcccctctctcccctgcacttcgttcaccgccgcatgggtgacatcaaagggagataaaaatcctgcatccactgccagtgcggcattgatcatatctccgggataaaatttcagcagatgaaaataggtccgcaggaaatctcccgagcgataacgcaccacatacgtgttggtatgtcgctttaccggatccgcgatgccgggatcataatccctgtaagcctcatccaatataaaatcattcaccagtgcccgatcctgttccgacatggtaccgtcatcctcaggaagtactcccactcctccgtggtagatcatgcagcgggccatctgctggatcggcatactcagcatctctctcctgtctccctgttccgcgtgcgttgcggagaacactgcggacagcacaaaaagccctatacagaaagctgccacacttaccgtaaacagtctcccccagagcttcctcgccctttttccaaagcatactgccaggaaaagaaatgctaatagtacaatcatagcatattttccgttattgcgaaacagtatcattcctattgttccgataaaaaacagcagatcccggactccgggacgccattccctgcggtcctccagcaatagatccgtcagactgatcagctgcagcaataaaaaagcactgaataccgtatcttttgtcatgctgacactcatataccagtggaacgggaaaaacattccaagcagtagcatcacgagctgccagcctgccgccacctggcgtctgtgcaataccagcacaccgtaggacatgctgcccgccagcagcagcatctgcagcgcagtgtacagtgccattccggcattcatactcccgaacagctgcgttcccagccacagcattccctgtaaaagcaacgtgtgcacgatcggatgatgatcaaaataataatgctccacgatctgtccggtctgtaccggtgcatcataagcacagattcccgggtaatatgccagatataccggaagccatgcaaggcaaagcaataacaggcttccgaaaaacacctgtgccccggagcatctctgtatccacgcggcagatctgccgaacacggcatcgcctttaccggtattgtctttaccggtattgtctttaccggtattgtctttaccggcaccctcaggtgccggcctctctgccgcgcgatagaccacaaacgttccgatcacacccagtaggcatcccaaaagcacggtccacagcagagtgcttcccacatatccggccgtccacaggatattgcccgcagccgccagatctttttctgtttttacgaaaaatacaaacagacatcccagaacgcaaagcagcacaccgcctctgcgtctgggaagtattctcttctcctgcatattataatcccttacgttcctgatgttccccatgcacacggttcagacgatactcgaaatccttccggtccttggccgccataacttccagcatcataccggagaaaaacgactggatccccgccagcagaatgaatccgcaggcgatcagcgtcgggaatctcggcaccagtcccgtattcagatactccaaaaataccggaacaaacaatatcaccgacaccgctgccagcaaaaatgccagcatgccgaagaaatgcatgggtttatagtttttatacagctgcagcatcttgcggatcacgcggaaaccgtcactgtaagtattcagcttggactcgctgccctggggacggtcacgatattccaccaccacattctctacctgcatgttatagttcaccgcatggatcgtcatctccgtctcgatctcaaatcctttggagaataccgggaatgtcttcacgaattcataactgaacgcacgataaccggtcatgatgtccttgatatcagaacgaaacaggctgttgatccccgcacgcatcaggctgttgccgaaattatgaaacggccgcttattttccgtaaaataagtagacgacaggcggtctcccaccaccatgtccgcctgatgctccagaacctttgccaccatctcccgggcacaatccaaaggataggtatcgtctccgtcgatcataagatagcattccgcatcgatctcacgaaacattctgcggatcacgtttccctttccctgggcatattcatgacgtatgatcgctcccgcttccgttgccagttccacggtacggtcggtggaattattgtcatatacataagtcaccgcctccggcaggaactttttcacatcggataccaccttggcgatcgtcttctcttcattgtagcaagggatcagtactgcaattttatccattttccattcctcttatctctgcgtgttaaaagtgcttatacaaagtttattgtaccacgcttgttccattacagccactatttttgctttttcccgcgtatttttcttgggggtcgcccagaacctatgatataatgagcctaggctcattagcgaacgaatatcctgcgaagcaggatgtaaagtgcgatagcacgaattcgtgagcttataatgcaatgagcgcaagtgagccaatatgcttgcataattcaatttcattgttgtggttacggaggaattgtttccatgaggagatctcagaacagatcttattgcaatatcatttaccgcctggggcttaatatcgtcatgcttctgtcactgttgctttccatgctgctgttcgccggcagctttctcacgacctgttatgctgacaatatggagacccagcaggttctgctgcgtccggacaatcccctgtggaatctgttggagctggcaggctttggattattgttttgcggatgcctgtatctgtatgaaaaaataggggagcgtttccgtcgcggactgcttctttttactttgggtttcgtcttcggactggggatcgtgctgatcctcttcgggcgcacggttcccgcagcggatgctctgtctgtatacaatgcggctgcggagtggattctgggaaatactgatattatccaccccaccgcctcttatctgtcttattatccacagcagattggtctgatggcttttctggagctgctgctccggatctgggatctcaccggcctgtccgcaccggcctggcatttcatcaagctggtctatgtctgtctgttgtgtgcggcggtctggttccaatatctgtcgctgcaatatctgtggccggagaagtacaagaagatctcctgctgttatctcgtcttggtatgctgtaacctgcccatgatcatgtacagttccttcgtctacggcgagattccttccttcgctgcattgtcggtgggatgctatctgctgttgcggttgctgggaggcgtctctccgggcggctcctaccgggacaacgtctccccgggcgactcctctccggacagctcctaccgggacaacgtctcccgaaatgatgcgccctcagtcaccgcctacgatcacgtcccccgcatgctccgtcagatacttttcacaggcttcggcagcatcctgttcctcacactgtctgtgctgctgcgcaagaattccctgatccctgtgatcgcagtgttgctggtgctgttgttcgaggcattgcgtccggggcggaacggtaagatgcgtctgggactgctcatcatggcggtatgtcttgctgttacttctgtggggattctgccgctggtacagaaatgttatgagaaaaaggcgggtaacacgttaagctccggagtcaccgccatgtcctatctcgccatgggaatgcaggaagcttcccgcggctgcggctggtataacggcttcaatatcgatacttacgataccgccggcatggatactgctctcgccaacgagatcagccgtctggcgatcgacgagcgcctgacctatttccgggaacatcccggctacacagcggacttctatcttcacaaacatttatcccagtgggcagacggcacctatgccagcagacaggctaccctggctacctacggaggacggagtgcattttttaaggaagtctatgaaggttctctcggtgggggatatatcgaatggtgcaatgcatggcagaatgttctatatctgggcgtgttgatattctgtatcgacagtcttaagaagcgccgggaatccagggctgccggacacatggacgggcgcactgccaaccgaatggcggagcataccgcagggcgcactgcggaccaaatggcggagcataccgcagggcgcactgcagacccaatcgtggggcataccgcagggcgcactgcagaccggcctggtacggaccgccttggtacggaccacctctatgtctatgtcggcctcattgctgtactgggcggtttcctgttccacaccttctgggaagccaattcgcggtatatcttctcttacagcctgttacttatgccctactgcggagccggagtctataccggaatctgccggatacgggatggggtacggtcgagatttcattaacactttccatgcagtattatacttaacttactaacttgagagtttacgcgagcaatgagccgcgcataggcaaaataagaaccgtgattgggagcttgctcacaaatcacggtttttacttttgacgtgatgcggcgaacgccgcgatatgaaataagattggcagcaaaaggcgctgccaatcttatgaatagcgtggctcattgcggatgccatctgccacccggggagatctgtttgtattaaaaacacaattttctgctaaaaaaatacaaaaacatgagattttgccatgtaaaaagctgttattttcgctgagcgtgcaaaatgaagaaattccatacaaaaattcctgatttagaagtttttttgtacggattttgctattttgatgcgattttcaccaaagcaatagaaagagggctacggggctgtttcgctaactccctgcttagtagggcaagcatattactgcccggaaagtgtttttagaaatccaagcagtatttttatggaagaatccatgaaaacgctctaaaaattactgcttcggcataggatgcttccattccggcagtaaatatcagtcactgtaaaagaaaatcacttcaaacttactgcttatacagcactaaatagatttcaggcaataaagatcggaacatcaaaacaaaaataccacccgggaagacaacaaagtcatccgggcggtattcaactaactctcaactcacatcaataatacatcgctccctgtaaaaatccccaaaaataatatactccgcatacgaggtgccacaggtaagccagccactgtactgctacgacaatccttctcttccgggtgtcggcattcgctgtcgcgcggagcagtaccagcagtgctcccacaaatgcgatgaagattccgtacatgtagccccaggagaaattgaaatccacctcccggaatcctttttcatacaggaaaaatgccatgaggaagctcatcacatacacctgccaggaaaaacggtagatgctgtccttgtgcagttccttgtagttcagcagaagtaccaggatcgggaatccgatggccagtccgatagccaggggcagattgccacaatactgcgcccagacatggccaaaagtaaatccgatgccgccttcctgtccctcctgcggtacgaacactccccggaactggtagagcagatccataaaagtcgggataaaacatactcccagccacaccgtggggacaaaattccggaatctgccacggaacattctccacaacatcaaaatccccgcagctccgaccagcactatggtaaaactgggtttcgtcatggtcgccagcagcagatatattgcaaacagaatataatctctcttatgctctctgaccgcatttggctgctcatacaccggcaacaattcaccatacttaaaaaatgcaagaattgcgaacggccgtgccgccatataggtggcattgtggaatggattcggcgtaaataccccgagatatttgtatttgataccggggagataaatccctgtcggcgggtataccatcgacacaaaaaacagggataccgctgccgttccagtgaggatccccggaagccaaggttttccgggcatagcttcctgcagctttgctcccacatgcttgtccaacatcaccttcagagcgatcattgctccgctgtttaacagcatcgtggccagtgccatggccaactccgctccgccggtaaaggaggcggtcaccagatggatcgtcgccgccagcttgaacaaaaccgggtaagggaagctgtaaccgctatccagtccctgcatctccagaatatatgccttcatatcggaatgatacagtcccgttcccagcatgctttccacacactgccggtaaaacagccagaacgtaactgccgatgcaatggctaccagtgcagcaaacaccggaatttctatccaatttttcttattttctttcaaaataccattccctgctactttctgcttcattccgccatttcccataatccggcactgctacgggtatttctcgtgttccggcacagctacgggcatttcccatgatccggcacggctccgcccattgccggatcttatttcagcttcgtgtaataagctaccacctttttcactgcatggatcacatcttccacatcgtcatccgtcaatccgtaatacagaggaatactcatcacctcgttgtaatacttctccgcattggggcacagtcccttctgatatcccagcttctcataataggaatgccagtagaccggcaggtaatgcacctgagggcaggtattctccgcatacagtgcatcgaaaaactgccttctgtcgcagttcaggttctccagattcagatgcagcacatacagatgccaggtcgtgtcagactccgggatctccttctgcaggatcagttccggcattttgccgaacgcttcattataacgcttacggatttcttttctacgctgttcaaatgcagggagcttcttcagctggctcaatagcagtgccgcctggaaatccgtcatacgataattgaagcccagctctacctgctcgttgtaccacagcgcatcggtgggatgtaccatttcttccgggtccctcgtaatgccgtgggtacgcagccgcatcagatgacgatacagcttctcatcattagtcgtgatggcgccaccttctccgccggtcaccgtcttgaccggatggaagctgaagcaggtcatatctgccaggcttcccacaggctggcccttatatttcgtgccgatggcatgcgcggcatcctcgatcaggatcagatcgtgctccttacagatctcccggatctcatccagctccactgcctgaccggtgaaatctaccgcaacgatcgctttcgtcctgggtgtgatcagcttgcggatggacgccggatcgatattgtaggtctccggatcaatatctgcgaaaacaggcttcgctcccgcatataatacacagttggaggatgcagcaaaagtgatcgagcttacgataacctcatctccctcaccgaagcctgctgccagtgccgccagatgcagtgcggcggtaccgttacataccaccactgcgtattttgcatgggtcagttcacacagatgctgctccagctccttcaccttaggtccgcaggtaatgtagtcgctggtcatgactgctgccaccgcgtccacatctgcctggtcaatatattgccgtccgtagaaaattttattctctcgtacaggttttcctccaaaaatagctaattcttccattccaaatcctcccgtctgattt

SEQ ID NO: 11465 - DNA, 169 bp, Unknown
  gut microbiota DNA sequence
tacctaattcctgtttttgaattgtccgcatgtatttcttgatttttcgcacatactagattcttgtttttaacttccgcacatatattctcaaatgctctgtctaaataattgggatgtctttcataacccagcagaaaaggactgctcccccggacatagatgcggc

SEQ ID NO: 11466 - DNA, 5495 bp, Unknown
  gut microbiota DNA sequence
aagacaaaggcatgggtgccggcgttcttcatcggttgtggaattttcgtgggctttgccatgatcttagagcagatatgtcatgccatcgtgctgacggtgaccggaagcgtgatacgggacaatctctggctgtatgcgatttacggtgggcttgcagcagcactttttgaggagtgtggccgttggatcgctatgaaattctgcctgaaaaaacatcttacccgggaaaacgcactgatgtatggtgcaggacacggtggtattgaggcttttctgattcttggtatgtcttctatgagtaatctcctcactgcagccatgatcaacggtggcttgatggagaagactatgacggcattggagcccgcacagcaggaggtaacctaccatcagctttccgttctatggaccacaccggcttaccagttctatctcgcaccggtggagcggatcagtgcgatcgccctgcagatcgcgttgtcgattcttgtatacagtgcggtgaagacaggcagaaagctgcagctggcagcagcctttggacttcatttcgcagtggactttctgactgtggtgtgtgcctctacgattcctacatgggcattggagctgggattgctgctggtagttacagtaatctgtgtagcggtatacaagctggtctatctgtcgctagcagagaaaaaagtctgacggagacagaagcctgcagataagaaggaatggattaaaaaaaggcgaacgtgtcatgagtcataaaatatgatataaaagatatgaggcaacgaacaatgaagatcaacagagaaaaagcactggcagcatttcaggaatacacggaccgttatgacagcagccgggacatgatccgtctgaaaatagaacacacctaccgggtctgcggattgtgccaacagatcgccagatcccttgaacttccggaggaagaggtggatattgcgtggctgaccggactgcttcatgatgtgggacgctttgagcagcagcgggtatatggtaccttcaccgatgcagattccatcgatcatgcgaaatacggagcaaggattttatttggcagggtctgggaagagaaacatggatttgtttccggaagcgaagaaagcctgcccgaggaagttcaggcagacgccggaatcagtatccgggatttcgtgggagacgcttcctgcgatgaacttctgtggacggcggtattttatcacagcgcctaccggattccggagggactggacgaacgaacggctatgttctgccatattttacgggatgcggataagattgatatcttgaaggtcaatgtggaattcccgctggaagagatctacaatgtggataccgaggtattatatcaggaggaagtgacgccggaagtgttgcagagctttgatgaggagcatgcggtgctacgctccttgaaaaaaacggcggtggataacgtggtgggacatatttccctggtgtacgagctggtctatcccgagagctgccgcattgtgaagagacaggggtatctggatcgactgatgaattttgagtcgaaaaattctcatacgagaaaacagttcgagcatatcagagaacatatgagagaatatcttgccggaaaataatgttggatacctgacagacagaaaccaagttttcgttttgtatatcgcagattcctcctgcacagactaaacagtagcacttgattgataacatatgcaaaattatgttatcgatcaagtgcacgattgttatgcaaaaacaggatgcctgtaaaatgaggcatcttcgcagaacgcgggaaaggagtttgcaatggatggattgactgggggaagcggcggaacagaagcgtttcccttgaatgaactgccggtaggattcggcatggcgctggcgatgaatgaacaggccatgcaaggctatgcggcactgacagagacggagaaggaacatctgatcctccggtgccgggatgctggatccaaagaagagatggagcggatcgtggcatcactggtaccgggagaatcggcggaaagtgttattgccagcctccgtcaagagtaaggatctgtccggtgagataggttggcgcctggatgagctggaggacaagttttgcgacttcctccggctggcccagacggtcggcgggaatttcttcccggagagcgctcatttcctcgggggagaagcagtggttcatggcagtatcaataacaccgcaggagatggcgttgacctggatattactgggagccagctccttggcaagtgctttggtgaagctgttcacaccacccttggaggcggagtaagccacttccatggaagctccgacgtttccccagacggaggaaatgttaacaatgcgtccgctgtgtttcagcagcatcagaggaattgccagacggctggtatagaaacaggagcttaaattcgtatttatgacacgctgccattcttcgacactcatgtccgtgagcagaccaatgtaggagatcccggcattattgaccagaacatccagatgatccagggaagcaaataattgatccatggcaacgggatccgatgcgtctgccatttgcgcggtgcagtggattccgtatttttcttccagagagttagcaaggccggacagctccgggagagtgcggctacaggtcaggacaaggtcgtaaccggctccggcgagggtctctgcgatggcacgtccgataccacgggaagcaccggtgacaagagctaacggtgtgttctttattgtattcatgtaaagtatcctttctgaattctacggcaccctttggagataaaacagtgccgaatgctaaaaacctgtaaaacgagtgtagcacagatggacttgcttttccataggggaactgctacactggacaaaaggagagaaaattatgtacgatttgatcattatcggctccggccccgcagggctgtccgccgcagtctacggaaagcgtgcggggctgaacctacttattatagaagaaaagcccatgagcggcggacagattcttaatacttatgaagtggataactatctgggacttcccgggatcagtggcttcgacatggggatgactttcagacagcatgcagagaagctgggggcggaattcttagaagccacggtacacagtgtggaagaacgtggcgattacaaatgcgtctacgcaggagaccgggaactggagacccgtacggtgatttttgccaccggtgcggagcatgcgaagcttggcgtgcccggtgaggaagaattaaacggcatgggtgtgtcctactgcgctacctgcgacggagcttttttccggggcagaacggtagctgtggtcggcggtggagatgtggcgctagaggatgccatttatctggcgagaacctgtgaaaaggtgtatctgatccacagaagagacagcctgaggggagccatggtattacaggaggaattaaagagtcttcccagcgtggagatcctctacgaccatgtggtcacggagatctgcggtgaggatatggtggaaaagctgcgcatcaaaaacgtgaagacggaagaagagaaggatctggaagcagcgggcatctttatcgctgtaggtatccatccaaacaccgaactgctgcagagcctggtgacagtcggtgaggatggctatattccggcaggcgagaccggagagactgacacccccggcatctatgtggcgggtgacatccgtaagaagcctctgcgccaggtcgtgacggcagtggctgacggcgctaatgcggcggtcagcgccgggaactattgcaaccgttttcgtaaacagtcatagattagtaatagattcattaagaaatttgaaagaaaattgaaaaatatttaaagaaaagagtcacccatgtggtggctttttttacgtaaaaaatccgtaaacccgcatgaaatgggaacttttggcaaaattgacaattaatttattatattgacaaaaggaggactgcgtgatatatttgttaacagatgtaacaaattcgtaacaaatgatccaaaaatgtaaagaagtaagttaagaaagtaagatagctccaagagtttcaggaggatagaatggttcgtaaatctgtaaaaattaccgtgtgcaccatggcagcggttatggctttttccggaatgaatattaccgcagatgcggcagcgtcttcatcggtacttcccagcggtggtattgaattgaccctggcaaagggtaataagttagagagtctgtccgcaggtacgaacaataccaaacagattgaaagtattattgaaactgtactccgtgatgatcagatggacacgaccccggaagcatccgaggaagaatcttttaagaatctggtcattgcacaggtaaatgattatgtaaatgtaagaagcatgcccagtgagcagggggagatcgtcggtaagctgtatgacgattccgtaggtctcttcatctccgaagagaacggctggtatcagatctcttccggttccgtaaccgggtatgtaaaagccgagtactgtgtgaccggcgatgaagcggtagagcttgccaaaaaggtaggtacaagattggcgaccgttaacaccacaaccttaaaagtacgtaccgaaccttctttagaggcttctgtattaggtctggttcccttagaggatgacctggtagtatccgatgagaccgatggctgggtacaggtagataccgaggaaggtcttggatgggtctccacagaatttgtttctcttcatacggagttcgttgaagcggaatccaaggaggaggaagaaaagcgtctggctaaggagaagcaggagagagaaaaagcccgcgccgcagcggcagcgaaggcagcgggaagcagtaagagttcttccggtagtgcccccgcagttacctatacagccagcggagacagcgagatgggtactgaagttgccaactacgcattacagttcgttggtaacccttacgtatacggcggatccagtctgactaacggtaccgactgttccggatttgtaatgagtgtatatgcgaacttcggtgtaagccttcctcattcctcttccgcagaccgtagccagggtgcagcagttgacggactggctaatgcacaggcaggagacctgatctgttactccggtcatgtagcactgtatatcggtaatggtcagatcgttcatgcatctaccgccaagaccggtattatcgtttcaaatgctgattataagaaggtactggcagttcgacggatattctaatcgtaacaataaaactaaggcactgtgtgaaaatacacagtgcctttttttgtatgtatgcccaaagtgcgctaatgggataaaacatatagagttgtacactgaattgtgcaatttgtcaaaatattattacgcgatgaaaaaaggattgacaaaacaaaactatacaaagtat

SEQ ID NO: 11467 - DNA, 12152 bp, Unknown
  gut microbiota DNA sequence
tcggctgccgttgcgctcgcgatcccgctggtgatacgctatgtcacctacacgctcgtgtacgaggataaggcgcagattatgtaccagatcaaaatcattgcggctgcgctgtttgcaatggtggtcgcggactgctatagcaagttctttatctcgaattacggtcacgtaatgggagcgaaaatcgagtacaacatgcgtgccgagatttttgagcatctgcagaagttatccttttctttctatgacaaccagaaggtcgggcagctgatgagccggatcacgacggatctgtttgacatcacggagctgatgcaccacggaccggaaaatattattctctcggcgatcaagatcatcggtgcgtttgtgatcctggtcaatatcagcccacttctggcgctggcggcgttcatcgtcctgccgtttatgtttgcttacgcgtattacctgaacggaaaaatgcggcgtgcgttccgccagaaccgtgtgaagattgcggagatcaacgggcagattgaggataacctctccggcatccgcgtggtaaagtcgtttgccaacgaggagattgagaagaaaaagtttaagataggaaatgcgggatttttgtccgccaagaagaacagctatcattatatgggaagctttcaggcgggattgggcgcgttcacgacactgattcaggtcaacgtcattctcgccggaaccatccttattgcaaatggtaaggtcaatgtcagtgatcttgtcacatttgtgctctacatcagtgtatttaccgatcccgtgcggacattgatcgatttcacggagcagtttcagaacgggtacagcggtttcgagcgcttctgcgagatcatggagatcgagccggatatcaaggatcgggcggatgcaaaagagcttaccgatgtgcgcggagatattacttttgaagatgtgtcgtttcagtacgaggagaatactgaacaggtattgcagcatatcaatctgacggtcccggcgggctcttacatggcgcttgtcggagcgtccggagcgggaaaaagcacactctgctccctgattccgcggttttatgatgtgacggagggggcggtgaaggtcgacggaacggacgtgcgggacctcaccttaaagagtctgcgcgaccacatcggaatggtacagcaggacgtctatctgtttgtcggaaccgtgtatgagaatatccgctacggaagaccggacgccacgagggaggaagtcatcgaggcggcgaaaaatgccaatgcccatgaatttatcatgtcattgccgcagggatatgagactgacatcggacagcggggcatcaagctttctggcggacagaagcagcgcctctcaatcgcgcgcgtctttttgaaaaacccgccgatcctgatctttgacgaggcgacgtcggcactcgacaatgagagtgaaaaggtggttcaggactccctggaaaaactggcgaaaaaccgtaccacattcgtgattgcacaccgcctttccacgatcaagaatgccgagaagattcttgtgctgaccgaaaacggcatcgaggaagagggaacgcatgaggaactcctcgcaaagaagggaatttatgaaaaactgtatcacatgcagtttcagaagcagtgaaccggagaaatattataaaaaatatatgaaaaaaatgcatatgatttgcaaaatggaggaaaaacgagtaaaatatatgtgttttggaacaaatgatgtattgtaaggaaaggaagagatagatatgacaaagattgacattatttcaggattcttaggcgccggaaagacgactttcatcaagaagatgattgatgaagtgttcacaggcgagaagctggtgctgatcgagaacgagttcggggaggtcggcattgacggaggatttttaaaggatgcgggaattcagatcaccgagatgaactccggctgtatctgctgctcactggttggtgatttcggcagaaacctgcatgaggtgatcggcaagtatcatccggatcgtatcctgatcgagccgtcaggcgtcggcaagctctcggatgtcatgaagtctgtgattgacgtggagaaggaagaggatgtaaagctgaacgggctcatcacggttgtaaacgcattaaaggcgagcaagcagatgaaggcattcggcgagtttttcaataaccagatcgaatatgcaaccactgttgtgttaagccgcagccagaatgcgacgccggagcagctggagctctgcgtaaagcagattcagtccatcaacgataaggctgccatcatcacgaccccgtgggattccatccgtggagagcagattttaaaggtggtagagggacaggattctcttgagagaaagctgatggcagagcagcatgcgaaggaagaagccgaggagcatgagcacgagcatcatcacgaccatgacgaccatgagcatcaccatgaccacgacgatcatgatcatgagcatcatcacgaccatgatgatcacgaccacgaggatcacgatcatgagcatcatcacgatcatgacgagcatgaccatgaggatcacgatcatgagcatcaccacgaccacgacgagcatgaccatgagcatcatcacgagcacggcgagaactgtacctgcggctgccacgatcacgatcatgagcatcaccatcatcatgcggatgaggtgtttacaagctggggaaaagagacgccgcataagtttaccaaggcaaagattgaggatgtcttaaagactctgtgcgagacggacgactatggaaccattctccgtgcgaagggcatggtggaggatgagaacggctcctggatttattttgacatggtgccgggggagtacgagctgcgtgacggcgagccggattatacgggacgtctgtgcgtgatcggaacagatatcgacgagcacagattagaggagttatttggaatcgcttaagctgtgaagactgccttttaatagtgagataagacagagaggaatagaacatgcaggagataccgatttatttatttaccggattcatggacagtggcaagacgactctgatcaaggagacgctgctggagaacgggtttgccgatcagggaaagagcctgatcatctgctgtgaagacggagaggtggaatatgatgaggcagagttgaaaaaaataaatgcaagcctcgtgatggtggagaatgaggaagattttactgctgattttctcaatgccatcaatatgaaatatctgccggatcaggtgttcatcgaatataacggaacctggggaatggatacgctcaccgagacggagcttccgcgcgggtggatggtggtgcagtcccttgcgaccgtggatgcgaccacctttgatatgtatcttgccaatatgcgcacgatgattatggaacagctgtttcaggcggacgtcgtgatctttaaccgctgtgacgacagcacggataagggaaaataccgcagaaatgtcaaggcgctcaaccgtaaggcacagcttgtgtatgagcgcgcggacggatcgctcgacgagcgcgaggaggagctgccgtttgacatctcgggagatgaactggagattacagatgcggattatgcaatctggtatatggactgcctggacaacccgaagaaatacgaggggaagaaagtcagctttctggcgcttgtatacaatcctgacaagctcaagaagggcatttttgttccgggacgttttgcgatgacctgctgtgtggaggatattaccttcatcggatttaagtgcaaatatccggatgaggataagattccgcacaagtcctggattcatattaccgcgcagatcaaggtggagtttgcaagagagtacaagggaaaaggaccggtactgtatccgatttccattacacctgcagaaaagccggaagacgaacttgtttatttttcataggagcagagtgcgtgggcacttttttgaaacctctttgccagcagaagccggcagggaggtttttgtttataatgtaatacaatgaaagaaatactggatatttacaaaaacgtgcgaaacatctacaatgaaagtgataaagtgtcatattgcagtatgaacggaggaaacagatgaaaaaattaggtttaggaccgaaaatgattttgagctttcttgtggcgattgcgggaagtgttgtgatctgtggattgattacatacagccgcacgaagaatgtgctgaacagcaacatgcagctcacaagcgagcagacgttagagagcgcgttgaacagtctgcagacgtacgagaagacgatcagccttccggtggatcttctgacgcgcaagacttccatcaagcagctggagtacgaggatcagtttgatgactatattgccaacgtgcaggatgaactggtggcggcgtgcaaggtaacgcagggagcggtgcgaagctattatgcgacgtccagcggaaaactcatcaccggatgggtgaagtacgaggacaacggtgataagacggcgatgaacaccatcgaggaaaatgtggatctgtccggggaagactggtatgtgaactgccagggcagaaaggcaaaagtaaattctattttcagctatatcacacagccttatgaggatccgcagacaggcgggcagatcttcaccgtagcgcaggaggtcaaatacaaagatgtcttaatgggcgttgtggcgatggatattgatgcggcgcaactggagaattatatcaggaatatccgcattctcaacacgggatttgccatgctgatcgatgcggacggcaatattgtgatcgacagtgacaaaaatacctttgcggacggaaatgtgacgggtctggaattctggacgccgatttccggagaactgaagtctctggaggagcagaagagcgccctggaggaagcgggcgatgagagcgcttccgacatcacactggagtctgtatacacaatgcgtgcagatggcatggactgtgcggtgaccgcgatgacagaccaggtgacaggctggattcttctgggctgcatcagcgatgtcgagaacaccggcaatcttgcgaagatcaacggtgcgctggtatttgcgggtgcgttcggagtgatcttcggtattgtgatcgcgcttattaccgcgtacagccttgtgcgtgagatcaaaaagattgagcgtgcgacagctgctgtggcagagggagattttacccagacgattgcggtcaccagaggagacgagttcggtgcgctggagacgcattttaacgatatggtcaaggatgtatccacagtgatccgtgaggtggaggataagtccagacatattttagagacttcggatcatatttccgagatcgcgggagataccagaagcacgatgggacaggtcgcggaggcgatctcgagcgtggctgacggtgcggtgaagcaggcggagagcacgcaggaggcaagcagtgaggtggacaacctcaagaacagtctggagtcctccagagattgtgtcagcgagatcaaccagatgaccgaggagacgaaccggatcagttcggagggactcggcagcgtgaaggatctgatcgaaaaatcacagaagaccgtagagaagtcgagcatgtcccttgcagtgatgaatgagatgattgccagcatcgacaagattttctatatttccgatgcgattgcggatattacggcacagaccaatttgctttccttgaatgcttctatcgaggcggcgagagccggagagatgggcaagggatttgcggtcgttgcagacgagatccggaagctggcggatgagtccaaggaatcaacggatgagatcaagaagattatcaccgagattacggacaagtccaagcaggtggaagagaccatgcaggagaacgaggagcttcagtcggagcagcagaaagcgatcgagcgcacggaagaggtattccgtcagattatcgcgcagattgagcagctgaatgccggcatggagaacatcaaccggctcaatgcggacatgtcatccaacaaggatacggtcgtaagtcgtatggaggcgattgcatccgtatcggagcagtcggcagcggcgacggaagaggtcaatgcatccacagatcaggtcaacacgacgatggcagacatcacggactacacaaagacacttcagaatatcgcgcaggatttggagcagacgatcgagaagttccgtctgatggaaatttaaaaataaggttgacaaatacacgttaatgtattaaagtaagtgacataccgataaacctttgagaaagagtagtagacatttatccgagatcacagagagctgcaggcggtgggattgcagtatggagggatttgttgaatggacttttgagggcggcctgagcagtggatacgcaggtaggagccgccgggaaccggacccgttatccatccggcatgtatgatagtgcatgaagtgagtggacattttgtcaagatgagtggcaccgcgataatattagtttattaccgtctcaagcaatagcttgagacggctttttttatgtaataggaaaaaggaggaaatgattatgaaaaagaaaatgatgacagcagttcttgcaatgacgatggtggcagcagcggtggcaggctgcggaagcagttccggctccggtacgaccgtggaattgaccaatgaggcaggaggagacgcgcaggcggagacacagaaggcagaggcagaccagacagcggcggagggaaccgtatataaagtcggtattgtacagtatgtggatgatgcttccttaaatcagattgaaaaagcgattgaagcggaactcacagcaaagggagcagagctcggagttacctttgattatgcggattacacgttcaacgggcaggcagatcagtcgatcctgacacagattgcagcggatctggtggcggatgatgtggatctgattatcccgattgcgacgccgaccgcagtcgtgatgcagagtgcgaccgaggagaatcagattccggttgtattttccgcagtgtcggatccggtgggcgccggactggcggcagatgtgaacgcaccgggttccaatattacaggaacgtcggatgccatcgacacggcagcgatttttgatctgatgctggcagcaaatccggataccgcaaaggtcggactgctctatgataagagccaggcttcctcccttggtgcgattgaggacgcaaaggcatactgcgatgagaagggaatcgcctatgtggagaagaccggtacgacctctgcggaggtgcaggcggcagcggatgccctggtggcagagggcgtagacgcagtgtttaccccgcaggacaacaccgtcatgacggcagaactttccatctttgagaagttcatcgatgcgggaatcccgcactacacaggagcggactcattcgcattaaacggagcattctgcggttacggagtcaattatgaggaacttggtacaaagacagccgatatggcagtcgatattctggtaaacggagccgatccggcggcaactccgatcgagaccttagagcgcggaattgtgaccgtgaatacagagacggcggaagcacttggactggactactccatgtttaaagatatgtgttcggaagttgttgagacagtaacggcagaggagtttgaataatatgggaccaatcatcaccttatcgatcgtgcagagtgcactggaactgggatttatctatgcactggttgcacttgcactgttcatttcatttagtattttaaatatagcggatctgtcaacggacggatgctttacgctgggatgtgcagtgtgcgcttcggttacactggcggggcatccggtactcgggcttttggcggcgatggctgccggtgtgtgttccggttttgtgacggcatttttgcagacaagactcggcatacagtcgattctggcaggaattattgtcaacaccggactttacacaatcaatattgcggtgatgggattcgcctccaacctgaatctgtttgcctgtgattccgtatttacatgggcaaaagacgcgatcggcggaacctggtataagctgatcgtggcggcagtgattgtcgcattggtcggcgtattgatctctctgtttttaaatacgagactcggactttccatccgggcaaccggggataatccggatatggtgcgggcatccagcatcaatacgggaatgatgattacgatcggtctgtgcgtcgccaatgcgctgacgggactttccggcggactgctcgcgcagtaccagaagtcctgtgatattaaccttggaaccggcatggtgacgatcgcgctcgccagtctgattatcggagagacgatcatcggaaagggcagcatgttaaagcgggtcatcggcgtgattctgggaagctgtctataccgttttatcgtggcggtggcgcttcgcctgaatgtcccggcagagtgcttaaagctggtatcctccattattgtggcggtggcgattgctttcccttacctgaagaagcaggcggtgttctaccggcagaaacgggcggcaaaagcggagaatgagcagtatattgcggaattactgcgagaagaacggaagggaaaaggaggaaatgcgtgatatggcagcagaaagagaatccatgctgattatgaaaaatgtcagcaagacctttaatcctggcaccgtcaatgaaaagtgtgccctaaacggcgtcaatctgacgcttggcgccggagattttgtaacgatcgtcggcagcaacggcgcgggaaaatccaccctgttcaatgcgattaccggagcttttttcccggaccgcggtctgatcatgctcggcggggaggatattacctatcagcaggagcatgtgagaagcaaagtgatcggtcatctgtttcaggatccgttaaagggaacggcgccgcacatgacgatcgaggaaaacatggcgcttgcctatcttcggacgacaacctcccggaatgcatatttcagcaggatcaacgcggcggataagaaaaaattcagagagcagcttgcgctgcttgacatgggactggaagaccgtatgaagcagccggtgggacttctctccggcggtcagcggcaggcactcacacttctcatggcgacgatggtcacgccgaaaattcttcttctggatgagcacacggcagcactcgatccggcgacggcagagaaggtgctgcatctgaccagacagattgtggcggagcggcagatcacctgtctgatggtgacgcacaacatgcatcaggcgctgacgctcggcaaccggacattgatgatgaacgcgggaaatattgtgctggacgttgcgggagaggaacgtgcggcgatgtcggtggatgacttgttggagcagtttgcgctccgcgcgggaaaagcgctcgataacgaccgtatcctattttccaaagtggagacacaggagtagggcgcagggagaaaaacatcacatacagtccgaaacggagtcggaatagcagatataaacagaaaatatgggaaaagccgttgaaatgtcggggcttttcctttattatattaagatagtacaaagggcgaggaggaaattatgtatccgattgttaaaaaagaaaagctggcagacaagatctatctgatggatgtcaaggcaccgcgtgttgcacagtattgcgaaccgggacagtttgtcattgtcaagattgatgagcagggggagcgtattccgctcacaatctgtgattataacagggaagccggtacgatcacgatcgtatttcagacggtgggagcttccacacagcgtatggtatccttggagcagggggatgcgttcgcagatttcgtgggaccgcttggatgtccttctgatctgattgatgaggatatcgaggaactgaagaagaaaaagattgtgttcatcgcgggcggcgtcggtaccgcaccggtgtatccgcaggtaaagtggctgcatgagcatggtgtggattgtgatgtgattatgggatcccgcaataaggatcttctgattcttgaggatgagatgcgggcagtggcagcgaatctctatgtgacgacggatgacggctcctacggctttcacggaaccggcacggcgcagctgcaggaactctgggatcagggcgtgcgctatgatcactgtgtggcaatcggcccgatgattatgatgaagtttgtctgtaagctgacaaaagaactgggaattccgacggtggtttccatgaacccgatcatggtggacggtaccggaatgtgcggcgcatgccgtctggttgtcggcgacgaagtgaagttcgcctgcgtggacggaccggaattcgacggacatctggtggatttcgaccaggcgatgaagcgccagcagcaatataagacagaagagggcagagcaatgttaaagctgacggagggagatacccatcacggcggctgcggacagtgcggctgagaaggcagaagtgatcgttagacggtggaggcagagagaactggggcatctgccggatagaaaatacagagtatggaggttcctatggacgtaatgacaagagtaccggttcgtgagcaggacccgcaggtgcgagcagcgaactttgaggaggtatgtttgggatataatgccgaggaggcaatggcagaggcagcgcgctgcttaaactgcaaaaatgcacagtgcatgaagggctgtccggtatccatcaatattccggcgtttatcgcgcaggtaaaagagggcaattttgaggaggcttaccacattatcagtgagtcatccgcacttccggcagtctgcggacgtgtatgtccgcaggagaaccagtgtgaaggaaagtgtatccgcggcatcaagggtgaggcagttgcgatcggtaagctggagcgttttgtagcagactgggcgagagagcatggcatcaagccgaagaaggcagagaagctgaacggtcataaggtggctgtcatcggttccggtcctgcaggacttacctgcgccggtgatctggcaaaattgggctatgacgtgaccatttttgaggcgctgcatgaggcgggcggtgtgcttgtctatggtattccagaattccgtctgccgaagcagaaggtcgttgcggcagaagtggagaatgtcaaggcgctcggcgtgaagatcgagacgaacgttgtcatcggcaaatctgtcacgatcgatgagctgatggagaatgagggatttgaggcggtatttatcggttccggcgcgggtcttccgcgttttatgggtattccgggcgagcaggcaatgggcgtattttcggcaaatgaatttttgacgagaaacaacctcatgaaggcatttttagaggagtacgatactccgatcaaggcgggaaagaaagtgatcgttgtcggcggcggtaacgtggcaatggacgctgcgagaacggctaagcgtcttggtgcggaagtacatgtcgtgtaccggcgcggtgaggaagaacttccggcgcgtaaggaagaggtgcatcatgcaaaggaggagggcattatttttgacctgttacagaatccgacggagcttttagtggatgagaacggctgtgtaaaaggcgcaagagtcatcaagatggaacttggcgagccggatgcctccggcagaagaagtccggtggagattctggggtctgagtatgagattgaggcggacacggtcatcatgtcgcttggaacttctccgaatccgctgatctcctccacgacaaagggacttgagacgaaccgcagaaagtgtatcgtggcagaggaagaaaacggcgctacctccaagagcggtgtatttgccggtggagatgccgttacaggagctgcaacggtcatcctggcaatgggtgcaggaaaagcggctgcgaagggaattgacgcatacttgaacacaaaataaaatggaagcaaaaggaggcctgccgcattaagtggcagcctcctttcacacataagagatattagataagtaatattatcagaagaccacaccgtaggatttcagctggaaatgcagatggaa

SEQ ID NO: 11468 - DNA, 113142 bp, Unknown
  gut microbiota DNA sequence
ccggagtgctgccggcttcgggtcattaggctttagcctgctgaatgcgtgtttacgagtttctcaacagagaaacgaagtacgcatgaagcaaaaacccacctgctatgcgggtggagtcaaatcgttatacagaaaaacacctttccgttacaatagagttgttcagtcactattgcaagaaaggaaaggtgttttatggcgaataagtctaatgatctcgcccatacaaaatggatgtgtaaataccatattgtatttactcctaagtatagacgaaaaattatttataatcaattaaaagaggatatacgtgatattctgaaacagttatgtgcatataagggcgtggagattattgaagggcatctcatgcctgaccatattcatatgctagtaagtattccgccaaagatgagcgtgtcgagttttatgggatatttaaagggaaagtcagcgcttatgatttttgacagacatgcaaatctcaaatataaatttggaaacagacatttctggtcagagggatattatgtcagcaccgtaggattaaatgaagcgacaataaaaaagtatattcaagatcaagaaaagtacgatatcatgcaagataaattaagtgtgaaggagtacgaagacccttttaagggttaagtcgaagtagtacaaacgcccattcatgggcataagcaacgcgtcaagtgcaatagtgacttgaacgaagagaaagtctagggcgccttgagacgctgtcgggtaccaaggggttacacccagcgtcccgagccaccctttttaagggtggcggcgactatgccgcaggcagcggaaacggcggaggcaccggcaggggcatctgcgcctaaagcagccgtgaggctggcggggacaggtgtgccgggagcggcggggatgccggcaggaaccgcccggccggatgcgattgcgccgagcgtattgtggtacatcgaaacgggaatctgctcgcagtgcagtttcagccgggatgcaaccggttttatcttttgaaattcagcgtcggtaagtccgaagaacaacagtttttccatagatacctccagaaatcagatcgtagttttgtcagaggtcattataacacagatttgcaggaatacaacgaaaagcaatgtgagaaaatgtccggttttccggtaatttgtgattgcggatatggggcggatatggtagtataaggcatacccgttttttggaggggcgtctttttatcaaatcatgcaggcagggaagtcctgctgtgcaatcagggctgctggagcggtcatcaggcggtatccgccacggaattcattgaggtgttacttatttttcgggtttgtggttgacattttcccggaagtatactactattagaacagaaaaacgaacataagttcgcaattcgtgcgcggacggttcgcatggaggaaagagaatggctaaggacgataaactgacaagggatgagagacctacgacaaaggaagagaagttaaaagcgcttgacgcggcgatttcacatattgagaagcagtacggcaagggatcggtcatgaagctgggcgataattctgcacacatgaatgtggaggcggttccgaccggatcattgagtcttgatctggcgcttggaatcggtggtctgccgaagggacgtatcatagagatctacggaccggaatccagtggtaagacgacggttgcactgcatgcggtggcagaggtacagaagagaggcggcatcgccggatttattgatgcggagcatgcgcttgatccggtctatgcgaagaatatcggtgtcgacatcgacaacctctacatatcacagccggactgcggggagcaggcgcttgagatcgcagagacgatggtgcgttccggagcagtcgatattgtgattgtggactctgtggctgcgctggtaccgaaggcggagatcgacggcgatatgggagattcccatgtgggactgcaggcgcgcctgatgagccaggcgctccgtaagctgacatcgattgtcagcaagtcgaactgtatcgtcatttttatcaaccagctgcgtgagaagatcggcgttatgttcggtaatccggagacgacgaccggcggtcgtgcgctgaagttctattcttcggtgcgtctggatgtgcgtagagtggaggcgttaaagcagggcggcgaggttgtcggcaaccatacgcgcgtgaagattgtgaagaacaaggtggcaccgccgttcaaggaggcagagtttgatattatgttcggacagggtatttccaaggagggagatatcctcgatctggctgcggatgccggtatcatcaacaaatccggtgcatggtatgcctacaacggcgagaagatcggtcagggacgcgagaatgccaagaactacctgaaggagaatccgctgatctgtgaggaagtggaagcgaaggtacgtgcaaagtacagccctgaggaagatgaggctgcagaacagccggatgagaagagtgcgggaaagacaacaggacgtactccggaagaactgccggcagaataaggataggagtgcgacagacagatcatgcaggaagtccaggtaaaggaagtagccagacgtgagaagggacgggtgtttttccggtttgacaacggaaccgaatttacactctaccggagcgagatccggggactgccgcaggcggagagcaggcttttgatgacggaggatgcgtatctgccggtatcactatatgagaagattctgacggagattgtcggaaagagagccaaaaagcgtgcactgtttctgctggagcgcatggaccgcacggagtcgcagctctgtgaaaagctccgccagaacggttatcccgaggagtgtgttgcggcggcggtggagtatgtaaagcagtatcactatatcgatgacctacgttatgcgaagcagtatatccactatcaccagcagaagaagagcagccagcgcttaaagatggacctcatgaaaaagggggtagggcgggagcagattgagcaggcactcgcggaggagtttgtgtcggatgagcgggcacagattgcggagcttttagagaagcggcactacgatgcggcgcaggcagaccgcagggaacagcagcggatgtatcagttcctcatgaggcgcggttttaagagcagtgatattcttgcagtgatgcgcgaagagcattttttcgacgaattttaaaataaatttcagtacaatatcttgtatttttgtaaaaatgaaatgcaatattatgcatattgtacagttattcacttgacataattcatgaaatagaataaaatttatgtgttgtaatttatgacagataacgattatgtttttatgttatatgtgttatatgtacaatgaaaacttaataaaggaggtgctcctgtggagacagtgattgctgttgttgttgctatcgcagtgactgccatcgtggtctattttgttacatctgcttaccataagaaggtgacggaagccaagattgggaacgcagaagagaaggcaagagagattattgatgaggcggtgaagacagcggagaccaagaagcgcgaggcaatgcttgaggcgaaggaagaatccattcgtgtgaagaacgatctggataaggaagtaaaagaacgccgggcagagattcagcgcagcgagcgtcgtgttgtacagaaggaagagaatctggacaagaagcttgagtcaatcgagagacgcgaagcgggttttgctgcaaaggaagaagagatcaacaaacagaaagcgcaggtcgcaaagctcaatgaagagcggttacaggaactggaaagaatctccggattaacctccgaacaggcaaaggaatatctcttaaaaaccgttgaagaagatgtaaaacttgatactgcaaaattgatcaaagaaatggaacacagagccaaggaagaggcggacaagaaggcaaaggaatatgtggtgacagcgattcagaaatgtgcggctgaccacgtcgctgagacaaccatttcggttgtccagcttccgaatgacgagatgaagggtagaattatcggacgtgagggacgtaatatccgcacgctcgagacactcaccggtgtggatctgattatcgatgatacaccggaggcagtaatcttatctggatttgatccgatcagaagggaagttgcccgcattgctttggagaagctgattgtggacggacgtattcatccggccagaattgaggagatggtcgaaaaggcacagaaggaagtcgagacaatgatccgtgaagaaggtgaggctgcaaccttagaggttggagttcacggaattcatccggaacttgtccgattgctcggcagaatgaagttccggacgagttatggacagaatgcattgaagcattccatcgaagtagcccagttatccggattgctggctgctgagatcggtgtggatgtcagaactgcaaaacgtgcaggtttactgcatgatatcggaaaatcagtagatcatgatatggaaggttcccatattcagattggtgtggatttgtgtagaaagtacaaggaatcaccgattatcatcaatgctgtggaagcacatcatggtgacgtggagccggagtctctgattgcatgtattgtacaggcggctgatacgatcagtgcggcaagacccggagcgagaagagagacattagagacctactcaaacagattaaaacagttagaggatatttcaaacggatttaagggcgtagagaagtcatttgctattcaggcaggcagggagattcgagttatggttgttccagaacaggtcagcgatgcagatatggtattgatggcacgcgatatttccaagaagattgaagcggaaatggaatacccaggacagattaaagtaaatgtaattcgtgaatcgagagtaaccgactacgcgaaataacaaagagagcagagaaaagttgtcgcataaccgagaaatcgtgaagcggcagcttttttcatttcataggaaggtgctgccttcatgtgtgaaagcagcaccttcctatgaaataaaaaacgctccgcgaggatgcgcagctcgcggtaaggaaaatatcgctttgcaaaccgctcgcgcgcggagaatctcgcaagcgagattctttttcataggaaataccgtgtgatgttaaagcgtggaagatgtttcctgtagggcaaaatgcttcgcggaggccgcattgcggcgaaggcggggatgttatatcagatgcagaatagaaaggatgggtaatatggatcagcaggtaaagagagtcaagagagaactgataaaacatggtgcaattctggatatgtatgaggataccatggaacttccggatggaaagcaggagacatgggactttatctcacaccgcaagggagcggcggccgttgtgccggtgcgcggggatggaaagatcctgatggtaaagcagtaccggaatgcgatcgaccgcatgactctggagattccggcaggttcgcgcgacagcgtgacggaggataccagggtatgtgcagcaagggaactggaggaggagaccggctattgcagcgacgatctgaccagaatcttatctcttaagacgacagtcgcattctgtgacgagtttattgatgtctatctggcaaaaaatttaaagcccggacatcagcatctcgatgagggggaatttattgatgttgccgcctacggggtggatgaattgtgtgatatgatctatgcgggaaccatccaggatgccaaaacggttgccggaattttagcatataagaatctgctgaatcaggactaggagatccgcataaatataatacagaaaagatatgagcggagtgcaatgtttgaagcgggaaggatgtattgtgatgctggcatttctgggcggaattgttctgactaatctgcttggcgcaaatcggcagatacatggacaactgctgaatcagacatttctgcaacagtatgcttatcaaaaagtggatgggaatcagttgtttggtcatgtggttatggtgcgcatgcagatgctggttctcatctttttacttggaagagcggttgacggaaaggtgttttccgtgctggcaaagagcatgctctcagcaggattcggattcctgcttgttgtcggaattatggaatacggaggatatggctgcctgatcattcttgccggattgctgccgcagtggattttttatacggcggcgctgcttttctatgcgaacagtaagaaaagacagagcagaatcgtgggatggaacagctggcaggatcggacgcggcagctggcggaagcggggcttgtgacaggctgtgtgttattgggaacgtttgtggagagctttgtcaatccggcagtattcgcctgggttttaaaaattttttgctaaaatttttaaaatgattacaatatatggtacggagaaaataagggaaacgagatattgtagtttcgctctaaatgcccgaattataagggaaaaatgcgattgcttttcggtttggttctgattataatgaatgatgtaccgcgtttgcggtacatttttcgatagagaagaaagccgcatacagcggagcaatgcagtgaacaaatgagtggcggggcaggtaaaagttatgacgcaggacatacagaatttcattcaatatttacatcaggagaagaatacctcagagaacacggaggtttcttatgcgcgtgatttgaagaaaatgaatcagtatcttctgacacagggaatctgcgatgtgaatgaggtgacggctacaagtctgacatcctacgtcatctatctggaaaaggaaggaagaaagcctgcgacgatctcgcgaagcattgcgtccatgaaggcgttctatcattatatggagaaggagcggagactggcagtagatccgtccgagcgtttaaaggcgccgcggattgagaagaaaatgccgacagtattgacgacggaagaggtgacgcgccttttggaacagccgggaggtacatcgccgaaggaactgcgggataaagccatgctggagttattgtatgcgacaggcatccgtgtgtccgagctgatttcactgagggtgtcggatgtgaatctgcggatggagtatctgatctgctcggatggacataaggaacggatcattccgtttggaacgattgcgcgcaaggcactggaagcttatcttgcagagggcaggccgaagcttatatcagatgagaaggaagaccgcctgtttacgaactgttccgggcagccgatgagccgccagggattctggaagctgatgaagggctacggcaaaaaggcgggaatagaagcggagattacgccgcatatgttgagacactcctttgcggcgcatatggtcggcaacggggcggacttaaaatcggtgcaggagatgctgggacattcggatatttccacaacgcaaatatatgcgcaggcgaaagatctgcagatgcgggaggtttatctgaaggcgcatccgcgcggataagaagacgggatataaaagagatatataatagaaaaagaatataaaaaagaagatagaaaagaacataaaaagaggtgcagccacatggtttgtgtggctgcacctcttttgtttcataggaaataccgtgatacattcatgtgtgaaagtagaaccttcctatgaaataaaaaacgctccgcgaggatgcgcagctcgcggtaaggaacatatcgctttgcgaaccgctcgcgcgcggagaatcccgcaagcgagattctttttcagaacgtgcgttagcggcacatatctgcaatggtatagatcagatctctggaatcctcccagccaaggcacgggtcggtgatggatttgccatagatgtgatcgccgattttctggttgccttcctcgatatagctctcgatcataacaccttttaccatgtgttcgatgtcggaggaaacctgtctgttgtgcatgacttcctttacgatgcggatctgctccttgaatttcttaccggaattggagtggttgacatcgaccacagcagccggattgacgagatccattttctggtacatctcgcagaggcggatcagatcttcgtagtggtaattctgtgtggtgttgccgtgcttgctgaccgcgccgcggagcacaacgtgtgtgagcgggttgccggtcgtctcgacttcatagccgcggtatacgaagtggtgtgggtgctgtgcggcgtagacggaattgagcatgacagaaaagtcgccgctggtcgggttcttcatgccggaagccacatcaaagccgctcacggtgaggcggtgctgctgatcctcgacggaacgcgcgccgatggcgacataggataacaggtcttccacatagccccagttctccgggtagagcatctcgtcggcgcaggtaagaccgctttcctcgatcgcgcgaatgtgcattttgcgcatggcaatcagtccctcaatcatgtccggtgctttttccggatccggctgtgaggcaatacccttataaccttcgcctgtggtgcgtggtttgttggtgtagacacgcggaatcagaatcagcttgtccgcaacatcctcctgaatggaagtgaggcggctgacataatcgcagacggaatcttcgttgtccgcggagcaaggtccgatgatgacgagaaaacgggaatctgctccggtaatgacggcgctgatcgcagcatcacgctctttttttaacgctttcagcttgtcggaaagcggatagttctgtttgatttcggccggtgacggcagttcgtttaaaaatgtaaaactcatatgacattgtgtggataaggaaaagacaccgcacactcctttctgtttgaatcgtaattatcttagctgatattacaatagatgtcaaatatttgcatatttattcagaatggagtaaactgtaaaaaaagccgtgcatggaagtggtccggatgaaaaaatgcaggtatggaaagggagcaggaacatgaagccattggagataaaacaccgtgtgattgggggaggggaaccgttgatctgcgttcccgtggtagagcaggatgcacagtcggtgatccgggagatcacgtatctgagtcagagcaccgcggatatgatcgagtggagagtagatgcattccgcgattttacagattacaatgcaatccggagcgtatttgaggctgtggcgcctctgctgggggagaagcttttcctgtatacattccgtaccgcgcatcagggaggcatggcgcaggtgaaagcggaacagctcgacgatctgcacgatcttgcggcggaatccggctgtgtcgatctggtggatctggaattctttgaggaagaccgaccgctccataagataaaaaggctgcgggagatgggagtgtcggtcattgcctcacatcacgattttgagcagacgccgtctccggaagtcatgaagatgctgctggagaaaatgtgcgccggcggagcggatattgtaaagcttgcggtgatgccgcagaattataaagacgtgctcaatctgctggatgtgacggcacagtttagagaggagaatccggatacgccggtgattacgatgtccatgggatcactcggcggcatcagcaggatcagtggggagacgttcggctcctgcgtcacattcggcgcgcacgaaaagccgagtgcgccgggacagttcgccatgaaagaactcagacagatgctggatacgattcatgccagcagccggatacaatagaattattaaaaaaagataaacacagggagattgcttgacgcagcaatctccctgtgctattataatgtcccaaattatgtaacagtgttaataattaacaaggtggtgaaatatggaagaattgtatgcgggtttatttcgggcgatgaaccgtttcggaaaactgcggatcggagaactgttttccgatatgacaaaaagcgacggcatgatgctctgggcaatttcacagttgaaccaggaaaagaataatgggagagctacagtgtctgaactggcagagaagcttcatacccagaattctgctgtgtcaaggactttgaagaatctggaggatcacggctggatctgcagaatgacagatccgaaagaccggcgcaatacctgtgtcgctctgacggagagtggggaggacatgcagcaaaatatgacatgcaccttgcaggaatttggcagggcagtcatttcgcagatggatgaacaggatctcaaaaagctcatagtatgcctggatgaattatatgacattgcagcagaagaaatcgagaagagaagtatgcgaaacagaaaggaaggacaacatgggaaagatttttaaaaatatgattccatactggaaaccgctgatcctggtgttattgctgttgtttgtgcaggcgtggtgcgatctgtcactgccggcatacacatcggacattattgacgtcggaattcagaatcagggaataaaacacatcctgccggaggcattgacaccggaggagtatgagaaggcagaacttttgatgacggatgaagagacggcatcctgggaggaaagctatgcgttaaatggcagtgtgtacgagcggaatgtgaccggggaagaacggctggaggaactggatgatacgtttctcgtaccgcttcttatgaattatcagatgtctgctatggaggaaagtacatttaagaaactgatggcagagcagatgcatacagatgagtctgcgctggacggaatgacgatcgagcagatcggcgcgtccatgggcgtggaattaaaaacatttgaaaaagagacgcagaacgaggacggaaatacgacgacagtcacctgtgtggatatgagagatctgctgcaggcgatggtatccggcggcatgctggaaaaagaccagcttttatcaatgcgcggggaactcaactcgatgctcgatgccatgggcagttcgcttgtcaaatcgatgggcgtggcgtacgcggcaggctgcgatgcggcggcaggcgtggatgtggaagcaattcagaagtcttatctgtggaaagccggtttgaaaatggtgggaatggctctgattatggggattgccacggtcttagtcggctttatcggcgcccgcatcggtgcaggaatcggacgtgatctccgcggaaaaatatttaagcgggtggtaagtttttccaatgccgagatggatcgtttttcaacagcttcgttaattacccggagtacgaacgatatccagcagattcagatgacatgcgcgattctgatccgtatggtagcttatgcaccgatccttggaatcggcggaatcttaaaggtactgcagaccggtgccggtatgggctggatcattgtgcttgcagtgcttgtaattctgggatatgtgatggttctgatggcggttgcgatgccgcgttttaagctgatgcagaaactggtggaccgcatcaacctcgtggcgcgtgaaatcctgacaggactttcggtcatccgggcgttcggcagggagaaaaaagaggagcagcgttttgacgatgcgaaccgcgatctgacgaaaaccatgctttttacaaaccgcgtcatgacatttatgatgccgggaatgatgatgatcatgaatgtgcttacggttggaattgtgtggttcggcgcacataagatcgatcagggaactatgcaggtcggctccatgacggcgtttatcacgtatgcgatgatgattgtcatggcattcttaatgctcgcggcaatgtcgattatgcttccgcgtgcggcagtggctgcggagcgtattgatgaggtcatccgcacgcagtcttcgatcgcggaaccaatgcagccggagaaaataaaagaacaccgcggcgtgatctgtttttcccatgtgaacttccgctacccgaacgcgcaggaggatgtgctctcggacattgactttgttgcggagccgggaaagacgacggcaatcatcggtagtaccggctgcggaaagtcaacactggtgaacctgattccgcgtctttatgatgtgacgggcggaagcattaccatggacggcattgatatccggaagcttgccatggcagaacttcgggaggagattggttttgtaccacagaaaggagtactgttttccggtaccatcgcatcgaatttaagattcggcaaggatgatgccaccgatgaacagatccgggaggcggcagagattgcgcaggcatcggattttatcgcggagaaaaaagaaggatatgacagtgccattgcacagggtggaagcaatgtgtcgggaggccagaaacagcgccttgccatcgccagagcgatcgcaaagcagccgcaggtttttatttttgacgacagcttttccgccctggatctgaagacggatgccgcactgcgccgggcacttgccaaaaaggttgccgacaagacggtgatcatcgtcgcgcagcggatcagtacgatcctgcatgcagatcagattctggtattaaacgatggacgcattgtcggaaagggaacacacgaggaactgcttcgcggctgtgaaacttatcgtgagatcgcgagatcccagatgtcggcaaaagagcttggaatggaggaacaggaggtgtctgtgaatgagtaacggaaatgagacggcaaaaggaatgggcagacgccgtggaccgatgggcggacgcggtatggcgccgggagagaagccgaaggatttaaagggagccatcggaaaactggcatcctatatccggcattttaagtttgcaatcgttattgttgcagtatttgcggcgtgctccacggtgttcagcgtaatcggaccaaagattctgggaaaagcgacgacagcgctctcggaaggactgatggcgaagatccgcggaacaggcggaatagattttacttatataggaaagatcctgctgtttgtattggggctgtatcttctcagtgcactgttttcgtttgtgcagggctggattatgaccggggtgacccagaagatctgttaccagctccggaaggaaatctcggagaagatcaaccggatgccgatgaagtattttgagagccgtacctacggtgaggtgctttccagaatcaccaacgatgtggataccttaggacagggactcaaccagagcattaccacgatcattacctcggttgcgacattgatcggtgtatttatcatgatgctcagcatctcgccgctcatgacgctgatcgcgcttgtgatcctgccggtctccgcggggctgatttccttcgttgtgaagaagtcgcagaaatactttaagaatcagcaggaatatctgggacatatcaacggacaggtggaggagatttacggaggacatctggtcattaaggcatttaacagagagcaggatacgatcaaggagtttgacgcgacaaatcagcagctgtatgaatcggcatggaagtcacagttcctctccggtatgatgcagccgatcatgatgtttgtcggaaatctcggatatgcagccgttgcgctgagcggcggactgctcgccatccggggaacgatcacaatcggagatattcaggcgtttatccagtacgtgaaaagtttcacacagccgatccagcagatcgcacaggtcatcaaccaggtgcagtcgatggcggcggcttcggagcgtgtgtttgaattcctgaatgaggaggaagaagaccagtccgtggagaatccttgtgatatttccaaggtgacaggcgcggtatcgtttgagcatgttcatttcggctaccagccggatcagacgatcattcacgacttcagcgtaaatgtggctccgggacaaaagatcgccattgtcggaccgacaggtgccggaaagaccaccatggtcaaacttctgatgcgtttttatgatgtaaacagcggcgcgatctgtcttgatggtcacgacgtgagaagttttaaccggcgggatctgcgtgaggcattcggtatggtgcttcaggatacctggctgtttcagggaactatcatggaaaatatccgttacggcaggctggatgcgacggatgaggaagtcattgccgcagcgaaggcggcgcacgccgaccactttatccgcacactgccgggtggctatcagatggagttaaacgaggatgcaagcaacgtctcacaggggcagaagcagcttctcaccatcgccagagcaattcttgcagacaacaagatcctgattcttgacgaggcgacgtcgtcggttgatacgcgcacagaggtggcgatccagaaagcgatggatcacctgatgaagggacgtaccagctttgtcatcgcacaccgcctgtcgaccatacgcgatgcggatatgatccttgtcatgaaggacggcgacatcgtagagcagggcagacacgaagaactgctcaagaagcagggcttttatgcgaacctgtataactcgcagttcgaggagaccgtggcgtaagagacggcacgccccaaaagcgtactgccgtacggcaaagatggggataagggatattctgaaaaaccgataccggaaagttccggatagaacagacggcggcaattctgaccgcaaaatccggtatttctaaccacgccgcgcctggcatcttcgatgatccgtgtctttccaagtttggaacactccacggaatgagtccgcaatccggcagacaattttaggacttttgtgtgtgtcccttatggacaccagaaagtccgctcattgtctgcggcttgtcggacacactccgtgagtgtccaaacgtggccaagacacgaaatgggatgccggacgcggcatggaagaaatacacgaattttgcttcaaagatttgccgccgtccgttctattccggagctttctgttcccgggagttcctgtgatatcccttatccccatccttttccgttacggctggcgattacggggacgtgccggatcggacgccgcgtctgccggatgcgctgcattgcgcttggcgcgctgcatgccgccggtcatgtgggagagcgcgggcgctgcatcgtccgcttcgataaagcaggcgcgcttgatggaatcttccccgtagcgggagcggatggcgtcgaccgccacattcaggcgggagagcttctcgttcttctgcatgtcaaacaggtcgtactgctcgtagtgttcctgcgtcgccttgccggtcgagacgccgagcagccggattggacggtgatcccagagctcgtcgaagagctcacaggcacaggtgtacagcttctccgtgacgttggtggaggaagcgagcgttacctgtctggaagtgtggcggaaatcattgtccacaatctgcacctgcaccacgctgacataggcgccggcagcgcggattctggcaccgaccgtctcacagagcgagagaagcacatgctttgccaccgcggcgtccgtcacatcgtactggagcgtgagggaattgccgaatcccttgcttgcggcgtcgttgtgggacagcggtgtggattcgattccgttggcataattccagatggtgtcgccgtgggacttaaagacggagagaatcatggcgtgatcgcttttggccagctggccgatggttgtgatgccgagggagcggagccttagggcggtggatttcccgacgaaaaacagatcctcgatcggaagcggccagaacttttcttccatttcggatgggaaaagcgtgtgtactttgtccggtttttcaaagtcggaggcagtcttggcgagcagccggttggaggagatgccgatgttcacggtaaagccgagccgggtgtgaatctcgtccttcagcctgtgggcaaagtccaccggattgccgtagagcgaggaggtgcctgtcatgtcgcagaaggcctcgtcgatgctgtaggtgtccaccgagggcgcatattctttgagaagtgccatgaactggcgggaacgctccacatagatgctgtagtgcggggcatagatttttaaatcagggcacttgcgtcttgcctgggcgagcggctcgccggtacagacgccgagcgcggctgcggatggcgacttggcgagaacaatcccgtgccgtgtcttttcgctgccgccgatgacggaaggaaaagagcggatgtccggggcgtccggatcctggcgcagaagttcggcggcttcccagcttaaaaatgcggaattgacgtcaatgtgataaatgagcggctgcggcatatggtaatcctccttatgatggtgtattatagcagagaagtgaacaaaagtaaatgaaaatgcaaacatatgttcctggaggaagaatgaagatccgtatctatgtcatgacacataaaaagtttgagatgccgcagagcccgctgtttcgtccgctccatgtgggacgcgcgtgcggggaagacctgggctatccgggggatgataccggagagaatatttccgacaaaaattgctattacagtgagctgaccgggctctactgggtgtggaaaaactgtcacgatgtggattatgtgggcacctgtcattaccggagatatctgctcggggcggatgagaggattcttatggaggacgattacgaaaagcttttgtcagaatacgatctgattacgacgaagcaggttgcactcaataactcctactattacggtttttgcgccaatcataacaaaaaggcgctggatgcggcgggagaggtgataaaagaacgttatccggcatattatccggcgtttgagaggctggtgcacggcacaaggacgtatttcgggaatatgtttgtcacatcgaagaagctctatgattcgtactgcagctggctcttttccatatttgccgaggtggaaaaacggatctgtctggagacgggggaggacgcctaccataagcgcgtgttcggatttatctccgaattcctgctgctggtctgggtgacggtgcagggactttcggtgtgtgagtgcaaggtggggatgatcggtgagaaggcggagacgagagagatgaaagagcagcttgccgactattttgcaagacgcgatgtggacggcgccaaggcgtatttccttgagcgcagaaaggagcgcccggacgttttgatggaggcgtcggatgtgacgggagaactccggctttgcatgcaggtgatcgcaacggcgggaatggagcagacacgttacgggacgaaccttttagaacgcgaaaatcgtttcaaagagctgatgcagatgtttgaccgtctggaccagatcgtgtaccgctaccgcaacggtctgcagaaaaaagaggatgctgtctttttaaaggaacagggaatcacggacaccgcgcttctgatcgcactgcggatcccgggggatgatgcagcgcgccagaaggaactgtttgcacagattacggcagacaaaaaagcactggatggcaccaccgcagataccgttactgtgtgagttcacacaattttcagaaaagcttttgggataagcgttgacaaacaaaatgccaatgtgctagtatatgttcgttgcgatatgagtttttcagagatgcgcaatgggcaaccgtagtctaatggatagaacaccggactccgactccggcaatgcgggttcgattcccgccgggtgcatttttttgacagatatggcagagcagattgctctgccatagaatattggagaatctttgacaggcgagagactgtcagattggaacatctgtgcctgcagatgtgcacacagatgatgcggtagtgaagcggatgacgaattgtttgggaaaggtacggtggagaatcaatggagaattccagtttgaatcatacagagaatcataagacagaggagaaggagacgaagagaacgccgattaagcagagaaaaaaggagaatgaggttctccgttttattcgggagcacatccggtattttgcggcgggagcgctggtggtcgttttaatcctcgtgcttgccatgtgtgcgaagccgaagggatccgactctgatgtcgtggtgaatgcgaacgcgacggagagcacgcaggcgacggaagaagcctatcaggtggatgcctatgagaatatcaacacactgattacacagtattacacggcgtatgcggcgggagacattacgacgctctcttcgattgcgacaccgatttctgcaaatgagcagagctacatcggattattttcacagtatgtggatgaatatcagaatatcaagtgctacaccaagacagggctggatgtgaactcttatctggtttccgtgtcgatggagatcaagtttacgggagtggataccacagcgccgggactggatttcttctatgtccgtacgaacgatgacggcacgctttatattgacaacctgtacagccagtacaaccttgccaatcaggagaacgcgcttgacaccagcgtacagagcctgatcggtcagtttgagagcgagtcggatgtggtagagctgcagagcgaggtgcagacgagatacgatgaggcgcttacagcggatgagaatctggcgaatatgattcagacgacgattcctgcagcgatcaaggactgggtgagccaggtggcggcacaggcggcaacagagcagaccgaagcgaccgaggcggcggaacagccggagactgagcagccgcaggagacagagcagcaggaagagaccgtacagcagacagagacgctggcgacgaaggatcgtgtgaatgtccgtgccgcagcggatacggaatctgaaaagcttggcaccttagatcagggaaccgttgtcacccgtacagcggtggacggcgactggagcgtgattgattacaacggtacgacaggttatgtcaagaatgagtttttgacctatgatctgccggatacgacggcggacaataattcggacagttcatcggataacagcgacagcacaaacagtgcttccatcgcagagggaacggtgattatgctggagaataccacgaatatccgctcgggaatgagcgaggattccagcaaagtcggaacggcttatgcgggagagaaggtcacagttgtgatgagttatgcggaaggctggaccaaggtaaaatggaacggcgagaccggttacataaagacatctttattacagtaagcggtgcggcctggctgataccggaaaacggagactttttaaaaggaagtctccgttttttcacagagagaacatttgaaacggagagattatggacgaacagggagtgcggatcaacaaatatctgagtgaggcaggtgtgtgttcaagacgtgaggcggaccgtcagatcgaggcgggtgcagtcaccgtggacggagtctgcgccaggcccgggacaagagtgctgccggggcagacggtctgctttcaggggagaagcgtaagccaggaggaagaacgcatcctgctcgcgtttcacaagccggcgggaattgtctgcacagcggaaaaacgcgagaaaaacaatgtgatcgactatattcattatccgaagcgcatctacccggtcggaagactcgacaaggactcggaggggctgcttcttttgacgaatcagggcgatcttgtgaacaagattatgcgggcgggaaacatgcacgagaaggaatatctggtgacggtgaacaaaccgctcacggagtcttttctgcgcggaatggcaggcggcgtgccgctcgtggaactgaatgcgacaacacgccggtgctttgtggaacgcatcggcaagcgcgagttccggatcattttaacgcagggattgaaccggcagatccggaggatgtgtgaatatttcggctaccgtgtggaaaagctggtgcgcgtgcgtattatgaatattgaattgggcagtttaaagagtggaacataccggaatgtgacggaggaggagtatcacgaattgctccgcctgaccgcggattcgtccagcgatccggtgatgcctgcaaaaaagacgggggagaaaaagagatgacaccggaagaacagatcaaaaacctgcgggaacagattgcgtatcacagtgaccgctattacaatcaggataatccggagatatccgattacgagtttgaccagctgatgctggaattaaagcggctggagcgggaacatcccgagctggtcacaccggattcaccgacccagaaggtgggcggcacagcgaagcggacggcgggtgtgctggtaaggcacaatgtcccgatgctaagcctgcaggatgtgttctcaaaggaagagatctgcgattttgtggcacagatgaaagaacagctggacgatccggagtttgtcgtggagtataagatcgacggactttcgatgacgctgcgttatgagaacggggagctggcgctcgcggagacgcgcggcgacggcatcaatttcggtgaggatgtcacggcgaatgcaaaggtgatcggcgacgtgaaaaagaaactccgggaggcaccggagtatctggagatccgcggggaagtctacatgaagaatgcggattttgatgccgtgaatgaaaaacaggagctgctcgggaaaaagccgttcgccaatccgagaaactgtgcggcgggcacgctccgccagctggattccgcgatcacgaaagaacgtaagctgtcgctgtttatatttaatatccagcaggtgcggggaatgcagtttgacacgcacacacagggatatgaatatctgaagaaacagggaattcatgtgattgacgattaccgtgtctgcaagacggcagatgaagtgtgggaggcgattaccgccatcggcgagaaccgcggcaacctcggctatgacattgacggagcggtggtaaagatcaaccgtttctcggaccgggagaagctcggggcaacctcgaaagtgcccagatgggcgatcgcctacaaatatccgccggaggaaaaagagacaaagcttttggatatcgagctgtcggtcggaaggacaggcaggatcacgccgactgcggtatttgagccgatacggctctgtggaacgagcgtttcgagggcgacgcttcacaatcaggactttatcgatgatctggatgtcggaatcggggacaccatcgtcgtctacaaatccggcgagatcattccgaaggtgaaggaagtgcggaaagaaaagcgcccggagggctggaagcgctttgtgataccggatgtctgtccggtgtgcggggcgaagacagagcgggaacgcgatacggcggacatcaagtgtacatcgccgaactgcccggcgcagctggagcgccacatcatcaattttgtcggaagagacgccatggacatcaaggggtttggaacggtttatattgaagaactcgtcagaatgggttatattaaaaatgtcgcggacattttttcgctgaaggagcaccgcgaggaactgattgcacagggaatcatcggcaaggagaagaacacggacaagcttctggaggcgatagaaaaagccaagcagaatgatgcgtacaagctgttgaccggtcttgggataccgaatgtcggaaaggcggcagcgaaggcgatcatgaagcattttaagaccatggagcggctttcggaggcatccgaggaggaactgacggcagtcggggacatcggaaaagtcagtgcggactgcatccgaagttatttttcggatgagaagaaccaggtggtgctgcagagaatcgcacaggccggcgtcaacatgacggcggaggagagcgagaccgtggactctgtcattagcggaaagacccttgtggtgacgggaaccctgccgacgcttggcagaaaggaagcgcagacgttgatcgagcggtatggaggaaaggtatccggatctgtgtcaaagaagacggattatgtcctcgcgggggagagcgcgggaagcaagcttacgaaggcgcaggaactcggcatcagagtgatcagtgaggacgaactgtacgacatgctgcagatagagaggtaacatttttatgccaatcagaatacagagtgatttacctgcaaaggaaatactggagaaggaaaatatatttgttatggatgagaatcgtgcgatgcatcaggacatcagaccgatcaagatcggaattttaaatctgatgccgctgaaagaagagacggaactgcagcttctgcgttccctgtcgaacacgccgcttcaagtcgatgtgacatttgttgcggtgtccagccatgagtccaagaatacgtcgatgagtcatctgaataagttctacgagagttttgcggatattaagagacgctattttgacgggctgatcatcaccggggcaccggtggagcagatggaatacgaggacgtggattactgggaggagatctgccagatctttgagtggacgaagagccatgtgacgtccaccctgcatctgtgctggggggcacaggcgggaatgtactatcactacggtctgaaaaagtatctcctgccgcagaaaaaattcggtgtctacgaacaccgtgtgatgaaccggaaagtgccgctggtgcgcggttttgacgattactttatggcgccgcactccagacataccgaggtgcgcacggaggacatccgcaaagtcaaggagctgaccattcttgcggagtccgaggaggcgggcgtattcctcgcgattgcggacgagggcagaagaatctttgtgatggggcatccggagtatgaccgctacacgctggataaagaatacaagcgggacaaggagaaggggcttcccattgagccgccggtcaactattatccggacgatgacgatacgaaaaagccgaacctgcagtggcgctcgcacggcaatatcctttacagcaactggttaaattactacgtctatcagcagactccttatgagttcattgatacggcggagattataggaaagtgatgcggcgtttgccaaggcacggaaaagaggacataagatggcagatacaatgaagatggaatacaagattttcctggaggcggaggacgtgtcgcagtcgcggatcctttcctgtgcttcctacatgaagcgtgtgttagagagctgtaataatccttatatcagcagggcagaacttgatgacgagagcgatctggatgattttgtactacgccttttcgtggaggaggagatcgaggagaaggagtgcaccaacccggcgatggcggagagctttatcgaggatatggcggagcttgtgacggggattgctgaagcacattcgttcctggatctggagggaagcttttctgtcacatggaagggaacgacgagcgcatatgcctttgtttccccaggcggtgatgacggatgcgattttcaggaactcggtgtgaccgaataatttaatactttttttggtttccaaaacgggaatagtctgttataataaacgcataatatcacttaggaggcatttgacatgggtgaggatcgcaaaacatttaaaataaaggacggtaatttgggagaagtgaagattgcagatgaagtggttgccatcatcgcaggacttgccgctaccgaggttgagggcgttggttccatggctggcaacatcacaaatgaactggtaagtaagcttggtatgaagaacctttccaaaggaattcgtgtagaagttctcgacggaaaggtaagcgtggatgtggcactgaacatttcatatggttattcgatccctgaagtgtcagccaaggtgcaggacagagtcaagaatgcgattgagaatatgaccggtctggaagtatctatcgtgaatatccgtatcgcaagtgtggacatgggcagcaacaagtaacgcatcgaatcacggtgaataagataaaggatgtccctgcgacatccttttttcctgtacagggaaatgtgacgaagaagacggggacatgagagaaaggaaaggtttatgaccagaagagagttgagagaacagatatttaagctgttgtttggcgtggagttccatgacagacaggaactgccggagcagattgccgtctatgaggagacggaggagccgtgggatacaaaggacggcgcatacatctccggcaaatgcgaggatatcgtggcacatcttgcagagattgacgaggcgatcgatgcggtggcggaaggctggaagaccggacgtatgggaaaggtagatctcacgctgatccgcctggcagtctatgagatgaagtacgatgaggatgtgccggtcggcgttgccatcaacgaggcggtggagcttgccaaaaagtatggcaccgatgagtcgcctgcatttatcaacggtgtgcttgcaaagctggtatgagaaaaaatatctattctgtcggtcaggtaaatacatatatccagaacatgtttgcacaggattttatgttgcaccagatcagtatcaagggagaagtatcgaactgcaaataccactccagcggtcatatttattttaccctcaaggatcagacggggacgatcgccgcagtcatgttttccaggtaccgccgcggactggcctttcagatgaaggagggcgataaggtcgttgtgaccggctccgtggaggtgtacgagcgggacggaaagtaccagctctatgccagagagattgaacttgagggcgccgggaatctctatctgaagtatgaggcgttaaagcgcgaactcgaggagatgggaatgttcgatgcggcatacaaaaagccgataccaaggtatgccacgaggatcggtattgtgacagcgcccacgggagctgccatacaggatatccgcaacattgcagccagaaggaatccctatgtgcagttgatcttatatcctgcgctcgtgcagggggacggcgccgcagcaagtattgtgcgcggcatccatgcgctggatgtactgggtgtggacgttatcattgttggacgcggcggcgggtcgatcgaggatctgtgggcattcaatgaagaagaggttgcgcgggcaatttttgcatgcaacacgccggtgatttcggcggtcggacatcagacggatacgacgatctcggattatgtggcagatctgcgggcaccgacaccctccgcggcggcggaacttgcggtgtttgatgtgcagctcgtcgaaaagtggctgatggactatggcacgcagatgagacgccagctggaattaaagctgaatcagatgcgcacacgcctcatgcatgatgaggagaagctgcgctatctgaatccgcgcaccaagctgaaggagaatgaaaagcgtttggatgagcttggcgctgccttagagcgccggatgcaggcaatactcgaacagaagcgccataagctggcactcctttcgggaagcctggatggaatgtcgccgcttaagaagctggcacagggatattcttatgtggaggatgccggcggacatgcattgacggatgccggcactgtgcagatcggagaagcgctttccattcatctctaccggggcagcctaaaggcggcggtgacagagatctgtaggcaggatgccgcagcggatggttcggagaaaggaagaatcgatggataatcagaacgaaaaaaagccgacgcttgaggaggcttttacccagatcgaggcgatcctcatgcagatggaggagccggagatttcgctggaggaagcttttgcgctgtatcagcagggggttctgcagcttaagaattgcggaaccattctggatgaggtggaaaaaaagatgcagatcctcggtgaggatggggaaatagaagagatgtaagaacggtagggggatgcagatgatggattttaagaccgagatggcggagcgcacagcgcagattgaacagatcataaaaaaatacctgccaaaagaagaaggctatcagaagaccatcatggaggcgatgaattacagcgtgctggcgggaggaaagcgtcttcgcccgatgctgatgcaggagacataccgcctgtttggaggaagatccgaggtgatcgaaccgttcatggcggcgatcgagatgattcacacctactcgctggtgcatgatgatcttccggcgatggacaatgacgaataccgccgggggaagaagaccacgcacgccgtgtacggggaggcgatgggaatcctcgcgggagatgcgcttctaaattatgcatacgagacggcggcgcgggcattcgccatggaaccgggcaatcccggggtatgtcaggcatttcagattctgaccgcaaaggcgggaatctatggaatggtcggcggtcagacggtggacgtcgagtcggagggaaagccgggcatgaccaaggaaaagctcgattttatctaccgtctgaagacgagtgctctgatcgagggggcaatgctcacaggagcggtgctggcgggagccacgcagggcgaacagaagattatcgagcagacagccggtgaggtcggacttgcatttcagatccaggatgacattctcgatgtcacgagcaccatggaggtattgggaaagcccatcggcagcgatgagaagaaccacaagatcacgtacgtgacctatgagggcattgagaaggcgaaggcggatgttgcgtcgctatccgagcaggcgattgcgcggatggattcccttgtggttaagaacgaatatctgacggaactgctcagatatctgatcctccgggagaagtaaactacgataaaaagcagaggtgctctgtatgatcttggaacgtatacaaaaagaaaatgatatcaaggaactctccgatgaggaactgaaaattcttgcatcggagattcgtcaatttttaatcgagaaaatctcggataccgggggacatcttgcgtctaatctgggcgtggtcgagctgaccatggcgctgcatctgtttttggatctgccgaaggataagctgatctgggatgtcgggcatcagtcttatacccacaagcttctgaccggaagaaaagagggatttgaccagctgcgcaagtacaggggaatgagcggattcccgaagcgcaaggaaagcgaatgtgactgctttgacacgggacacagttccacgtccatttcggcgggactggggtacgcgcatgcgagagagattaccggggaggattacaaggtggtgtcggtgatcggagacggtgcgctgaccggaggtatggcgtttgaggcgcttaataatgcggcacagcttaactccaactttatcatcgttctaaacgacaataatatgtccatctcggagaatgtcggcggactgtcgacctacctggcggggttccgcacggcggatgcctaccgggatttaaagctcggggtcatgaattccctcaacaagattccggtctacggcgataagatggtggagcgtatccggcgcacgaagagcggaattaagcagctgttcattccggggatgctgtttgaggaactggggattatttatctcggaccggtggacggaggcgatatcaagggtattttaaagctgctgcaggaagcgtcgcgtgtggatggaccggtgctggtgcatgtcattacgcacaagggaacaggctatgcacctgccgagcggcatccggcgcggttccacgggacggagccgtttgatatcgagacgggacttccgaagcatccgcgggtaaaagcaaactataccgatgttttttccacggtgatgcgcaagcttggcgaccgtgatgagcgcgtggtggcaatcacggcggcgatgaccgacggaacgggactaaaacgtttccacaatatgtttccggagcgcttttttgatgtgggcattgcggagcagcatgcggtgacatttgcggctgggctcgcggcgggaggcttaaagccgatctttgccgtgtattcatcttttttacagcgcgcctacgaccagatcctccacgacgtctgtattcagaacctgccggtggtatttgcgatcgaccgtgcaggacttgtgggcagcgacggggagacccaccagggaatttttgacatctcctatctctcaacgataccgaatatgaccattatggcgccgaagaataaatgggaactgtcggatatgattaaatatgcagttgatttttccgcgccgattgcgataagatatccgagaggagaggcgtatgacggattaagagagtaccgggcgccgatcgcctgcggcaagagtgagtggatctaccggtcggggaagatcgcgctgtttgcactcggggcgatggtgaagacggcggaggcggtgcatgagcggctgaaggcgctcggctatgagagcagcttaatcaatgcgcggtttgcaaagccgctggatgaggatgcgctcctgtccgcagcaaggcatcacgaccttatcgttacgatggaggagaatgtgatcagcggcggcatgggcgaacaggtcatgcgtttttatgaggagcacaatctctctgtgagagtgcttgccatcgcgattccggatgagtacgtggaacatggcaatgtggagattctgcgcagggaagtcggaatcgatgcggagacgatcacggagcgcaccatagaggcatatgaagaactgcacgcacaggaaagcggtgcggaaaggaatgacttttgaaagaacgattagatgttttgcttgtaaacagaggactggctccgtcgagggagaaggcaaagaccatgattatggaaggcaatgtctttgtggagaaccagcgggaagataaggcgggggctacatttgacacggaggccgagatcaccgtaaaggggaatacgctcaaatacgtgagccgcggcggattaaagcttgaaaaagccatgacgcatttcggaattacgctggagggtaaggtctgcatggatattggagcttccaccggtggatttaccgactgcatgctgcaaaacggagccgtcaaggtgtattccgtggacgtcggctatggtcagttcgcatggaagctgcgccaggatccgcgcgtggtctgcatggagaagaccaatatccgctatgtgaccccggcggatatcgatgacgtgctggattttgcgtcggtggatgtgtcgtttatttcccttaccaaggttttaatcccggctcgggagctcttaagagacggcggcgagatggtctgtctcatcaagccccagtttgaagccggacgggaaaaagtcgggaaaaagggtgttgtgcgtgacaaggctgttcatgaggaagtggtagagcggatcattgaattcgcgtcacagaacggattttttgtaaagaatctggaatattcgcccatcaagggaccggaaggaaacatcgagtatctggtgtacatccggaaggatgagacgggcggcgtggatgcggcagtcgacattaaggcggtcgtggatgcagcgcacggcgagttagacaagtaaccggacgtctgtgaatgaccgggcgtctgccggatgtggggaagtttatgagacattttttgatcatcacaaatacatataaggacgagaacggcagactcaccggagaacttgcggcgtatatccgcaaaaagggcggagaatgtgactgcttttacagtgacggggagagcaaaagcgaggcggcgcctgctttggataagatggatccagcgacggactgcgtcatggtgttaggcggcgacggaacgctgatccgcgcggcatccaggctggtggacagcaggattccgttgatcggcgtgaaccttggtacggtcggttatctgtgtgaactcgaggagagcaacgtgtttgacgcggttgaccgtctgatggcggatgactgtatggtggaggagcgcatgatgctcaccggcgcaggcatccttggcggagtgcgggaagaatacggggttgccctgaatgatatcgtgattcaccgcacgggggagttgtcggtagtcagcctgatcgtctatgtgaacggggagtatctgcatacgtttcgggcggacggaatcattgtgtcgacgccgaccggttctaccggctacaatatgtcggcaggcggaccgatcgtggatccgaaggcacagatgattttaattacgccgatcaatgcgcataatctcaattcacgcagtattgtgatcggtgcggaggacgaagtggttgttgagatcggcagaaggcgctcacagaaggatgagacgctggaggtcagctttgacggggataccgccgcaagacttgtggtgggagataagttcagtatccggaaggcttcggacacgacaaggatcttaaagctgagcaacaagagctttctcgagatcctaagcaaaaagatgcaggtatacacataagcgggaaacggagggcagaatgaaaaccaaacgacaggcgaaaatgctggaattgatcaagagaaatgacattgaaacacaggaagaactgtcggattatctggagcgtgagggctatcaggtaacacaggcgacggtttccagggacatccgggaactaaagctcaccaaggttgcaatgagcaacggcaggcagaaatacgttgcgctgcaggagacggacgaaaatctgtcgcagaaatatgtgcgcgtgttccacgacggatttgtatccatggatatggcgcagaatattctggtcattaagactgtctcgggtatggcgatggcggtggcggctgcgttagatgccatgcatatgcacgagatcgtgggctgcattgcgggggatgacaccatcatgtgcgcgatccgcagtgtggatgataccgttgcggtgatgaatcgcttgaaaaagcttgtggaagactagacgggattcttttggggagagtagaaggagattctatgttacaaagtctgcatgtgaaaaatctggcgctgattgacgaggcggaggtggattttacccggggactcaatatcctctcgggagagaccggtgcgggtaagtccatcatcatcggttcgatcaatctggcgctgggtgaaaaagtgcaaaaggaaatgttgagagaagatccgcagaccggggagtttgctccggcgctggtagaactggtatttacggtggagaccgggcaggaacggcaaaagctggaggcgctcgaggtctatccggaagatgaccaggtgatcctaagccgcagaatcgtaggcggaagggggacggcgcgcgtcaacggtcagagtatgccggcatccgcggtgcgcgagatcgcggcgattttaattgacattcacggtcagcatgagcatcagtcgcttctctcaaagcgcagacatttggagattctggatgcctatgtgggagagacgctgacagagaaaaagaaggcgctcgcagagacttaccgcagctacaaaaagctggtggaggaagagaaaaatgccggcatagacggcgcagagcgcgagcgggagatttcgttcctggagtacgagatccgtgagatcgaggaggcaggacttcgggaaggcgaggacgaggaactggagaatgagtaccgccggttttccaacggacagaagattgtgaatgccgtaaacggtgcatacagcaataccggcggcgaatcggactgtgcgtcggagctgaccggaagggcggtgcgcgaactctcgtcagtctccggatacgatgagaagcttgccgaactcgagcgtgagctgcttgagatcgacgggctgttaagcgatttcaaccgggaacttgccgattatgtcgagaatatggagtacgatgaggagacgttctaccaggtggagaagcgtctcgatgaggtgaatcatctgaaatccaaatacggcagcacgatcccggacgtgcttctggcattagaagagaagcaggaacgcctgatgcagcttaaggactatgacacgtatctcgccggtcttaaggaagagattgcgcggacccaaaaagtcttagagaagcagagcagcgaggtgtccgcaatgcgtaaggaggcggcagagcggcttaccgcggcggtcacgcaggcgctactggatctgaatttccttgatgtgcgttttatgatgaattttgagcgcatggcagagtatacggcgaacggattcgacgatgcggaatttttgatttccacgaacccgggcgagccgttaaaaccgctcgggaaagtagcgtcgggaggagaactttcgcgtatcatgctcgccatcaagacggtgttagcggatgaggatgcggtggagacgctgattttcgatgagatcgacagcggaatcagcggacggacagcgcagatggtttccgagaagatgaatgtgctgggacggtcgcaccagattatctgtatcacgcatcttccgcagattgcggcaatggcggattcccattacctgatccagaaatccgtacagaatcagacgacggtctccacgatccgcagactgtcggaggaggagagcatacaggagctttcccgcatgcttggaggcgtggagattacggagacggtaaaagagagtgcgcgagagatgcgcgcgcttgcaaaaagcaaaaaatcggggtttgaaaagtaaaaatattcacataataaaagaagataccacaggtatgagataccatggtatcttctttttttgttgtgtggcggcctttgggttacagaaaatggtatgggggcagatatgagacataaattttattttttgatacagcagatcacgtgggttgtttttttgtttttgacgctgtttgccgtaaagacgtttgagcgggcactgccggatgagatctacgttccgttcggggaaaaggcggattatcggtttggcgttccggtgagcgtgacgttaaaggacgacagcgaggaagtgttctaccgcttaaacgggcaggaggatgccgtggcggaggcccctttttataccgttacctgcaagctgttcggcattttcccggtaaaagacgtgagggtgatgatggtcgacagacaggaggtgactgcgggcggcgaggcgatcggtatctatgtgaagacggacggaatcctggtgctcggcactgcaaaaattgcggatgcgtggggcaatgagtgcagcccggcgcagaatctggtgcagagcggggattatattgtgagcgtgaacggggagacggtgtgcgggaaagaggagctgatggacaagattgacagctacggcagcggacgtgagatcatcggagtgatgcggaagggggagtatgtggaagtatccatgaatccggtcaaaggcgagacgggaaaataccgccttggaatctgggtgcgggatgatcttgccggggtcggaacactgacctactacaggcaggacggaagctttggcgcactcggacatgcggtgagcgacggcgacaccggcgtgcagatgagcctgtcggaaggatatatttacgagacgaaaatcgtcagcatccagaaggggaagaacggcgtcccgggcgaacttgcggggatcattgactacgggaaatcgcattgcatgggaagcattacggagaactcgccgcttggcatccgcggcatgttaaatgatacggcgggagaactggaaggggaagtctacgaggtggcttataagcaggacattgcgcttggaaaagcctacatcatctcggaggtgtccggggagcgcgcggagtatgagattgagatagagagtcttgactacagcggggatgaggaaaacaagggaatcctttttaaagtcacggatgagcggcttttagacctgaccggaggaatcgtacaggggatgagcggcagtccgattatccagaacggaaagatgatcggggcggtgacgcatgtgtttgtgtcggatgcgtcgatggggtacggaatctttattgagaaaatgttgtgattgtacgacaaaaacttttacaacgtctggtacttatggtatactacagtcagtattgttggctttaaggacggaagatggaatggaacagcaggaacatatacaaaaactggcagatgaatactacgaagagggcagagccagattctttgaccacaagctggaggaagcggcgatgcttgtacagaatgcgcttcatctctacaagaagtgcgacgacatgttaaaatacgccacagcgctcaatatgctcggggtgatctacggcgccacggggaacgagacgatggcggtggattatctggtcgaaggacttgagtgtgcgatcaattaccagctaaataacatcacgacactcttttataacaatatcggctccagataccaggaactgggagagcatgagaaggcaattgattatttcttaaagtcggcgcgggaactgcagaatccgacctgcatcaaggaggaacgccaccgttcctgggctctgattacctacctgaatctggcggtctcctactacgaactgaacctgtacgagctttcctacaaatatttagagcaggcagagcggcagcttgacgaggaagtggaggagatgtattattatacggtactgatcttcaaatgtaggctgctctggcagatgggaaagggggactatgtgtatgagtacatggaggaccttctggcgagcggtgaaaaagacagcaatgcgtcggattatctgaacgatatgaaggatctgtgtcagctgttccgcgacatgaaagagtatgaatactggaagcagaccatatctgcggtcgagacctatacgatcgatcagaaaaccgtctttttccagctgtttctgacggaattgtggatggactactatcagactgtggggaacgaagagcgctatgtggaactgtgtgtggcacatgcggatctgtataagcgccagaaagcgatcgatgcgaaggaccgcgccacagcgatcgacatcaagatacagctgcgggaaaaagaggcggagcgcaagcgcgtggagactatgtctgtgacggatgcactgaccgggctggggaaccgttattctcttgagcgtgaggcggtgcatatcataagggatgcgggcagtgagcggatcacggtcggcgttttggacattgactgctttaagcagctgaacgatacctacgggcatattcagggagaccgctgcctgaaggtggtggcggatattctgaaggaggcagtgatggactgcggacatgtctaccggtttggcggggatgagttcgtgatgttgtttccggcagggatggagaaccggatcgaggagatcgcggaggcgatcctgcagaagattgcggaggtgggaatcgcaaacgagcactcggttgtgcagccgaatcttaccatctcccaggggtatgcctgctttgtgccggagggcacagagagcggagcgcgtctgattgagcacgcggacaaggcgctttactatgtgaagagaaacagcagaaacgcatattatatcatacgcgaatgatgcatatacttcagttgacgacttgcttcgacaaattttcttgcgttggaatcagtatcatcagtaagcaaagagttttgtcacaggaggggctaaaatggaaaaactgaatgttgcaatagcagatgataatgagagaatgctgcgattattaggggatattatcgaaagtgatgacgaactgaatgttgtaggagtcgcccgcgacggcgaggaagcataccatgtgataaaggcgaaagaaccggatgtcgtgctgctcgacattgtgatgccgaagcttgacggattgggggttttagaccgcgtgagtcaggacacctccataaaaaaacatccggcgtttattatgatcagcgcgatcggtcaggagaaaatcacggaagatgcgtttgcgcgcggcgcagattattacattatgaagccgtttgacaatgatatcgtgttaagccgcatcaagaatgtgagaagacctgcggcgggacgcggtgcggaagtgcgcaaggtcaatgcctatgagaaggcggaggagacaaaggagcgcaacctggaagcggatgtcaccgatattattcacgagatcggagttccggcgcatatcaaagggtatcagtatctgcgggatgcgattgtcatgtcggtcaatgacatggatatgctcaactcgatcacgaaaattctttatcccacgatcgcgaagaagtaccagacaacctccagccgtgtggagcgggcaatccggcatgcgatcgaggtggcgtggagcagaggcaagatggataccattgatgagatgttcgggtataccatccacaacggaaaaggaaaaccgacgaattcggagtttatcgcattgattaccgaccggatacgtctggaatataagatgcattaacgatgaggacatatttttcaggaggcgcaaagccgaagaagagtatgtcctcattttcggataaccggttccttttgagcgtcagatgtgctataattatacgatgatttttcggaggatggcagatgcagaaaaacaagtatcagctcaggtgcgcggcaggaaaatactggctgttagatatggagcaggatggagaaccgtatcggccgccgctcatgttaaatgagagcggggcttatattttcaggcagtatacggcaggaaacacggcggataaaatcgcggaggagcttgccactatgtacggggggaccgcagacgatatgcggacagatgtgatgcagtttatcagacaaatggaactacaggggatcttgtaaacgatgaatatattattggtgggaagcaaatgccgcttccttcagcttttgacggacaaactggacaaagaagggcaccgtgtgtttttgctgacggcagaagacaaatcggtcagaacgtccaaaaagatatttgagacgtatcattttgcatacgacaatccgtgcatcagagaggtgcttgagggagtgcgtccggatgtgacagtctttatgggcgcctatgatacaggctttctctgggggaaggggagcagcacggcgtcggcgtacacttcaggcctgtttcagctgctgatgaatgagacggctggtaatgtgggacgctttttgtatctctcgtcggaggaagtcttcgggggagagtatacacaggacatttcgtgcgaggaaaactgtgcggcttatacggtacgcgcgcaggcgattgcggcgggagaggaactctgccgcagttactttaacatgggctatgagacgatcgtgctgcggctggatcatctctacggggaaccgcttaccggggtggaagcgcgtgatatctgcgcccgcatgagtgtggaggggctggaaaccggtgagatccgggtaaatccccacaaccgtgtggcgctgttgcactattcggacgccgtcgaatttttgtatgcggtgattacggcaaaaaagatgacgtacggtgtttatcagatctcttccggagagacgatttccgtacagagcgcggcggagctcgtggcggcggaactggaaggtgtgaaagtcgtagaggacaccggaagagagcggatggagccggttttgtccaaccagagatttgcggaggagtttgggatacgcattgtacataagccggagaccgagattggcagggaggcggcgtacatccggcagcacgcatcttcttttgtgcggacacagagcagaaaaaagggatggagccggttcggagagcggtcgagagaagccgtaagagcgatgattccgttcgcggagaatctgctttgtttccttccgtttttcctgttaaataactggatggcggggagcgcgtatttccagaacattgatttttaccttctgtatgtgctgctgttcgccattacctacgggcagcagcaggcgacattctcctcgattcttgcggtggcggggtatcttgcggtgcagatgtatcagcggagcggttttgatgtggtgctggatgtcaacacgtatatatggattgcacagctgctgattctgggacttgtgatcggctatatgcgcgaccggctgcatgcggtggaggaggaggagcgccatgaggtggatttcctctccagacaggtagaggacatctcggatgtcaacggcagcaacgtgcgcatcaaggagattctgtcaaatcagatcgtcaaccagaacgacagcttcggaaagctgtatgagatcacgtccagcctggacaagtacgagccgagtgaagtgttgttctatgccgcagaggtgctggcaaagctgatggacagtcaggatgtcgcaatctatacggtggcaaaccactcctatgcgcgtctgttctcggcaacttcgccgaaggcacgcatgctcggaaattccattcactatgtgcagatggaagaactctatgaaaagctgcgggagaaaaaagtattcatcaacaaaaccatggatgagcgctatccgctgatggcggacgccatttattcggaggacgagatgcagctgattctgatggtgtggggaatcccgtgggagagaatgacactcgggcaggcgaatatgctcactgtgatcggctatctgatccagaacgcggttgtgcgcgccaaccgttatctctcggcgctggaacagcagcgctatatccacggcaccagaattttggaggcggacgcgtttgtttcgctggtgaaggcttatcttaacgccagggagaagaagctgacggagtgtgcgctcgtcgttttcgaggagggtgagacctccagggaggaagccgcaggcgtcctttccggcatgatgcgccagagcgattatctcggagagctccccgacggaaagatgtacgcactgcttgccaacacgagcgcagaggatgcgggaatggttgtggagcgttttaggagcgcaggctttccgtgcaggatgaaagaggagatggaactatgagcaggatcgaaacgtattttctgctgcttgtggtactcaatttgtgcgtcacggcggcgtatgtcctgtggaatgaacagcattggagagaagagccggggaagcgcaccggcggaagaatccgcgcggcggttatgcttttggcaccgatgatcggtcccgttttctttgtggcgggagaactcgtgcgccatctattattcggacagtcggcggatctggaagatgttattttcagtaaggagcgtgtcagaacacactttatggcggatgaggagcaggagcggaatgtggtgccgatcgaggaggcactggcgatttccgaccgggatagtctgcgcacactgattatgaatgtggtcagaggagatgtcacggactctctcggatcgctggcgctggcacttgacagtgaggacaccgagacctcccactatgcggcgtcggtgcttcgggatgtgctcaacgatttcaggcagcatgcacaggaactctaccggcagatgcaaaaggacggcagagaggcgggggacgatgcctgccgtctgatcgagtacatgtatgtcgtcttaaaacagaatgtttttcacgagaccgaacagcggacatttgtggatatgtttgaggaggcgtgtgaacttctctatgaaaaagattaccggaaactcactgcgcaatacatcgaatggctgtgtggactgctgctccgcttaaaggaattcgggcggatgcattactggtgcaaccggagccgggaattatatccggatgcgctttccacgtacacctgctatttgaaaatgtattttacgcaggagaagaaaaccgaatttttccgggaactggatcggctgaaagcgtccaatatcgtcattgacagggagacgttagagctgatccggacgttcagttagtccggcaggaaggaaatgacatggtatcacgcagaaattatctgacgattgcaatgatgtttgtgattctgctttttatgtttcagtttacaggcgtcatgaaagaacagttaagtgaatatgagagcaacgaatatgcagacgataccacaacatcctttcaacggtcggatgcatttctggcagaacagacatctgccgacgcctgcgaggtgatctatgtgggcgaagcagggggagcggaggaatccgtggtaaagacatggtgcagctaccgcaagcggacgtttttttgcagcagctccctcgcactgcttgacagcctgcaggatgatgcactgcaggtgctggtggtggacggcagcaaggtgacgtcggaagaagaggtggcggttcttcgcagagaggcacaaatgggtgtgactgtgatttttgcaaccctgccgcagagctctgtgataagggagtaccgggatttaagggagcttctcggaatccgcgcggtgattgcggatgagataccgcttgcgggcatgcatctgttttccggctttctgctcggcggggaagagatctatgaggtcgcggaacccggggaggaggagcgtcaggacatgaacccttctgttccctggtatacgaccggcgcgggaaccaagacctatatggtcggcacgctgtccgatgagacgatcgaacagacggtggataacgaaatacgggcacagtatgcgggaatggaggaagaggcggcaaaaaacagcctcctgcctgccattctctggagaaacagcgtggacacggcaaagattttctgtgtgaacggggattatcttgcagacataagcgctgttggaatactggacgccatgatgggggagacatacgattatgatatctacccggtgatcaacgcacagaatcttgtgattgcagatctgccggcgttcgtctctgagaacgaggaggagatgcagaagcgctacagccagtccgcacaggcagtgtatcaggaaattgtgtggccgtcgctgacctccattgcctcccggacgggggcaaagatgacctgcatgatgacaccgcagtttacgtatacggatgaggaagagccggatggagagaacgtcacctactatctgaaacgtctgaaggaggagcacgcggaggcggggctgtccgcagacagcagggaagggatcccactctcagaaaaaataaagcaggatcagacgttctggcagacctatgcgccgtcctaccggtttttatccttctacgcggacggagtaaagagcatcggggaggagagtgcccttccggcggaaatccgcacggttgcgctcggatcaggtgccagcgaggcggtggggtatctcaatgagaacgtcacactgcagccgtcgacgggttccggaatccggcatacgtttctggatgattttaaagtgaaatgcatggagacggcgctcggctattccaacatcacactcgacctctatagcgtgacttatccggaaggggacgaggattcctgggagaaaatatccaagaagattgcggcaaacctcggcacctactggaaggcgtatgaagcgtttgacgcaaccaccctgacggagagtgatgtgcgcatccgcagatttctggcgcttgactataagcagcagcgcacggacaatgtgattatactctccttagagcacagggaggatgcggcatggtttctgctgcgcctgcacggagaggaagtcacagaggttgcgggcggaagctttgaagaggtagaagacggcgtctatctgattcttgcagaggaagatgagatttccgtgaaggtgcagaacggggaaacatggcagtatcaggacggcggaaagcgtggtgacggcacatgagaatatgtattgtggcagagggatgctatccctatgttgtcgggggtgtatcgagctggatacacagtatgataaaaatatttccggagtaccagtttgtcgtactggcgattgtggcgaaccgttcgctgcgcggaaagtttgtctacgatctcccggagaatgtggtggaagtgcacgaactgtatctggaggatgcagactggcggccaaaagaacttaaaagagcagccagagtgaagttaaatgagcgggagtacgccgcactgcggagcctgttgatgaaccagaatgtagactgggataccctgttctcctttttcggggagaaggaattctctttgaatgaacttctcatgggggaggattttttccgggcggtgcaggaatgttatacggtgcggtatgcgggggcggtgttttctgatttcctctggacgatgcgctccatgtaccttccgctgtttctgacacttggcatgcggctgccgagggcggatgtgtatcattgtgtggcgacgggatatgcgggcgtgctgggcagcatggcaaagcgcaggtttggctgcaggcttctgatctcggagcatggaatctacaccagggagcgcgaggaagaactgatccgtgcggactgggtgtccggcatctataagaatatctggattgagcagtttaagaaaatgtcgaagcttgcctatgacagggcggatctggtcacaagcctgtacgcgcacgcgagagagcttcagatcgaactgggatgtcctgcagataagacgagcattaccccgaatgggattgatccggcgcggtttgacggtttgaagcgtccggaagcgatggagccggatatggtgcacatcggtgcggtactccgcgtgacgccgatcaaggatgtcaagaccatgatccgggcgtttgcgtatgcaaagcgcgatgtgcctaacttaaaattatggattatggggccgacggacgaagacgaggaatacgcgagagaatgttttgatctggtggagctgatggaactgccggatgtggtgtttaccggaagggtgaatgtgacggaatatctcggcggactggattttaccattctgaccagtatcagcgaggggcagccgctaacgattctggagagctatgcggcgaagcttcctgcgatagcaaccgatgtcggaaactgccgcggactgttgtacggcgaggacgatgattttggcgaggcgggaattctgacgcacatcatgaatgtgaaggaaattgcggatgccatggtgaatcttgccagacatccggtctgcagaaaacagatgggagaaaacggttaccgccgtgtgatggcaaagtacaagatttcggatatgcatcagacgtaccggaagatttatgaaacgtttgagaacatagactggtagaagggagagagactgtggcaggaataggaatcaagcttcagaaaatatatgagaaaaaaacgattcttgcatatctgaccggattcggctacagtgcggtcgtgacggtcgcaccgatgtttgtcgtgatcggaacggtcatgctcatgagtcagctcctgggatatgagaatgtgggatatgcgaggagaggactgttttccggaacgctgctttacatctttatcttttcgcttctgacggcggcgccttttaatgcggtgttgtctcgctatatgtcggatgtcatctatgaggagcgctatgaggatattctgccctgttacgatgtggggctgcttttaaacattctgctggcaagtcttctcggaattccgttttgcgcatgggaacatcttgtgggacatgtcaacctgatttttgtgtttaccggattttgtggttatatcgcactggttctcgtgttctactcgatgctttacctctccatctgtaaggattatcagaagatatcgctgtactttttgacaggaatggcggcggcgctcgcctgctccctcttttttgtaaaagtatgcggcagggagattgtctacagtatgctgctttccctcacgatcggattctttcttacggcggtgctggaatatgccacggtgaagcgctattttaagaggaacagcaaccggtacagaagagttttttcgtattttggcaggtactggaagctggtggtgatcaattttttgtataccctcggtctgtatattcataattttgtgttctggaatacggatttacagatgcgcgtggcggatacgtttgtctttgccccgacgtatgatctggcaacctgtctggcgatgtttacgaatctgtcgtcgaccatcatttttatcacgcgggtagagatgcatttccacacacgttacaaggcgtattcggaagcggtcatcggaggaagatgggaagatatcaaaaatacaaaagacagaatgttccggcagctctccgcggagctcatgaacctggtgcgcatacagtttatcatctcgacggcagtgtatctgctctgcgtggtggtgcttccgcagtacgggttctcgggaagagtgatgcagatctatccttgtcttgccgccggatattttatattatttattctgtatgcagaaattatttttctgtactactttaacgatctgacaggggcgcttttggcaaccctcggcttttgcctggtgacgtgggcgggaagcatgctttctgccggcgggagtgacctgtggtacggcatggggctggtggcgggcagctttaccggctttaccattgcctatttcagactcaggttcatggagcgccatatggatgaacatatcttctgcggcggacagctgtttacggtgaagagagagcggatgccggagagtatggtatatacaaagaaacagaaggagcgttagtatatgaatgtgattttaattctgcggatttttctgacggcagcgggagtgttgttccttttgggggacatcaatgcgtatgtgagacaaaaactgaccgatacgattggacttctgtgggcatttgtctcggtggcgctgattttaacgggcgtggtctccgtgccgggggcaagggaggaggaatacctggtggtgcttcttctggcagtctgcctgctgcttttgatcctgctgtttaagctaagcaaggtggtgtcggttctttccatgaaaaatcaggagcttgccatgcaggtttccctgctcaatcaggaaaatgagagaatattgcacaggctggggattttgacagatgaaaaaaaagatattgttcgtgattaacacattaagccgcgccggagcggagacggcactgttggaactgcttgcgcagcttgctgccgagcggggggaggacgggcagcccagatatgagctctcgctctttgtcctgatgaaccagggagaactggtgcagcagataccagagggggtacggcttgtcaatccaaggtatgccccggtctcggtgctcgaaccaaagggaagaatctatatgggcatgaccgttgtaaaatgtctgcttcacagagccaacctgatccggctgtggcgctatcactggagggctgcgcgggcgatgcgcaaagagggacggctgatgccggacaaactgctgtggcgggcaatctcggatggcgccagacgcttcccggaggaatatgatcttgcggttgcatttctggagggcggttctgcatactatgtggcagaccacgtcagggcgaaaaaaaaggcggcgtttattcatatcgactatcagaaggcgggatacagcagggaactggaccgcgactgctacctgcaatatgatgccgtatttccgatcggggaacaggtaaagcgggcgtttctcgccgtgtatccggagtgcagtgcacgcaccaggatctatcacaatcggatcgactgtgaaaaaatccggaagatgtccgtgctgccgggaggatttatggatgatttcgatggaatccgcctgcttacggtgggaagactcaccccgcagaaggcatatccggttgcgatcgaagcgatgcggcagttaaaggcggagggatacccggtccggtggtatgtgctgggcgagggaagcagccgcagggaattagagcagcacattgcgtcgtgcggattaaaggaggatttcctgctgcttggagcggttgagaatccctatccgtactaccggcagacggatatctatgtgcatgcgaccggatatgaggggaaaagcattgcgatacaggaggcgcagacgcttggctgtgcgatcgttgcttccgaatgtaacagagagcagattacagacggggaggacgggattttgtgcgcgcttgacgctgcggcggtaaaggaagctgtgggcttcctgatccggaacccggaccgacgcagggcgtacgcgcaggcggcgttaaagcgtcctgtaaattacgagaacgaggaacggctgttggagcagctgctttccgagaaagaataaggaagatacgatggtagagaagaaacaaaaagaactgctgattatcattccggcatacaatgaggagaaaaatatagagcgggtgctggaggagctggaacgcccggagatcgcggagattgcggatattctggtcatgaatgacgcgtcctcggactctacgaactgggtcgtaaaggcacacggacatacgctggtatcccatgtctttaatctggggtacgggagcgccctgcagcttggatataaatacgcgatccgccgcaaatattcctatgtgatccagatggatgcggacggacagcatgatgtgtgcaacataccggtgatctatcagagactaaaacagcaggatgcggacggacgctgcccggatatcgtgctttgttcgcgttttatggagggaagtgcagagtatccggtctccgctacgaagaaactggcatacggatttttccgatggatgataaagatcagtaccggacgaaagattgccgatccgacgaccggtctgcagggacttaaccgcagggcatttttatattactcgaagtataagcactttgacgacaagtatccggatgccaatatgatcattcagatgcagctgctcggattccgcatcgatgagatccctgctgtcatgcatgcgagaagctgtggcaccagcatgcactccggactcaaaccggtggtctatatgttccgcatggtcttctccatcatcggcgtggtatttcggatcaaggtgcttggaattgatgcgggggcaggagagcgggatgttttcatggacaaaaaggagtaagcgttcttttcacgcagaaaatttaaaaagacagcagaagccctatattgctccggggcgtgggtggtatcacatctacacgttccggctggggagaccggaggaagtatccttagactggctgccggattatcccggggagacacttgctctggtccggctggacatccgcgattacgcctcgcgtgaactggacactcttgcactggactttgcggagcagatttttcgtgcctttcaagagcggaaaaaagagatgatcctgcgcgtctgttacgatacggagggaaaggggatggagcgcgagccgcagcgcatttttgtggtgcagagacacatgcaggcgctcggtagtcttgcggaacggtatgcggatgccattctgaccgtgcagggcgtgtttgtgggaagctggggagagatgcatacctcccggtttttgcgcccggatcagatctgtctgttggcgcagacctggcaggaggcgacgcaccatgcgctgacactctcggtgcgaaagccggtgcatctgcgcatgctggcgggaaataagccggtgcgcggactgggactatacgatgatgccatgtttgccggagccgaccatatggggacgttcggggatgtgccgagggaggcggcagattgggaagaaccgtggtgtgcggcagatgagcaggcttatctgagcggacaggatgaaaatattctgtgcggaggggaagcgctggcgggaataaagctgtccgcggaggcagtcttagaggaacttcaaaagatgcaggtgacctatttaaacagcatctatgacccggcgcggatggcagagtggaaggcatgccgtctcccgtccggaaaatcgctgtatgaggagatcggcagccgcctcggttaccggatctgcgtgctttgtgcagagtggaaaaagggaagcctttgggtgacactgaaaaatgaaggattttccgccgtatgccagaaaacagatctgcttctgatccgggagtgtgatgaaggcaaagagcagaaggtgcagaaggttccttatgagatctgcggattaaagggcggtcagacggacgtggcaaaggttgaaattgcggcgggagaagccggcggggaaggaaaagaggagaaactctacctttccatggtgcggaagaaagacagaaaaccgctgccgtttgcgaacgaaggcgcgggaagccggctcttgatcggcagatggatggtgcagggaggattgcatggaagagaaaaaggaaacacagattgattttgtgattgcctgggttgacggcggggatccggcatggcagagagagcgggatcgatatgggaagatgggggagaaaacagcggtaggagagaccggagagagagagaagtccggcgttgcctgcgataccagggatgtgcgctaccgtgattgggactgcctgcggttctggttccgcagtgtggaacagaatgccccgtgggtgcacaagatctattttgtcacatgggggcatgtgccgaagtggctgaatgggaatcatccgaagcttgagattgtgcgccacgaggattatattccgggagaatttctgccgacgtttaattcccacacaatcgagctcaattttcaccgcatccccggattgtcggaacagtttgtctattttaacgacgatatgtttctgctgcggcaggtaagccccggacagtttttccgagacggaaagccgcttgacatgcttgccttacagccggtcgtggcaaaccgagaggatgccgtcatgccgtatatctatctgaacaatgcgatggtgcttgcaaggtattttgacaagcgggaaaacatgaagcagcagccgggagcctactggcatccggggtatccgctcttatatttcgggtataacctgctcgagcgcatgttcccgcggtttaccggattttatacggtgcacggtccgtcgccgtttctaaagaacacctacgaggcgctctggcagcgtgagggagcgcttttgtcggaggtgtgcagccacagattccgcagcagggaggatgtgagtcagtatctgctcagagaatggcagaagctggagggtaatttttatcctgtcaatgcctgccggttctgcaggtattatgatctctcggatcagaatacatcgctgcttcatgtgattgagaagaaaaaaagcccggctgtctgcatcaatgattcccagaaggtggaggcgtatgacagggtcaagagggaattaaacgaagcatttttaaaagcttttccgaaaaagagttcctttgaaacggacggagcaggggaaaagcactaagacagagaggagacgccatggaaacaaagagcagaacagaatattcggcaatgaatacaaccgtggcggtcatctccagaatgacggcgattctgatgggatttgtgacgcgtgtgatttttacgcatacgctgagtgaaaactatgtcggaatcaacggtctgttcaccgatattttaaatgtgctttcgttgaccgagcttggcgcgggcacggcaatcacttacgccttgtaccggccgatcgcggagggcaacatcaaaaagcagcagcagctgatgaagctttaccagacattttaccgtggaaccgcggtgtgtgtgggcgtgctgggactggcgctgattccgtttatggacgtgctcatgaaaaacagacccgaggtggagcatctgacgtttatttaccttctctatctcgccaactctgtgctgtcgtatctgctggtgtacaagaggacgctgattgaggcgcatcagatgaattatgtggtgctcatctatcagaccggctttctggtgctgcaggatctgctgcagattgttgtgctgcttactacgggaaactttattctgtttttgttgatgtatctgatgtgcacggttctgtcaaatgtgtgtatctcgcgaaaggcggaaaagcttttcccgtatttaaaggaaaaagagaaggaacgtcttcccgcagaggagcggacgggactgtttcggaatatccgcgccatgatgatgcacaagcttgggacggtcgttgtaaataataccgataatttactgatctccgcgtttgtcggcgtggtcagtgtcggaatatattccaattattatcttctgatcggttccgtccgccaggtgttggaccaggtctttgcgggaattacagcgagtgtgggcaatctgggagcaacggaggaccagggcaaaatccgcgagatttttgaaacggccttttttatcgggcagtggctttacggctttgcggcgatctgcttgtacgaattgctcaatccgtttgtggagctggcttttggcagacagtatctgtttgaacgttccgttgtcatgatcttatgcatcaactttttcatcaacggaaccaggaaagcggtgctgacctttcgggattccatgggattgttctggttcgaccgctacaaggcgctggcggaggcggcgctcaatctggtgctgtcgattcttctggtaagacagtatcagacgctcggcgtatttatcggaacgtttttgtcaacgattctcacatcggtgtgggtggagccgtttgtcctgtaccggagaagactgcatctgccggtgcaccggttttatctgcgctaccttttgtatgcggtctgtgtgggagtggtatggattgcaacagacctggtctgcggactggcagagggaagtccgcttaccgttcttctcatccggctgccgctctgtgtggtgctgcccaatctgttgttttttatggcatacggcaggacgaaagaatggaaacgggtgttggagcgcctgcggcacatcgagtggggcaggctgcatcggggaggaatgtgatgagacagcagatggaagaagaacaatgggatttgtgcaggctgctggatgcggcgctgcacggcagaccggcggaaatgctcccgccggctgaaaaatacggagccattcttgaactggcagaccggcatcgcgtgctgccgctgctgtacgacgtgctggcacccaagctgcctgaagaggatgagaaccggaagcgccttgagaagagaagcgcagagacggtgcggcagagctaccgcctgctgttcctcgggaaatatgtgacaggacttttgcaggaacatggaatcgagacggttcttttaaaggggagcggcacggcgggactctacccggtgccggaacttcgcaagtccggggatattgatctgctcgttgcggatcagaaagcgggagaaaaggcgtatgaggtgctgcatgagcatggattccggaaagccttagaacagcatgcacaccatcatatcgtctgcgttggcacagagcagatcggaatagaaattcacgttgcgctggcagagccgttcgactccaaaagcgtcaacgagtggctcgccgcacatcaggcggaatttctggcgcattgtgagaggacggcggtgatgggcgtagagtttccggtgctgcagccggcatatcatgcgttttacctgctgcttcatatgctgcagcatttcctgcgtgccggattcgggttaaagctgctctgcgactgggtcgtattctgggaaaagggatacggcagcggggtagaggagcgtttttgctccatggcagaggaatgccgcgtgatgggatttgcgcggctggtgacggcggtctgtgtaaaatatctgggactttccggggaaaaagtgcccctgctgctgtgcagatttgactgggaggcggaagctgcaaatctggaagcattcctgacagagattctggaagcggaggagttcggcaagtcaagtgccgaccgtatggtggcgctgcggggaaccggctggtgggattattgcagggaatttcatcatcagatgctgctcacctattcaagggcagggcgctaccgcattctgcatccggtgttgtgggtgatgatgttctgcggttttgcataccgcaacgttaagatgcgccgggtatcggggtacgcggtgctaaagaaggcgagagcgcgcggaaagcttgtggaggagatgaagctgttccgctagaaaaaaggatgttcgacgggaaaggaggagagcaaaatggatacatggtactgggcactggaatatgtcagggtattttttgcctatgtgatgattctgtttgtgtggccgtctgtggtattccgggattatttaagaggcaggagccgcacggtgcggtttgctttctgtgtgacggttccggttgtgctgctcaatacggtggtactaagtctgggcgtgtttcatatactgtacggatggctgattgccgtgctgttttacggcacattgctgcttggcttgctaagatggcaccctgtgcggcgggagcagatcaaaaagatttcccgcctgtttctgggaacctacggcatccggcttttgctgcttcgcctgcgcaacagagtaaaagacgggatcgggcatgtacatgcacaattcaggcagagcatacggggacggcgctgcgtctatctgatgcttggtgtggtcgtgtgctttggcatggtgtatttttcctacggggcattccatgattactcctacgggtttggcgatatgtaccgccaccactcgtggatctacgggctgttaaacggtacgcctttttatgagggaatctacccggaagccatgcactgctttatctacgccatgcgcgtgctgttcggggtaaagatttacagcagccagctgtttctggcgggaatccacgtcgcggtttttctggtcagcgcgtatctgctgctgaaggaattatttgcatgggatggaaccgcggtgcttgcactggcgttgttcctgaccgtggatcttttgtgcattgacgagatcttttccatgtcccgtctgcagtggacgctgccgcaggagttcggactgtatacacaattcctgtgcgcactgtttctgcttcgttgccttaagacggactttagcgacagatccggcagccggagagagcggttcagaaagtttttgacggatgagaatctgctgctgtttctgctgtcgctggcggcttccattgctattcatttttatgtcacgatgatggcgtttttcctctgcgtggtgattgccgcgtgcaggtttccctctctttttcaaaagggaaggtttgtatctctcgtaaaggcggtctgcctcggtgtgctgatagcggtgctgccgatgggaattgcgtatgcgaagggtgtaccgtttcagggatcgatcggatgggcggtcaatgtcataaacggtatggataccgcggaggggcgtaccagccaggcggaacagatcttagaacagacgcagacatcgagtgagcagacatcgaaggagcagacatcgtccggtgagaggatgacagagagcggggagacgacagaaacggcggtgcagccgacggaacaatcccacggggggaacgggcagataccagatggcgggattgcggatgcgggacaaaatagcgctccgaaacaatccgccggtaatcatatgcttgcgatggcagaacggatggcggcatcgttcgccggcaaggcacaactggtctggaaatacgggtatgtgcagctgtaccgtgagaaccgggcggaatggattgtggtttttagcggtctggcactgatcctctgggcggtgtaccggatggcggcggggattatcaccggcctgctaaaaaagggaagtgacagcaaaaagatccggcagctgtttgacggatatccggtgctggtcggaatatcggtattgcttatgattgtctatgcggcgccgttcctcgggctgccggagcttattgcaggctccaggctatgctctacggaacagcttttcattctggcggtcgtggtcattccggtggatctggctgccggggcaatcgcccttacgcccggcagacgtgtgctgccgcttgcgcttgccgcgggagtggcggtgatctatgtggggacgagacagcttggcatttttcacggatacctctactatgaactgaccagatataatgcggcggtgatggtgacacaggacatcacggataaattcccggagaacagctatacgattgtgtctaccacggacgaactttaccaggtgatcgaacaggggcggcatgaggagcttttgactttcctgaaccgggtgaacggaagtggctataccctgccgacggaatacatttttgtgtatgtggagaagcggccgatccaatacgcgcagaaccacttctttaccggaccggactggctggcagaggaaaaatacacttcttactatacgacctatttcagcgcggggaacagcatcaatgcctcggagatctcgcgggagcaggcagagaaggagatgatgacgttctcaaaactctcgcagacctattccaatctggacagccgcacgatactggaatccaaagcgtacgaatggtgcaggaagtttgaagcatcctatccgcaggagatgaaggtatattatgaagatgagaatttctgctgctatatgatacggcagaacacctatcggttatatcagctggaggaatcatgagtggacgtggaaaaaagtttttggcgcttggcgtggcagttgttttgtgccttgcagcagcggctgcaatgggcagcctgtttcactggaaggtgacatgtacgccggcggcgtttgcagagtcatccaggaggctttccaatccggaccgcggattttattacatttacggctaccgcattacggatgaaccggtcgactatgccacagatttaagagacaggacgagggaagatgacgcgacgcggcttggaatgatgcagatcaatctgcgggaataccggacgggtgccatatcggaggaggggctgtccaatgtccggcagttgtttgcagccatggcggacagcgacaagaaatggatcgtccgtttcctctatgactggaacggggagaacgagcagtatgaaccggagaatcttgacattatattgcagcatatggagcaggtgggagatgtgcttcgggagtatcacagctgtatctatacgcttcagggactctttatcggcaactggggggagatgaacggaacaaaatacacggacccggattccatgagagaactggcggcacgccttgccgatgtgagcgatgcgtccacgtttctctccgtgcggacgccggcgcagtggagaaaaatcacgggggaggcggcaccggacggctggacagagaacccgctagccaaaaggcttggactttttaatgacggcatgctgggaagcgtgagcgattacggaacttacagcgataacaccagacaggacgccggggatttttcggcgtggacgcgggaggaagaactgtcatttcaggatgtattgtgcagcagtgtgccgtccggcggggaagtgattgtcgataacccgtacaatgatcttgaaaatgcgatcgcggatttaaaaaccatgcatgtgagttacttaaacgaggactatgacaggaatgtcctggataagtgggcaggaacggtcgtgaatacagatgactgctacgacggaatggacggctggtcttatgtggaacggcatctggggtaccgtctgtggattgccggtgccgctttgagccattcgttctgggcggatacggtggaggtaaatgctgctttaaaaaacagcgggtttgcaccgttttaccggcagacaaaagtctgtgtgagcgttacagatgaggcgggggcagtctgctatacggatgaatgggaagagaaactacttaagctttccggtggaaatgaggacgacagggaactggcgctcaccggaaccattccgatccgcggctgggagagcgggacttaccgggtatatatcaatcttagcgatgcagacagcggggaacagattttacttgcaaacgaagcggatgccacagaaaacggatactgcctcggtgaggtggcagtgcgataggtgcacaacgatgcaagtacaaaggcttacaagtgcaaaaacgtacaagaaatcacaagtttgtacgaggaatcacgccgcagaaaccactataaatgaaaagaaaaagaatcctgtatgtggtgggattgtggaaggtggtttcttatgcagaactatgaaaaaccggaagtgattttgatgacggaatgttcggagggcgtctatctggcaagcggcggacagaccggggaagatccgacggcaggtggatgtgacagccggtacatgaagggagcctggaaaaagccggattacagcaacagcaatgtgcagatgcgtgcctatgacagaaaaggctgcgagggctgtgcggcggatgacggtgacggctgcaagctgcaaaagggtgatgcaaaagtcgccggaaatgtctatcagcctgtctgggaacagcagggactgaccccggataccatggtctggtagagaaaatgccggcatgccgttctggcagaaaattcatgcttgacagcgcaaacacagaattttatacttaaaatatgtgtatgagtcagcggcagaagtgccgcaaaaaagtgttagaaggtggctggttttatgacgaattatgagagtccggtgatgatacggacggaggagcttgcagagggggtttatcttgcgagcggaggcatcaagtgtgacagtgtctacatgaacggtgtgtggcaggtgccggattattccgactggaatggcaccacacgcggatacaagcagcagttcggatgtcttggatgcccggcgaatactgcttccggctgcggtctgttgagccattatgtggattccgggtatgcgggaagttacgatgtggataatggtaaccgtaagccgtcatgggagaagaagggctatggtccggatgatgcggtcacagactggaacatgtaacaatctttaaaacgggggaaatgctatgacgaattatgagagtcctgtgattcttagaacagaagaacttgcggaaggggtctatcttgcaagcggatgctatacggcgagcgcgtacattcatcagacaccgcagtccggaagcggggagtaccgtatccaggtaaacggtcagcacagtgccgatcatacgaaagaggcgcagacactgaccatttcgttcagtcttccggtaacctacactagttccggcggatcactggtatccggcagcggaacgaatacacttgtgatcaattataactatcatcagaatccgaccgacaatatcggactcggggatctggttgtgcaggcagatgcggggcttgcggtgacaagcgtgaacattacagattaagaagccggcaggcgaccgggcggatgtgagaagtcaaaagcttcgcgggaggaatcggttcctcctgtgaagctcttttttatgtaataggaaacttctttcctattacataaaaaactctccagggatcgcactgcggcggagacgaaagatgtcgcaagagcgacccgccgcaggcggagaatcctgcagacagaattcatttttatgaaagaataggaaaattacaatgcttgagaagttcagacattacagagagcggatcaaagagggaatgctccgtgatatgtggagacagacgctatggatctacgaatatgcgagactttattggaagcagatgatattttatacgcttctgggacttgcgggaacgctggtatcgctcatttcaagtctcatttcccgcgatatggtggatattatcacaggacagcaggcggggcttctggcgcgcaccttctgcctctatatcgggttctcggttggaaatgtcctgatttcccagatctccaattactttgcgaacaagatcagcatcagcgtggacaatgccatcaaggcggatatttttgaaaaaatgctgttgacggatctggagtcaatccagaactaccacacgggagatcttttaacgcgctggagttcggatgcctccaatatttcaagcggtgttctaaactggattccgaatctcgtgatctatacggtgcgttttgtcagcacctttgcggtcgtgttctaccatgatccgatgttcgcgttattagcgctgatcggaatgccggtcagcatgctgatgtcgaagacgctgcttcgccgcatgaaggggaataatgagcggagtgcggcgatgagcgcaaagatgtcgggctttaatcaggaggcattctccaatatccagacaatcaaggcctttgatctgatccggctgtacgcggagcgtctgcgcggtctgcaacgggagtatctcaccatgaagctggagtttcagaaaatgtccatggcgacctcaattctgctgtcgatcgtgggacttgcggtgtcctacagctgttacgggtttggaatctaccgggtgtggagcggggcgatttcctacggtaccatgactatgtttttatcgctgtcgggctccctcacgggaaccttaaaccagctggtgtcgctggtgcccacggcagtgtctttgaccacatcggcgggaaggttgatggacattcttgatatgccaaaggaagacttttcggatgccgatcaggtggagcagttcgccgcacgaaacagaacggatggcatcggaatctccttctccggggtaagctatgcctaccacaatggaaagcaggtattctgcggggcggactttttggcgcgtcccaaggagattgtcgctctcgtgggaccttccggagagggaaagacgacgatgctccgcctgatgctgggacttttgcatccgcaggagggcgagcggaccttgatcggggagacagacggggagaagattgccgtggatccctctgcaagaaggctgttttcctatgtgccgcagggaaataccatgttttcgggaacaatcgcggaaaatatgagaaatgtaagaccggaagcctcggatgaggaaatctgtgaagtgttaaaggcggcatgtgcctgggagtttgtggaaaaacttcccgatgggatctattccatggttggagagcgtggaggcggattctcggagggacaggcgcagcgtctgtcgattgccagagcactgcttcgccgatcaccgattcttctgctggatgaggcgacctcggcgttagacgtcgcaacagagcgcagagtgctgcggaatatcatgagcaccacggagcccagcacctgtatcgtcacaacacaccgcccgacggtattgtccatctgtcagaaggtgtaccgcatccgggagcagaagtgtgtgcagatgcaggaggaagagatccgtcagatgatgcgggaattctaaagagcatcgatggcggcttttaagatcccggcggcggaaggctcttttgtgcagtacagacggcaggaaaagatgagcggggcgagggcttcggaaaaatgcagattgcgaaggagaagctcctttgtccacgcgggggagatcatccgctgcaggatgtggagcactttttcgtccggctgcagggactgcacctgatctatggcagcctgctttaagaagatgatgccgccgagcggatagtctttcggggtgcagatgcccgatgtgccgcaccatggaagtccataggcgtagggtatgttgtctctgattccgagcaggtttaagtcgccgtttaagaggggcgtctggtacagatcatgccacagggcagagtgtgtggacttcccggttccggaactgccggaaacgagaaaggcgcgcccgcggtacaaaaaagaggcggagtgcagcacataaagctccttctgctgagccaggatgagaaaagcgaagcgaagtgcgtgaaacaggtcttcgatgtgcatatcatccggatccggcatacggtaaaggacggcgcgtgagccgtctttttttacatgcatttcgcggatgccccacggcgctgcaaaaaagaaacaatacgaacttccgctgtcgcagatggtaagttcctccgtgtgaataagcacggcgccgtaaggaatggaagccggtttcccggtcagaataagaacctcctggtcgaagtcttcctcttcgcaggaaaaagcggagaagaagcggtcgtataggagagagggaccgcggtaggaaaagaccagaggaccgatgcggtagaaaagaggaggcgtatcatcgccccggctttcgggtgtatccgcaagaagaattcccatacggcacagggaatgaagatactggtcgacatcttccgcaagtgccgcgcgctcgcgctctgtggtatggtaacggtctgcgagaagggcgagcagttcctcgcggctatcgccctctaagatgccgtcccacagaagtgacccggaatcgttgagccgggtggcaggagcgggagctgcgatgagctgtccgtaaggaagcagatagggaatacctgcgagcgttgccttgatgtatcgatcgttgagtttcataccggtgtcactcctttattagcggttcataagtatgcttattatagcattcagaggtaaaaaatgctacaatgaatgaagagaaacgggaggggaagaatggagcagatctatgagattgagccgctccttaaggcgggagtatgcatacagattcatccacaggggtacagcatgtatccgtttatagatccgcggagggacgaggtggtacttgccggcatagaggatgggagcgcgctgcggcgcggggacgttgtgctttatcgcagggaaaacggaatgctggtactgcaccggatttataagatcgggcaggacggactgtatctgctgggggatcaccagacagccatcgagggacccgtgcggcgggagcaggtcaaggggaaaatgaccggtacggtaagagacggacgctatatggatgtggggaatccgggataccggatgttaagtgtggtgtggctatggctcagaccggcgcgcagagctattatggtgcctgccgcgcggctgcggcgcatggtaagattcgcacttttcagaagaaacaataagcgctataataaatagagggatcaaaaagcctgggggtgattacatgatgaagattttatttgcagcttcggaagcagtgccgtttatgaaaacgggtggtctggcggatgtgaccggatcgctgccggggtatttcgataagaagcattttgatgtgcgcattatcatgccaaagtatttatgcatggatgaaaagtggaaggcacagctgcggtttgtctgccatttctatgtgaatctcagctggcggagacagtacgtcggtatctttgaaacggtacagaacggcattacatactattttgtggacaatgaattctactttgcgggagataagccgtatcacaatatctatgaggacgtggagaagttcgcattcttctcgaaagcggtgttagaggcgctgccgtatctggatttctggccggatgtcattcactgccatgactggcagacgggactggtaccggtattcttgcggacattttacggggatcagagatgttattccaatatccgcacggtcttttccgttcacaatctgaagtttcagggaaggttctcactgccggcggttatagatattaccggtctgccagagcagatcttttcttcggataagctggagtcctacggggaggccaactacctgaagggcggtgtggtgtatgccgatgcggtcacgacggtgagccccacatatgcgagagagatcatgacgccggagggcggagagggattggacggtctgatgcgcgcccgggaaggcagcctgtatggaatcttaaacggcattgatatcagggaatatgatccgcagacagatgcctatctggcgaaccattacaacgagaccaatcacacggaggggaagggactcaataagctaaagcttcagaagcttttgggactcccggtggataaggacgtatttttacttggaatggtgtcccggatgacggatcagaagggatttgacctgattgcctatgtgatggatgaactgatgagcaccgagcgtctgcagcttgtggtggcgggtaccggtgaggcgcgctacgaggagatgctgcgctattttgcggaaaaatatccgcagaagattcacgtgacgatcggctactcggaggagcttgcacaccgcatctacggctcctgcgatgcgtttttaatgccgtcgctgtttgagccgtgtggtctgtcgcagctgatgagtcttcgctatggaaccgtgccgatcgtgcgcgagacgggcgggctgaaagatacggtgatgccgtacaatgaatacgagcagaccggcacaggattctcctttgccaattataatgcgcatgaaatgctgggcgtcctccgctatgcgatgcgcgtgtattacacgcagagaaaatgctggaacggcattgcggagcgtgcgatgcgggaggatttctcctggaaaaagtcagcggagacttatgcgcggctgtatgaggatatcgtgggcagaccataggatcacatagtgatctggtccgtctcgagggagtagtagtagacgtgatccgacaaaatctcttctctggccagctgggacgaattgacgtcccggaccatggaggagagcgtggacatactgatctggttgtctgcgggaatcagaagaacttcgtggacgctgctcggcagaatataaaaatcactgccgatgcgccgggcaaaatcgtgcagcagatgctgatagagaatacaggaggagccgttgagcctgtgctggttggacagaacgtagatcggaaaaggctcaatgagatcgcttcccgctggatccgcaaattcatccgcaaacagctcgcgcagaacttcggtcatgctgcgcagatcatagcggagcagctgcggtgtgtttgccatggcgagggcgtagaggtcgtctctggtaatcccccagtaagtgagatgttcattgtggatcaggaccgttgctgtgccggaagaatcagattccaccaggcataagaagacgatggcgagatccaaaaagcgatagtagggaacacgctttaacagttcgcggttgcgctcatagttgatcagcttcattgtgacgcgggattttaccttgtcatagtcggtgaaaaaagagatgtcaacaggggatttgggacggttctcccgataggcggtcagaatgtcgtctgtgatgtcggaaaacgatctgccgcgctcatactgtccatagtagtaatccagataaatggtgggcgccaggttctgaccgggcgcgagaatggtgagtccgtcaagatgggtatcgttgtttttgagaatgtctgaaacagtgatgcggacatcggagccgaggcggtccgagagagtagagatgatctgctgcttgaaatcgtggtaattcataaaatcctccgaatgaatggaggggaagtaaaatcgtacagatggggaagaaaaatccacatgaatgcgtagctgcatttatgtggatttaatttatcatatagaaagtcaaaaagcaattggacaatattactaaaaatgtcggatgctattcggactttaatgttttccagagatagctgtaaagctctgtggtatcgctgccgagctgtttgtagaccgtgcagttcgcaaagacatcgtcaggaggaaagatcgtggtatcattgcgggtgtcctcgtcaagcgcatcgacgacggcctgatttggcgtggcgtagcagacgtagtcaaaattgagcatggcgacgtcctcgcggcacagaaaatccagaaacttttcggcgttttccttgtgtgtgctgtcagccggaatgaaccaggaatcgatccagaggttggatccctccttcggaaccgtgtaggagagatcggcgttggactccatggcggtggctgcctcgccggagtagacgagcgctaacgccgcattccccgcgatcatctcatctgcggtctcatccacataataagcgtagacgaggggtttctgatccaccagaagcgagagcgcgtcacgcagatcggtctcgtcctccgtgttgatgtcgcggcccagaagacggagcgccgggacaaaggaatcccggacggagttctgcatgataatggtatcgcggtagcggtcgtcccacaggatgttccagctctcggtctcctcctcgctcaccatggtcgtgttgtacaggattcccagcgtgccgtaaaagtacggcatggaatactggttctgcgggtcgaagacctcggcggcagcaagaatagcgggatcaagattcttatagtaggagaaggaggaaaaatcaatcggcgccacttttccctcgtggatcagccgctccaccatataatccgaggtgcgcacgacatcgtaactgatggaaccggcagaaaacttcgtgtacatctcctcgggactctcgtattcctcgagcttgatcttgatgccggtttcctgctcaaatattttgatggcggaggcatccagatatttgccgtagtttaacacgacgagggaattgtcgccggagctgccggcggtatcggtatccgcgctgccgcacgccgagagaagcagggcggcaaacgcggcggtaatcagtgcataatggaattgtttcataagtaagtggcacctcctttaatggataccggcatgattcccggcgattctgtccgaacggcagttcatgacaagaagcagaagaaatgcaaacaaaaacaaaatggttgacagggcgtacaattccgggcgcactcccttgcgcagctccgtgtagagcatcgtcgacagggtgttgacgccggcacctttggtaaaaaaggtgatggaaaaatcgtcgagcgacatggtaaccgtcatcaggaatccggaaaatacaccggatttgatctccggccaggtcaccttgtagaacgcgtacatcggagtggcaccgagcatgatggtgaggttcttttttttcatggcactgatgccgatcgcggcaagcgttccgatgacggtcgagacaaaccgccccatacgacacgtgattttgaattgttaaaagagagcacgatgagtacgaggatcggcagatacaaaaataaaaagatgacggcaagatagatgcgctgtccccatttctttaccataccgcggtacctccttcgtctttatccagcacattcataagtgccatacttgcaatgacaaacagcatcagcacaacggacagtccggaacccagatgccagttggtgccctgcataaattcctgctcaatgacgtttccgattaagagcaccttgcccccaccgagcaggtcggagatgacgaacgaggtcagtgccggcacaaagaccatgacgattccgcttaacacgccggagagggtgagcggaaaaatgatttttacgagaacggtcagattgttctcgccgagatccctggcggcttcgatgacgtccttgttgatccgcaccatggagttgtagatcggcaggatcataaaaggaagaaaatcgtacatcatgccgaacacaacggcggtcggggtgttgagcatctccacatggccggtgccgacggcttctaaaatggcattgacaataccgttgttggagagcagaggtctccacgcgagaatgcgcagcataaaattcatccacatcgggaggatgaacaaaaagacgacaaagctctggtgacggaagcggaatgtgcttaaaatcatgcagagtggataggacaaaacaaggcagaacagcgtgcacagaaagccgagctttaaagagagaagaatcgacttgacatgcaccggatcggcgatggcagcgatattggaaaaggtaaagctgccgtccgccgcagtgatggcataatagagaataaatacaagcggcagaagaataaatccgatcatccagatcagataaggtcctgccagaagctgttttttgaagttagacatcgattcctgctgcctcctcgtcctcggattccggtttgttcataatctggatgttgaatggaatcacgcggatcccgacatgggttccgacggtgtaaaactgcgtggtgtccaccagccactcaaagccgcccgccatgatctcgatctcgtagtggacgcccttgaagatgacggaagtgatatcgccgtccataaagccttccccgggtgcgacgatctccacattctccggacggatgacgacgtcgaccggcgtgttggtgccgaatccttcatccacacagggaatcctggtgccgagaatctcaacgacccggtctttcatcatgataccgtcgatgatattgctgtccccgataaaatcggctacgaacgcgttgaccggctcattgtagatcatttccggtgtgccgatctgctggatgtagccctggttcatgacgacgatggtgtcggacatggtgagggcttcctcctggtcgtgcgtaacaaagacaaaggtgatgccgagctcgtttttcaggcggatcagctcatactgcatttcctggcggagctttaagtccagtgcgccgagcggctcgtcgaggagaagaaccttcggctcattgacgatggcgcgggcgatggcaattctctgctgctgtccgccgctcaaagaatcgatggagcggtgctcgaatccgtccaggtttacgagctttaaggcgtatttgattttgtcgtcgatgtatgccttgcttttttttctgatcttaagtccgaaagcgatattttccgcgatggacatatgcggaaaaagggcgtatttctggaatacagtattgagatcgcgctcattgggcgggagggcggtaatatcctttccgtcaaacagaacctggcctttgtcaggggtctcaaatccgccgataatgcgcagggttgttgtcttgccgcagccggacggaccgagcagtgtgatgaattcattctcacggatgtagaggttcaaatcgtccagaatgacattgtcaccgtaggatttggcaatgtgcataagattgatcagttttttgctcattcgggggagtcctttcttaatatatgcagaatgcacccgcatgtctgcgggagatcgatgatatgctgattttgcagtattttcatagcataagaaagattttattttaataattgaaaaaaagtagttgcaattttttgaaattccgttataataactcaatgtgatgttaaacatgacctgccgatatggctcagttggtagagcaacgcattcgtaatgcgtaggtcgtcggttcgagtccgactatcggctttaaataaaaactctcagtaattgtgctgggagatttttatttatatgctagttataacacatgcttatcaatgtttattagagcgggttatgactgagtgcaaaaggaggaaaatattatgaagaaaaaagtgattagcttactgctcactgcagcaatggcaaccaccatgttcgcaggctgtggttcttccagcgaggagaatacaactgcagacaacaatcagacagcagcaccggcagcgacagaggctgcagcagaggagagcacagaggcagctgctcctgcagtatccgctgatggaaagatcgcaatgattaccgattccggtgacatcacagacgagtctttcaaccagatcacatgggagacctgtgtggcttacggtgataagaacggtattgagtatcagtactataagccggctgaggacacagacgaggagagaatcaacgcaatcgaccttgcagttgcagacggtgcaaccgtaatcgttatgccgggttatctgttcggaccggcaatcgctgaggagcaggatctttatccggatgtttcctttatcgcagttgatgtgacagaggctgacatcgtagatctttccggcaacgcagtcggaatcagcgacaacgtatatatctgttctttccaggaggagcaggcaggttaccttgcaggttatgcggcagttaaggatggttacacaagccttggattcctcggtggaatcgcagttccggcagttatccgttatggttacggttatattcagggtatcaacgatgcagcagaagagatgggcgttgatgtagatgtgaaatactactatggcggtcagttctacggaagtgatgcgatcacagctcgtatggagggctggtatcaggatggcacacaggttgtattcgcatgcggcggcggtatctacacatctgctgttgaggctgcagagcagtacgacggcaaggtaatcggtgtcgatgttgaccagcgtccgaagatcggtgatctgtgcattacctctgctatgaagggcttaggcgctgcagtgaactctgcactggatgcatactttggcggcaactgggcttccatcggtggcaagtctgagcagctcggtctggcacagggcgattatcttggtcttccgacggatacagattcctggggctttacaacatttacggtagatgagtacaatacagtattagacggactcaaggacggcagcatcactgtttctaacgatacagagaatcagccggaggtaggttctcacgtgaccgttgactatgtagagtaagcggactctttaaaggggaagagaaatagtttctcttcctcttttttttatatccagaagatgttatactataagatatgcaggaatgattcatgcggcgcatgagaaaaaaagaacgaagaggatatacgtatatggaaaacgaatatgttattgagatgttgaacatcacgaaagaatttccaggaatcaaagccaacgataatattaccctgcagttgagaaagggagagattcatgcactgcttggtgagaatggtgcagggaagtctacccttatgagtattctgtttggtctgtaccagccgacgtccggtacgatcaaaaagaacgggcaggttgtacagatcaatacgccgaacgacgcgaatgatctgaacatcggaatggttcatcagcatttcaagctggtggagtgtttttccgtgctggataatattatccttggtgttgagccatcgaaaggattgttccttgaaaaagatggtgccagaaaaaaggtactggagttgagtgagaggtacgggcttaaggtggagccggatgcgctgatttcggatatcaccgtaggcatgcagcagcgtgttgagattcttaagatgctctaccgtgataacgaggtgctgatctttgatgagccgacggcagtgctgacgccgcaggagatcgaggaactgatgaagatcatgaagaatctcgcacacgagggcaaatccattctgttcatcacgcataagctgaatgagatcatggaggtggcggaccgctgtacgatcttaagaaaaggaaagtacattggaacggttgacatcgcggatacgacgaaggaagaactctccaagatgatggtgggcagaaatgtaagcttcaccgttgacaaggatgagaaagagccgggggatacggtgcttgaggtatcgcatctgacggtggcaagcagatcgcatgaaaacaatgccgtgcgggatgtctcgtttcaggtgcgccgcggtgagatcgtatgtatcgcgggtatcgacggcaatggccagacagagctggtgcaggggctgaccggactggagaaggtcggaaaaggcactgtgaaattcctgggacaggacatcacaaatgccacgatccgggaacgttccaagcacggtatgagccatattccggaagaccgtcataagcacggactggtactggactacacactggaacagaatctggtgctgcagcgttactggcagccgcagtttgagcgcgcaggctttatcaagtcgggcgaggtgcgcagatatgcgcagaagctgatcgagcagtatgatgtgcgaagcggtcaggggccggtgaccatcgtgcgcagcatgtccggtggtaaccagcagaaggcgatcattgcaagagagattgacaaggatccggagcttcttgtggcagtgcagccgaccagaggccttgatgtaggcgcgatcgagtatatccataagcagcttgtggcacagcgcgacaaaggaaaagccgtgttgttagtctcgctggaactggatgaggttatggacgtgtccgaccgtatcctggtgatgtacgagggcgagatcgtaggagaacttgatccgaagaaagtgaccgtggaggaacttggactttacatggcaggtgcaaagcgggataaggttgcaaaggaagcatgaaggcgaagccttacagattaacagaaaggaaatatgacaatgagtgaaaagacaaaggatgtcctattgtccatctttgcatcgcttctttgcattgtgatcggacttctcgtgggacttatcatactttattgtatcaatgcagagaatgcattggatggtttctcaagaattatcaagggtggtttttatctcaaaccaaagggaatcggaagtgagattgcgcaggcgacaccgcttatcatgacaggtctttccgttgcgtttgcttttaagacgggactgttcaacatcggtgcggcaggccagtataccttgggcgtgttcggtgcattgtattttgcactgattctgcagatgccgtggtatgtatgtcttttggcagcaatggtctgcggagccatctggggtgctgttccgggaattttcaaggcgtactttaatgtcaacgaggttatcacctccatcatgtttaactggatcggtttatatctggtgaacgagctgatgtacagcacggtatccggaatgtacgaccagaagacgacgcgtacttacaagctgagttccgcggcaccgcagtcattgattccagattgcggcatgagcgctgtttttaagacaagctcgaccacgattgccatttttatcgcgatggcgatcgcaattatcatgtatgtggtactcaacaagaccacattcggttatgagttaaaagcctgtggctttaacaaagacgccgcaaaatatgcgggcatcaatgaaaaacgcaacattgtgctttccatgacaatctccggcgcacttgcaggtatcggtgcgggactttactatctgtccggtgcatccgagtggaatccgcaggtgtccacagcgcttccggcgatcggtttcaacggtatcccggtagcacttttggcgctgagcaatccgatcggcgtggtatttgcagcaatctttgtcgcacatatctccgtgggaggagcgtatcttccaactaagtattatcagccggagattgcggatctgatcgtggcagtcatcatttacctgtgtgcgtttgttatgctctttaagagcgtggtcgtatcgaagctcggcaggaaaaaagcgaagaaggaggatgtgaaataatgttcttactgattaagtttacattactctatgcggtagtattgatgctggtggcgcttggcggtatgttctcggagcgaagcggtgtaatcaacattgcacttgaaggtatcatggcaatcggcggtctggcgggcgttttcgtcctggcactctgcggggattcccttccgtccggcgtgctggtggcggtgtccatcctggcaagtgcggtagcgggaattctctattcccttctgctcggattttccgccatcacgttaaaggcggatcagacaatcggcggaacggctttaaatatgcttgccacagcggtggcgatcgtagcggtaaaagcgttcaacaactcctcggcagcgggaaacggtgcggcttccgcaaagctttcctacagcaacaaggcatttatctataaaatcggaccgctcacgatcaacattttcctgattatcggaattatcattctgattgtaagctatgtatttttgttcaagaccaaatggggcttacgtctgcgcgcgtgcggtgaacatccgcaggcagccgattcggtcggtatcaatgtgtatcagtggagatataccggtgtcatgatctcgggtgcactcggcggaatcggaggcttcgcctacatcgttccgtccgttaccacctggaactttgaggtcggcgtagcgggagccggtttcctcgccctggcagttatgattttcggacagtggaagccgttcaacattgcgggcgcagccgtgttctttgcggtattccgttccctggcgaacatcgcggattccaccgtgcttgcaaacctcggattgtccaagaatatctacagcatgatgccgtttatcgcatccatgattattcttgcgtttacatccaagaattcccaggcaccgaaagcggagggtattccgtatgataagggtgccagataggaagacggcgtaagagaccggaatttccggaagcgtccgggagcatatgataacaaacagaaaggactctaagatcatgatttcaagcaaatattttgaccatactattttaaaggcagaggcgacggaggcacaggtggcaaagatctgtgacgaggcgcttgccaatgatttcgcatccgtgtgcgtgaatcagtattacacccgttttgtggcagagaagttaaaaggctctgatgtgaaggtgtgcacagtggtaggtttccctctgggaatgtctgacaccagtgtgaaggcattcgagacgaaggctgccatcgaggacggcgcacaggagatcgatatggtaatcaatgtcggcgcattgaaggacaagaagtatgactatgtaaaaaatgatattcataccttaaaggaagtctgcggcagcgatattgtcttaaaggtcatcatcgagacctgtcttctgacagacgaggaaaaggtgaaggcatgtgagttggcaaaagaagcaggagctgatttcgtaaagacttccaccggattttccaccggaggggcaaaggcggaagatgtcgcactgatgagaaaaaccgtgggtgatgatatgggtgtgaaggcatccggcggaattcacacggcagaggaagcccaggcgatgatcgatgccggagcaagccgccttggaacgagcgcaacacttgccatcattgggaaatagtaatcaggagcggtaggatgaatacaattttgattggaattgcaggaggcaccggaagcggcaagacaacacttgccgacaaactgatcgacagctttggcgatgatgaggtgagtattctgcgtcatgataactactataaacgccatgacgacatgtgttatgaggaacggtcgaagttaaactatgatcatccggatgcgtttgatacagcactgttgtgtgaacatatctgtaagctgaaagcgggagagcagatctatatgccagtctatgactactcgatacataatcgttccgaggagaccattctggtaaaacctgcaccggtgattgtgctggagggcattctcatttttgctgagccgagtctctgtgatcttatggatatcaaggtatttgtggacacagatgcggatgtgcggattctgcggcggatcatccgtgatgtaaaggaacgcgggcgttcgttagacagcgtgattaaccagtatctgacaacggtaaagccgatgcatgaacagtttgtagaaccgagcaagcgccgggcggatattatcatcccggaagggggagaaaatatcgtggcgcttgacatgctgattgaacgcgtacgcaaacatttaaagaataaataagattagcgcaataaagtggcaggcactgtgtctgccatttttttgtatgcaggattgctcggatgcagatgatcgccgctgtcataaccttttgcgaaagagcgcggatcatcggctgcacgaagtgcctgatcgaaatcgatacagccgtcgctctcgtggttggagcggatccagtcattgacggcaccgcgcagctcctcgcggaacggtgcgtaggtgcgccagccgtaaatcggcagaagggttccgagatagacgctgtcgtgaagctttctggcctcctcgatataccatttcagaccgtcgatcagttcggcggcagtcggcagatcactcatgggacggaacggattgacgtcggttccgaccggatggatgatatcgttgatgccctgctggatgatgacggtatccgcaccggcggttggaatttcgtgggcaaaacggttggttcccttaagaccgtaggagtcgtaggtgatacagtcgtactggcgcagaatacgcgtaccgcttgccgcacggcggatcaccgaggtatggttgtgcccttcttcgatgaggcgcagcgtcagatagtccggccatgcctgtgcggtgatggaatctccgtagcagataatggcatgacaatcttcctttgtcagaatatcgatgttgctaagaaaatagaaccagtttgtcgccttggaggtggcaaggggcagcgcttcgctgtgcgtctggtcgccgtaggaaaaatagccgcgggacaatggacctgtgatcagcacggcggactgcatggcagtgtagccgtcaaaatacaggctgacgcagagcgtctgaccggcagataccggaaaggagagggcgtcgcttgtggcggacgcgcccgctgcaagcgtgacggagtggctgccgtcaaaggtaatatcccggatggtgcctgccgtaagcgggcaggaaagcggaactttcccggtgagatcggaatcacacaccgccaccgttgcccggtggatggtgacaggttcctttccgcagtagttgtcgagcgtgaagcggagtgcgcttccggaaaatggtgcatagaccggatagcgcagcgtcagatcttttgcgtagccctccggatggtgttctgcgatggacatggcattgccccacatggagacccattttgtatcattcataagtttgttctcttttctgattatttattggcaaggaatataagagtatattcctgcgttattatagcggaagtgaaggtatttttccagtggacttgttctttttttcgatccttgctataatgagcgcatgcgggtgaaggcttgcagacagaatagaaggataataaaggagttcatttgtatgggagagattgcaaatcgtgataataagaagatgctgattttatttgcagaggtggttgcggcgcttgcgacgattctgatcgccgttttagcgatgaagattccggtggtgccggtgtgcgtgatcgttttgatcgaggtggcgattgctgcctgcctgcaggaggtaccggtgtgggtgcatgcggtagtcgctgcagtacagctggtcgccggggcaatctgcggcagagtggtattctgcctgttgtgtattttgatctatgtgtttgcgatactgacactgcgggaagcaagagcgtaatgataagacctttatgaagcggatgcttggtaaaggtcttctttctgtcaaaggagaaaaagatgttagaaaaactttttttggaaatgatctcatattacagcggagacccgaaacggatccagcattttacaaaggtacacagctatgcaaagctgatcggagagcgcgagcagctttcgccggaggaactctatattctggaagcggctgcatacacgcacgatatcggcatcaagccggcggaggagaagtacgggagcagtgcgggaaagctgcaggagcaggaaggtcctgcggtggcacgcgggatgctgatgcggctgggctttgcggagaatgtgattgagcgcgtctgctatctgatcggacatcaccacacttacaccggcatagagggcagagactatcagattctggtggaggcggattttctggtgaatttgtacgaggacggcagaccggacggagacggcgggtttatgccggataaagcggctgtagagacagcatatcagaggatttttgcgacggagaccggaaaatggatctgtcggagcatgtttgcacttggaggtgtgtcatgatgcaggaaaggaagcagaagggaaaaattctggtattcagttccagggaaatctgctatctgtccagcaactttttcgcaaatcagatcggcgcggcgtttgaggaactgggatatgaggtgacggtgtgcgaactctcaaaggaggatgatctggatgcgaagcttgcgcgctatatcggacagccgtaccgcctgattctggattttaattcccttctgccgcggatggtgttagacgacggtactccctatgtggaccgccttgcgggaccgttttttgactatattttagatcacccgctgtttcactatcagggactttcaagcggtgtgaaaaatctgcatgcgattgtcctcgacgaggcacagcagaagtacgtagaaaaatattatgaaaaggtggcgagcgtccacatgctgccgctcggggcgacaagagcagtctacgagggcacaaaagagccggagtgccggattttatttccgggaacgtatgacagaccggacgcggtttatcagattgtagagaatgctcccgagccgcttgggagcatgatgaaagatctgattgagcggaggcttgccgatcccacactgccgatggaggaagcattttcacagcatcttaaggaggaggaactggaacttcctgccggacagtttgcgctgtttatgaacagcatgtatgcggtggacgcctatgtgcgggattatttccgcaaggcggcgttggacgcgctgctcgcggagaaactgccggttaccgtattcggggaaggctgggaaaaatattcctgcggggacgggcacagcctgcggcgcgagccggcggtgccgtttgcgctctcctttgagcggattgccaaagcccatgtgcttttaaatgtctcaccgatttttaaccggggaatgcacgaccgggttcctgccggaatggcgaatcatgcggtggtgttaaccgatgaaaatccgtatttaagaagaacgtttacaggcgggaaggagctgcttttttattcgctggaaaaaccggacacgctgtgtgagcaggcggagagagcacttacagacgtaagacttcgtgagaagattgcggcttctgcctatgagacctttgagcgggaatatacatggaagcgccgtgcggagcagatcctcgcatttgcagaggaggtggaagcatgagagcacagaagaattatcagaaaatgctggaggcgacgatcgctggattaaaggagcagaaccgtgtgccgacgctgctgctgcacagctgctgcgcgccgtgcagctcgtactgcctcgagtatctgtcgcagtattttcatatcaccgtggattattacaaccccaatatttatccggaagaagagtatcatatgcgggtgcaggagcagcagcggctgattcgggaacttccggcaaaatatccgatcgcattccgggagggcgcctatgataaggaacgtttttatgagatggcgcgcggactggaggaggaaaaggagggcggtgaacgctgcttccggtgctatgagctgcgcttgagagaggcggcggagacggcaaaaagccttggcatggattacttcaccacgacgctgtccatcagtccactcaagaatgcggaaaaattaaatgagatcggggatgcgctggcggaggaatacggcgtggcatatttgaattctgacttcaaaaagaaaaatggctacaagcgctcggtagagctttccgaacaatacggaatgtaccggcagtattattgcgggtgcgttttttccaagcgggagcgcgatgcccagattgctgcaaaagcggcggcacagggaatttgatgcggtaaagcatgaaaggacttgcgggaagcgcgaacttcatgtagaatgataggaaatgtagtgaaagcgaggtttttaaaatggctcagttatggggaggacgttttaccaaacagaccgacaagctggtctataattttaatgcgtctatttcgtttgaccagaaattctataaacaggacattgagggaagtattgcacatgtgcggatgctcgggaaacagggaatcttaaccggggaggagatgcaggcgatcgttgcgtgcctaaaggagatccttgcggatgtggaagccggacgtcttgtcataacggatgaatatgaggatattcacagctttgtggaggcgaatctgatcgaccgtctgggagacaccggaaagaagctgcataccgggcgcagccgcaatgaccaggtggcgctcgatatgcgtctctacaccagagaggaattgctccacgtggatgcgctcttaaaggaactgctcggcacgatattacatatcatggagcagaatacggagacgattatgccgggtttcacccatctgcagaaggcacagccgatcacgctcgcgcatcacatgggggcttattttgagatgtttaagagagaccgcctgcgcctgcatgacatctacgagcggatgaattactgtccgcttggttctggagcgctcgcaggcactacttatccgcttgaccgtgcatacacggcagagctgctcggtttttacggaccgactttaaacagcatggacggcgtgtctgaccgcgattatctgatcgaatttttgtctgcctgcgccacgatcatgatgcatctgtcacgcttttcggaggaggtcattatctggaattccaacgagtaccagtttgtggagattgatgatgcgtacagtaccggaagcagcatcatgccgcagaaaaagaacccggacatcgcagaattagtcagaggaaagacaggacgcgtctacggcgcgctgatgtcgcttctcacgacgatgaagggaatcccgcttgcgtacaataaggatatgcaggaggacaaggagctttcctttgacgcgatggacacggtcaaaggctgtatcgcgctgtttaacggcatgctcgccacgatgaagttcaacaaggagcgcatgcgtgcttcagcgaacggaggctttaccaacgcgacggatgccgccgactatctggtgaaccacggggtgccgttccgcgatgcacatggaattgtgggacagatcgtgctttactgcatcgaaaagggaattgcgatcgatgatatgagcctggaggagttaaaggcaatcagtccggtgtttgaggatgatgtctatgaggcgatctccatggaaacctgtgtgaacaagcgtctgacggtcggagcaccgggaaaagaggcgatggaacaggtgatcgcagcggagaagaagtacctggaggaagagtggaagcctcttgaaacttcaatacagtaacgtgatattgtgagaaatgtacaagaactgtcaaaaaaaaccgggaagttttacgaaaaaagcattgctttttgacgggaaatggcataatatattcactatgacgacacttgttcgccactgacggacacgaacagtgcaaaaagcaggtacgtgtaatgatccggcagaggcaatgagaggcggagtcgtatgccacagcgggtgtcataagaaaaagatgaggagattagaagagtcatgagtgaaaagttgagagttggtattctgggtggtacaggtatggttggtcagagatttatttctctgctggagaatcatccgtggtttgaagtgacaacgatcgcagcgagcccgagaagtgccggcaagacttatgaggaggcagtcggagaccgctggaagatggacacaccgatgccggaagcagtgaaaaagattgtcgttatgaatgtcaatgaagtggagaaggttgcggcagaggtcgatttcgtattttccgcagtggacatgacaaaggaagagattaagaagatcgaggaggagtatgcgaagacagaaactccggtcgtttccaataacagcgcgcaccgctggacaccggatgtgccgatggtggttccggaggtcaacccggagcatatggaggtcatcaaataccagaaggagcgtcttggcacaaagcgcggtttcgtggctgtaaagccgaactgctccattcagtcttacgcgccggtacttactgcgtggaaggaatttgagccgtatgaggtggtggcaacaacctatcaggccatttccggagccggcaagacctttaaggactggccggagatggttggcaatatcattccgtatatcggcggtgaggaggagaaatccgagaaggagccgcttcgtatctggggacatgtggatccggagaagaaggcgatcgttccggccaaatccccggtcatcacctgccagtgcatccgtgtgccggtgttaaacggtcacactgcggcggtgttcgtaaagtttaagaagaacccgacaaaagagcagctgatcgaggcacttcgcaatttcagcggtgttccgcaggagttaaagcttccgagcgcaccggagcattttatccagtatctcgaggaggataaccgcccgcagatcgctctggatgtcaactatgagaacggtatgggtatctcggtaggacgtctgagagaggacacggtctatgactggaagttcgtgggactgtcccacaataccgtgcgcggcgccgcgggcggtgcagtgctctgcgcagagcttttgaaagcacagggatacattacagcgaaataaagaataaaaaagaatcctgcttgcaggattcttttttatttcataggaaatagcgtgatacgttaatgtgtgaaagtggaacttccctatgaaaataaaaaacgctccgcgaggatgcgcagctcgcggtaaggaaaatatcgctttgcgaaccgcttgcgcgcggagaatttcgcaagcgagattcttttttattgcccggaaaattaaaaaatgatataatttccgcagaacatatggacagatagaatgtgccggatatgggatgcggtgtggcttttcgtgcccggcaggaaagtgcagaggagaagagatggtcgtaaaatcgtcggtgttaatggaactggaagagtgctaccgggaaccgggcaatcagctggttgtgctgtacgggcggacggactcggagaaagagcggctgcttggcgcatttgtgcagaacaagaagcatttttattaccgcgcgagacaggtggcggagcgagagcagcgcgcacagatggggcgtgaactggcggcgcagtttgaggtgacgccgcagaagtatacctatgaggaatattttaaccgggtaaagagcggtgatcccacgaagctggtagtcgtgatcgatgaatttcagtatattgccaaaaaggatcctacttttatggaggcggtgctgaaactgaaagcgcacaggctttatccgggacctgtgatgattctgctctgcagctcggcggtgtcatgggcagagcgggaactgacggagtgtatcggtgaggcggcatgccgcaaaatagaccggaaaatcaaatttacgaatctgaattttctggaggtggtgcgggcgctgcccgagtatccggtggcggaatgtatcaagacttacggcatcatcggcggtgtgccgggatatatcaaccgctggaacgcaaaagcggatgtaaagaccaatatctgtagactgattctttcgccgggcggctatctgtaccatgcggcggaagatctgatcggggagagtctgcgggaactgtctgtctatgagaccatcctggcgcagatcgcggccgggcaggacaagctgaatgatctgtaccggacgaccggattctcacgcgccaagatcagcgtctatatgaagaatctggctgcatttgatatcatccagaaggtggtatcgtttgagacgggcggctgggagaacacgaagaaaggtgtgtaccggatccgcgacaattatgtgaatttctggtttcactttatctatccgcatctgtcggatctgtatatgatccgcccggaagaattctacgacagatatatcgcgcccagactggatgcgtacctctcccggtattttgtggaggtatgcatggaatatctgggacttctcggtatggtgggaaagctcccgcttaagattgcacgcatgggaacctgggtcggcaaggaggggaatatcgacatcattgcacagaatgagatccgccagaatatggtcggactctgcaactggcaggagcccgagcttacgatggagatgtgcgaggcactgttccttaacatgaagcgggcaaaaatcggcgcggaatattatttcctcttttccgcacagggatttgcaccggaggttaccgccatggcggagcgggataagcggttcgtgctcgtggatatgaatgaactgtaagttgcccgatgcctggaaaaatgctataatttgcttcatgcgaaagtaattggaggaacagattgtggcaaaatctttgatcatcacggagaaaccgagtgttgcgcaggagttcgcgcggattctcggcgtatccggaagaaatgacggttatatagagaacgacgggtatgtcatcacctggtgcgtggggcatctggtggagatggtgtacccggaggagtatgatgagcggtataaaaaatggcggctggaagatctgccgtttctgccgcgggattacaagtataatgtgatcccatctgtgagcaggcagtatgatgtggtacataaaatgctgcaccgcgaggatattgacacggtctactgggcaggagatgccggaaaagaaggacagacgatcgaggaaaatatccggaagttcggcggcgtgcgcgagggcatgaaggagctccgcgtctggatcgattcgcagaccgaggaggagattctgcgcggcatccgtgaggcaaaagacatgtcggagtatgacaatctcgcaaagtcgggcgtgatgcggacgatcgaggattatgcgatgggaatcaatttttccagagccatgtcggtaaagtacggaaagcttctgaatgatgcggcgggaacatcgagctatacggcgatcgcggtcggccgcgtcatgacctgcgttcttggcatggttgtgatccgggagcgcgagatccgcaattttacagagacgccattttaccgtgtcgtgggaacctttcatcccgaaggagaggaagaatgccggatcacggcggagtggaaggcaatagaaggctctaaatattttgagtcgccgcttttatataaggaaaacggctttaaaaaggaagagagcgcgcagacgctgattgcggagttaaagggacaggaagcgctcattgattccgtggagacagggacgcagaaaaagcgtgcgccgctgcttttcaatcttgcggagctgcaggcggagtgttccaagcgttttaagatcagtccggatgagacgctgcaggtggcgcaggatctgtatgagaagaagcttaccacctatccgagaacggatgcacgtgtgctctcctcggcggtggcaaaagagattacaaaaaatatcagcagactgaaaaattttgcgccggtggctccttttgtggagcgcatcatgaaggaagggcgctatcggaacattgcgaacacgcagtatacggatgattccaagattaccgaccactatgcgatcattccgaccggacagctcacagagctggaatctttaaacagtcttgaacgaagcgtctatgagatgattgtgcgccgtttcttaagcattttttatccgccggcggagtatcagacggtgaagcttgtcgttgcggcaggcggtgagaagctttacacttccgcgaagcagttaaaggttccgggctatctggagattgcaggcattccgaaatcggcgaaggagcggaatgcggcgaagatggacggggaggagcagacgcagggcggtgatgctgaggctgcacaggaagaagaggagaacgccgggcttttggcgtatgccgacaagcttcaaaagggagagacgcttttttcggacggctatgccatccgtgaggggaagacctccccgccgaagcgttacacgtctggatcgatggtgctcgccatggagaatgccggacagctcatcgaggaggaagaattaagagagcagatcaagggttccggaatcggtacatctgccacgcgggcagagatcatcaaaaagctggttcgggtcggctatctgaatctgaacaaaaagacgcaggttctcacgccggagcggctgggggaaatgatctttgaggtggtttcgatgacggttccggcactgctcaaccccaagatgacagcttcctgggaaaagggactggacggaatcacgcggggaacggtcgtgatggaggattaccgctcaaaactggaggattttatccgcagggagacggtcgccatgatcgagcaggatctgaccggccagattgccacgcggatccacccgctcgtcggaaagggcggaaaggggcttgcggcgaagcgtagcctcggcattccctgtccggtgtgcggaggaacgatcgagacgacgccgttcggttacgggtgcagcaattatcagaaagatggcggcggatgccgcttctccatcggtacaatcgccggaagagacttaaacgatgaggaagtaaaggagcttttgaccgaaggacataccggcgtgctgtccgggtttgtctcgaagtcgaagaaaaagttctcggcgagcctcatcatggaaaaggatgatgagggaaaagtttcggttggatttgatttttcaaagaaccagccggaaatcctggagggtgtcgtatgtccggtgtgcggttctgccgtggagatcacgccgtttggctatagctgcgtcaagcaccacgagcatcccgatgaatgttatttttccgtgggaaagatcgcgggaaaggcgctgggcgttgatgatctgacggagcttcttacgaccggaaagaccggtctgatccgcggctttactgccaggaataaaaagaagttcaatgcctgcttaaagctggagcagacggaggacggaagaaagaatattgcatttgatttttcacagaacgatgccgccgttgttcccgatgtcgtgtgtccgatctgcggcggggcgattgtggagacgtcgttcgggttcggctgcgcgaattacaggcaggatgacccggacagctgccggttcgcgatcggtacgatggcgggaaaggacttaaacgcagcgcaggtgaaggagcttttaaaccaggggagaaccggaacaatccgcggattcaagtcgaagagcgggaaaaagtttgacgcctgtgtcgctctggaacacacggaagacggaaaaattgaattgagatttgattttgaacatgtcgaagccaaaaagatcaaggatgtggtgtgcccgatctgcggcggtgatatcgtggcgacgccgttcggctttggctgtgccaattatgtgaaggacgatccgaacagctgccggttctctgtcgggaagatggcggagaaggcattgacggaagcgaatgtaaaggagcttctgaccaacggaagaaccggaacgatccgcggctttaagtcgaagagcgggaagaaatttgatgcgcgcgtcgcactggcaaagaatgagaagggaaaggtcacggggctgaagtttgattttacggatctggaagcgccgaaggtaaaggatgtaaaatgtccggtctgtggcggggatatcgtaaagacgatgtttggatacggctgtgccaactattcaaaggagaatccggacagctgccggttcgcaatcggcaagatcgcgggtgtctctttaaaggaagcacaggtgaaggaacttttgctccgcgggaagacggacgtgatcaagggatttgttgcgaagaccggcatgaagttcgatgcgccgctgaaactgacgccggaaggacagatcgcatttgattttccggagaagccaaagcctgttgagacaacacttgcctgcccgaaatgcgggaaaatgttaaagaagagccagtggtattacgagtgcgagtgcggttttaaggtctcccgcacggtggcgaaggtgacgctgaccgaggaggtcatgcgcgaactgttagagacagggaaaaccaaagataaagtgaccgggtttgtgtcaaaagccggcaacacgtttgatacctgcctaaagctggaggatgaccgcattgtgtttgattttgacaatcccggcacaaagcgtgagggtgcttccgacggcaagggcggggagcgcatgttctacgaggaattagaagaaaatgcacagccgcagccgctggcggctgaggacggcgcacagtacattgaggaggacgtgcctccgttttatgatgcgatggcggaggagtatgcggcttacgaggaggaagaggcaaaacagcaggcggctgcatccaattttctggatgaatttcctgaatgagaaacgaatggggaaaggaagcaaaaatcggatggcgtgcggtgcatgcttgctattgacagccagataaaatgtcattaaaatttgagtagttattgatagaatccggcagaagacacaggaggaaacagggcatggagtacaatgagcaggcctttaaagagaaagccaatttaaaggcaatgaaagtatggctggctttgattgcgattatgacactgtcatacggaagcgacctttccaagggaatctatacggcgacgcagtatgttgtttttctggttatggcgtgggtgccgtttgcaatcggactgctgacgttgaagttaaaggggagagcgacgccgtattataaggatgtcctggctctcggatatggctttttctatgcctacgtggtgtgtatcacggactcggcgaccgcctatgcatatattctgccgttgacgagtatgctgattctgttcaaggatcgtagctatatgatacggtgcgcggtcacaaacgagatcgtcattgtgctcagtgcactgctccatgtcttcctcggcctgaatccgaacgtgaaaatgacagactattacctgcagttttcaacgctgcttctgtgctatatctgttacgttctttctgtcgaccacttaaatgaatccgacggagcgctggtggcatcgatccgggataatctgagccgggtcgtgacgacggtgggacaggtaaagggagcgagtaactcgattgtggacggcgttacggttgtgcgtgagctggcggatgagaaccggcagggagcggattccgtcgtaagcagtatggaggaactcacccggaacaacgatgttctccacaataagacgatgtcctccatggaccggagtaccgacatcagcacgcaggtgcagaatgtggcgggactgatcgatgagatggtgacgctgatccaggagtcggtcgagcatgcggatgtgagtgcggaagaacttgcggatgtcatgaatacgacgaataccatggcggcgctctccggcgaggtcgagcaggtgctcgagaactttaagcaggaatttgatatggtaaaggaagagacgggcaccatagaggggatcacgttccagacgaaccttctggcactgaacgcttcgattgaggcggcgagagccggggaagccggaaagggctttgccgtggtggcaggtcagatacaggatctgagcatgggaaccaagacttcttccggacgtatcagggacgcactggatcatctggaggagacttcggagaagatgacggaatccatcaccaagacgcttgagatgatccgcatgacaagagagaagctcacgcaggtgcaggagagtgtcacaagcattaccgatgattccaaaaagctgggacagaatatcggggtaattgacggcgccatgaaggaagtggaagcttccaacagcgacatggtggagaacatgaagcagatctgcgataccatggaggtcatgacggagtgcatcaaccagtccgacgaagcgtcccgcacgatgctcagcaaatacgaggagtcttccgtcaatgtggataagattgagagtgtggtaggaaagctcatggaagaactcggtagcggcggattcatgggaatcggcgatgcacagccgggaatgcgcgtggtgttagtcgctaagaacggagcacaggcagccgggacggagttccacggggaagtgtttgagagccagagcgacggagttctggtaaaaatcaagccggaagccggaaaaacgattgagataaagaaaaaagacattacatatgaactgcagatctgtgtcaacaatgcactgtatacatgggaggatgtcagcgtatccgccgcttccaatgcgggtgccaacagctaccggattgctgtggcgacaaacccgaaggtcatcaaccgcagaaagtatccacgtatgccggttgccaatgcatgtaccgtgacgctgaaaaaatccggcaaagcttacaacggcaggatgatcaatatcagcgcaggcggtttcgcattcagcgcacatcaggaggatttcgcaaatgcgatcgggcaggatattttgttggaaatcctggacttcccgctggaggaggcacggacgctggacggacatatcatccgcagtacggataatgacggtgagttcattgtcggatgccgtatgccggaggacagcgaagagatccaggcttatgtcaataaaaattacagggaatagagaggaatttgtgtgatggaaacagcaaaaatcagccagttatatgacttaggggagacgattgcggcggaactgtttgcgggactgacctatccgtgggaggctctgccgaaaatcagcgactttataaagaagctgggaccgacgcttgacccggaggtctatgagcagcgcggcgagaatatctgggtggcgaagagtgcgacggttgcaccgactgctttcttaaatggacctttaattattgatgaggatgcggaaatcagacactgcgctttcatcagggggaatgccatcgtaggaaaaggctccgtggtgggcaattcaacagaattgaaaaacgttgtgatttttaattccgtgcaggttccgcattacaattacgtgggagattcgattctcggttacaaatcccatatgggtgccggctcgatcacttccaatgtcaagtcggataagacgctggtggtggtaaaggatcatgatgagaaaattgaaacagggttaaagaaattcggagcaatgctcggcgactatgtggaagtcggctgcaattccgtgctgaatccgggaaccgtcatcggaagccacaccaatgtttatccgctttcgagcgtgcgtggcgtggttccggcaaattcgatttacaagaaccgcagcgaggtagtggaaaagcggtaggacaacagaagagggacagagacaatgaagagaagatgggtgcagggaatgcttcttgcaggaatgctgattttgacaggatgcggcgcaaagaacagttcacctgtggagaacggtaaagattatacatggaacgacattacagtgatgcttccggaagactgggcggaccgctgtacgatcaaagaggatgagaatggatttaccatctatcagacggcttcctatgagaagatggaaggacttggctacctgtgttcctttgaaaaaagcgacgcatggatgaattacggtgcgggagagaacctgatcgcctacacggaggacggaacgctgtattacctgatgcagccgacggatgttgcgtgcgatacggaggatcagacaatcgtggaagagtacggatccatgatggaggaggtcacggccatcgcatcaagtgtgaagatcgatgcggatgacgttcattacgatgccgatcagtatgtcgttccggttggcgcaatactgccggtgacggaggagaatctgtcggatctgtcagagcaggagctctatctggcggcaaacgagatttatgccagacatggaaaaacctttgatgacacctatctgcaggcgcattttgatgcgtgcagctggtatacgcccgccgggggagcgactgcaggcgatgcgggattaagtgagattgagcaggcgaatctgaaactgatcaaggcaatgcagacggcatatgaagcggaacatatatatccgaaatcctattcggcaggcgagaccgcagagatcgctcttttggacaatggagttcttaacgaagtcagctacacggtaaccggtaagggagagcagacggtctgcacactcacgatcgacggaacggcgtatgaccttgccgagtacattcagatgcacgcgccggttgcggatgcgttttatgtgacagaccttgtggagaacatcggaacaccggaagaggatgatggtctggagattgccgtacttgatgaaggaacagatggcatcggaacgactcattttttcaaatatgatggagatctttactatctgggcgaggtcggaggattcccgttccgggaccggaatgccggatttagcggttttaacggccagggcggtgtgatggatctgatccgttacgacaagccggcagactgcatcctgcaggggtatgcctggtacaacagttcggagaagaagatcgagcatgcggacggcgggctttattcctattacgagccgtgtaagctggagcataagggagcactgaccgtgtatttttcgatggatgagacatcagcagaaaaaacgattgcggcaggggaggacatctactgtatccggtcggacggagacggttggatgtatgtgcgtgcaaaggacggaacagaaggatttctacatgtgggagacaacagctaagagcagctgttttgacaaaagtgcataaaatttgcagtacccacttgtgaaaatcaagaaaatgtgagagaatgaatgcagtatgttaaatgtgtaacaatgtttaacaactcagttctatttatgcgaaaggagtcttaaaatgatttacactaaggaagttgaaaacatgtgcccagtcgcaaagggcgcaaaacatgaaccagctccgattccggaagaaggcaagtgggttcattccaaaaaaattgaagatatttcaggctttacacacggtgtaggctggtgtgcacctcagcagggtgcctgcaagctttccctgaatgtgaagaatggtgtgatcgaagaggcattagttgagaccatcggatgctccggtatgacacattctgcagctatggcagcagaggtattacagggtaagaccatccttgaggcactcaatacagaccttgtctgtgatgccatcaatacagcaatgagagagttattcttacagatcgtttacggtcgtacacagagtgctttctctgatgacggacttgcaatcggtgccggtcttgaggatttaggaaaaggacttcgttcccaggttggtaccatgtacgcaaccaaggagaagggcgttcgttatctggagatggctgagggctatgtaacaggtatcgctcttgacgagaacaacgaggttatcggataccagttcgtttctcttggaaaaatgactgacttcatcaaaaaaggcgatgatccgaacactgcttgggagaaagcaaagggacagtacggccgtgtagcagatgctgttaaaatcatcgacccgagagaagagtaggaaaggagacggacgaaaatggcattatttgaaggatatgaaagaagaattgaccagatcaacgctgtattaaacagctatggtatcagctccatcgaagaggcagagaagattaccaaagatgctggtttgaatgtatatgatcaggtgaagaagattcagccgatctgttttgagaacgcttgctgggcttacacagtaggtgctgcaatcgcaatcaagaaaggatgcacaaaggctgctgatgctgctgcagcaatcggcgagggtctccaggcattctgtatcccgggttctgttgctgaccacagaaaagtaggtcttggacatggtaaccttggtaagatgttattagaggaagagaccgagtgcttctgcttcctggcaggtcacgagtctttcgcagctgctgagggtgcaatcggtatcgctgagaaggcaaacaaagtacgtcagaaacctctgcgtgttatcttaaacggtcttggaaaagacgctgcacagatcatctcccgtatcaatggatttacattcgttgagacacagtatgactacaaggcagcaaaattaaacgttgtatacgagaaggcatactccaacggacttcgcgctactgtaaagtgctacggtgcagatgacgttcaggaaggtgttgcaatcatgcatcacgagaacgtaggtgtttccatcaccggtaactctacgaacccgacacgtttccagcatccggttgcaggtacatacaagaaagaatgtatcgagcagggtaagaaatacttttccgttgcatccggcggtggtacaggccgtacccttcacccggacaacatggcagcaggtcctgcttcctacggtatgacagataccatgggacgtatgcactctgacgcacagttcgcaggttcctcttccgtaccggctcacgttgagatgatgggtctgatcggaatgggtaacaacccgatggttggtgctacagttgctgttgcagtaagtgttgaggaagctcacaaggctggcaagttctaagtagtatcgtatttaattgaaaagcagggaatatactttaagcggtatgttccttgctttttattctataaatttcttgattttccagtgaagatctttcccaaagctttgaaaaaatcccttgccaagccgcgcacattcatgctatgctactttacaatagtgcagtattgcatggagaggaatggaacggttatgctaaagatcattgatgattttgtctggggagttcccctgatcgtgctgatccttgcggttggcatatttctgacgatccgtctgcggggacttcagatcacgaagttgccgcttgcggtcagacacattattgcaaacgaaaaagacggcaaggacggagaagtgtcgagttttggcgcactctgcacggcgctgtcggcaacgatcggtaccggtaatatcgtgggagtggcgacggcggtcgtggcaggcgggccgggcgccttgttctggatgtggattgcggcgctgtttggcacggcgaccaagtatacggaatgtcttttggcgatcaagtaccgcgtggtggaagcggatggacatgtggtcggcggaccgttttactatattgagaacggtatgggcagaaaattccgctggctgggacagatcttcgcattcttcggcgtgggagtcggtctgctcggcatcggaacctttacgcagatcaacggaattaccggtgcggtaaagggcttttttgatccggagacggcatgttcggtgcatctgtttagcaacacctattcgtggagcgttgtgatatccgggctgatactgaccgtgtgcgtggcactcgttattatcggagggattaagcggatttcctccgtggcacaggtggttgtgccgtttatggcgcttgtgtatgtggtgactgtgctgatcattctgctgacgcatttgggagagattccggcagcacttgccaccatcgtacaaagcgcgtttggactccgtgcagcggcaggaggaacacttggcgcaatccttgttgcgatgcagaagggaatcgcgagaggtattttctccaacgaagcggggcttggaagtgcgccgatcgctgcagctaccgcgaagaccgatgagccggtggcgcagggactggtatccatgatgggaacggtgatcgatacgctgattatctgtacgatgaccggattgtccatcatcatcacggatacgtggaacatcggtctggacggggtggatgtcacgacaagagcgtttcagatcgggcttccgttcccggaacgcgtctcctcgtttttactgatgctgtgtctggtgttttttgcatttacaacgatccttggctggaattattacagcgagaaatgtctggaatatctggtgggcaaccgtcccggggtgttaaaatgctatcgctggctgtatattctggcggtattgatcggaccgtttatgaccgtgtcggcagtctggacgattgcggatatttttaacggactgatggcgctgccgaatctgattgcactggtggcgctaagcggtgtggtggcagccgagacgaagcagtattttgcaaaacagaagaatttttgatggttttgccaaaggacagagtaagttgttggatactctgtccttttttctgctataataatagagaaaaaaggagggcgcagatggacgaagcacacgtgtatattgcaattgatttaaagtctttctatgcatcggtagagtgcgtggaacgtgggctggatccgcttacgaccaaccttgtggtggcagaccccgagcgcacggaaaagacaatctgtctggcagtatcaccttccctgaaagcctatggcattccgggaagagcgaggctctttgaggtcgtacagaaagtaaaagaagtgaatgctgggcatccgaaagagcggctgacctatcagatcgcaccgccgcgcatggcgctctacatggattacagcaccagaatttacaatctctatctgcgttatgtggcgccggaggatattcatgtctattctatcgacgaggtgtttatggatgtcacgcattatctggggacataccacatgacagcgagagaacttgcggcgaaaatgatacaggatgtctttgctgagacgggcatcacggcaaccgccgggatcggaaccaatctctatctgtgcaaagtggcgctcgatattgtggcaaaacatgtaaagccggatcggaatggtgtgcgcattgcaaaactggacgagatgagttaccgcagactgctctggaattaccgtccgctgacggatttctggcgggtaggacggggctaccagaagaagctggaggagaacggtctgtatacgatgggagacattgcgcgctgctcgctgggaggagccagagagttccacaacgaggaattgttataccggctgttcggcatcaatgcggagctgctcatcgatcatgcatggggctgggagccggtgacgatggaacagattaaggcgtacagaccgcaggtgaacagcataagttcggggcaggtactgcattgcccctacgacgcgaagggcgcgcggctggtggtgcaggagatggcggatgcgctggcgctggatctggtggaacggcgtcttgtgacggatcagcttgtgcttaccgtcggttatgacattgaaaatattacaaatccggcactttatgcagactatcgcggagagattgtggcggaccgctacgggagaaagattcccaagcatgcgcacggtacggtcaacctgaaaaccagaacctcctcttcccgtaagattatggaggcggtgatggggctgtatgacgacattgtgaatccaaagcttctcgtgcggagaatcacgcttgtgggcaaccggctggtggaagaagcccgcgccgaggcggaagaacaatacgaacaactggagctttttacagatacaggcggacaggaagaggagaaaaaacaggaagaactgcggctgaaaaaggagcgcagcctgcaggaggcaatgctttccgtgaagaaaaagtacgggaaaaacgcgatgcttaagggcatgaatctgcaggagggcgcgaccgcgatggagcggaacagccagattggagggcataaggcataatgggctgggatcatgcggcagaggaacacaaatatgacgatatacggatgcttgtgcatcacagatcgcgcgtgcatccgccgatgtccctgtgggatcgggcggcgcagttctctccgtttgccgcgttgagcggacacgaggacgcgatccgcgagacggcacgtcttacgacggagcgcgcagagctttccgagagccgcaaagaggagttaaacgagcagctcgtctggctgcgggagcacccggatgcgagagagcgggtgacggtgacctattttcgcccggacgcgaaaaaagcgggcggtgcctatgtgacagtcaccggagcggtaaaaaagatagacgaatacgaaaagacgctttggatggaagatggaaccgtcatagcgattgaggaactgtctgcggttgagataccggggaaggaccgatatgaggaagaatagaaggagcagcatgaagatggaaacacaaagatacctgtatgagacacatatgcatacatcggaggcaagcgcatgcgccggcagcacgggtgcccagatggcgcgcgcctacaaagaggcagggtacaccggcattattgtaacggatcactttttttacggaaatacttcggtggaccgttccctgccgtgggaggagtgggtacggcgcttctgtctcggatatgagcatgcaaaggcagagggggaacgcatcgggctctcggtgttttttggatgggaagcatgttatgaggggacggagtttttggtatacggactggatcaggcatggctgcttgcacatccgcagattaaggatgcatcgatcgaagaacagtacgcgctggtacatgagggcggcggcattataagccatgcgcatccgttccgggaggaggattacattcccgaaatccggctgtttccggaatatgtggatgcggtggagggcgtaaacgccatgcattcgagcagggcgagcgactgccacaagaacccgctgtttaacgagcgggctctggcctatggaaaagagcacaatctgccatttacagcgggatcagaccagcacaccacgcatatgatcggcggcggtatggtctttcccagaaaactaaaagacgtccatgactttacccgcgcggtgcttggcagagaggcggtggaactgttggacggctgcaaaagcgagtgattacgagcggttcttttcccggtattctttgggcgacatgcctttctgccggtgaaaggttttggaaaaatagagactgttgtcaaaccccagcgagtttgcgatcgcggtgatcgacaggctggagtgctccagcagatagcacgcctgcttcatgcggaaatccgtcaggtattccttgggggagcgccctaggacagcctcaaacgagcggaacagatgactgcggctcacgccgacatagccagcaatatcctccacggtgatggcgtaggaataatttgaggagatgtactcaatgcttttttgtacatagctgttcgcggaattctggctgccggcgtgcgtagcaccgtgcatgaacagggcgagcatggtatagagacgtcctgtcatctccaccgcgtgctcgaattcgttgccgcgtgcatcgtagatgtgcagaatctgccggtgaatatcattgccgcgtggggtgtcccgtataaaaggattctcaggggagaagtccgtggccttcaggatcatggaggcgtcgcttccggtaaaaccgacccaggcatactcccaggggttctgctcatccgcgcagtagacaacctcggtgtttgggtagaccaaaaaagtatctccgccggacagatggtaagtctgaccggcgacgcggtaggtgccttttccggaaatgatatagtggatcagatagtgatcgcggataccgggaccccattggtagagggcgtcacatttctggaagccgacgttgtagacggagagggaaaccagttctttttcggtcactttgtaggaatttttgtaatgatgcggcatagaacacactccttgtctttctgacagtaaaatccttatcgtataagtccattataaaaacagaaaagccgaaaagcaacattattacatatatttcatacattttgggctatacattttacggaggatagagtaatataattttcgtaaggcagatggaacaatgaatcataacggggaaaggtggaatcattatgacgattttagtaacaggcggagccggatatatcggcagccatacatgcgtagaattacagaatgccggatatgacgtggtagtgctggataatttaagcaatgcctccgagaagtccttacagcgtgtggaggcgctgacaggaaagccggtaaccttttataaaggggatatcttagaccgtgatatcctgaacaaaatctttgcggagcacaagatcgactgctgtatccattttgcgggattaaaggcagtgggcgagtccgtggcaaagccttgggagtattacaacaataacattgcaggtacgctgacactggtggatgtgatgcgtcagaacggctgcaagaatatcattttctcctcctcagcgacagtatacggcgatccggcagagatcccgatcacggagaactgcccgaagggtcagtgcaccaatccgtacggatggacaaagtccatgttagagcagatcctgaccgacatccagaaggcagatccggagtggaatgtgattctgcttcgctactttaacccgatcggtgcacacaagagcggcacgatgggagagaatccgaacggtatcccgaacaacctcatgccgtatgtaacacaggtggctgtcggaaagttaaaagaactcggtgtattcggcaacgattatgacacaccggacggtaccggcgtgagagattacatccatgtggtcgatcttgccatcggacatgtgaaggcactcaagaagattgaggagaaagcgggactctgcatctacaatctgggtaccggacacggctacagcgtgcttgacatcgtgaagaattttgaggctgcaacaggtgtgaagattccttatgtaatcaaggcgagaagaccgggcgatattgcaacctgctactgtgatccgtccaaggcaaagaacgagcttggctgggaggcacagtatggtatccgtgagatgtgtgaggattcctggagatggcagaagaacaatccgaacggatatgaagattaagatgtgaagcagcggacggggctgccacacgatattgaatgggatacgttttgtgatgagaatactcgagaatatgtagttccagaatgcaaccggggcggcaagtttttggaggaaaatccgaatatttcttccatgccgcgtcggacatcgaattctgtgtctttccacgtttggacagtcacaaggtgtgtccggtaaatccgcagacaatgagcggactttctggtgcccctagtggcaccgcttcacagacaatataaaaccgcgcgaaccgaaactcgctgctatctgctattgaaaataaggcagatggcaactcagacatcggcttcgcgcggttatgttttgttcagtggtgccagcaaggggcacacacaaaagtcctaaaattgtctgcggattacgaacacaccttgtggaatgtcccaaacttggaaaaacacagatcatccgggatgtccgacgcggcatggttagaaataccggattttgcgattaaacttgccgcctccggttgcatctggaacgcgatagtccctttttcttgtcataaaacgtatcccggtaagatgcaaagcatgacaactccgttttctggaaataaaaaaagaaagcgtaaacgctttcttcttcgggttgggctgttattactaacagtagcagttcctaggggaatcgaacccctgttttcgccgtgagagggcgacgtcttaaccgcttgaccaaggaaccgaacaaatgctattataacaggctttcaaaaaaaagcaaccccttttttgaaatttttttaaaaagctgaaaattctgtacaattcgtgaaaaaaggagtatgatggattgcgatagagtaacgtggtaaagtgcaggaaagtaaaagcagaaacgatacttcctgacgcagaaagagaggtttgtgcgatgtcgctggagagggcaaaggcatatttaaaagaatataagatggaagatcagatccgggagttccccgtctcctcggcaacggtggaactggcggcggaagcactgcacacggaagcagggcggattgcaaagactttgtcttttctggtggacggagaggcggtgctgatcgtgtgtgcgggagatgcccggattgacaatgcaaaatacaaggcatttttccgtgcgaaggcgaagatgcttgcgccggatgaggtggaggaacggatcggacatgcgatcggaggcgtctgcccgtttggaatcaaggaaggcgtgcgggtgtatctggacgagactttgaaaaaatatgagacggtttttccggcgtgtgggagcagcaacagcgcgattgaactgacgataccgcagttggagcagcttgcaaaaccggtgtgctgggtagatgtctgcaaactgccggcataaaagcctgtattttgataagttttagaatgaaaatcgacaagaggttataaagcctctgccgattttctttttttataggaaacagcagaaaagaagagcgtgcagagcgtaaaaactctggcacgcttatttttttacaacgaaagagaggtagacacatggaaaattttattaaagaacatgattacgcaatattggtttatgcaaaagaggacacagcaaaatacacagctgcaattaaagcgctggcagaaacaaagaaaatgagcggctgggatagagtacagggcgtaacaattcataaagattgcaggataccgagcctataccatggggaagatttagcaatagttatggagagggacaacgggagcgggcagtatagcataagaataatgagttgataaacagggcagcgaaagtcgcccgtacagaaaggagcatagagaatggaaaaacggaagtataagcgcttgcattacgaggatagacagaccatagaggctatgagcaaacagggcagcagcgtaaaagatattgcagaggcgctgggaacacacagagatacgatttatagagagttcaaacgctgcggggctacgctggaaacgtacacagcggcagcagggcagcaggcactataaaaaagggaaaataatgaaattagaggacgcattaaaacaaaatccatacgataaaaccagaggcagtaaaggggcgtacataagatatttacgttataccgtggacgggtggtatagcaagaaaagcgaggaaataagaaagcagatagactgggataagataacgaaagagaggtaaaagagatatgacaagagaggcacttaagaaattaaatgaaaagcaaatgaattactgtaaaacactttcagcgctgattgatagagcaaagataaaaggacttaaagaagagaacgaacggaacagaggaaaacttagagggttcttagagtgcatggagcaaatggaattattaagcggttacgaagtgaaagcattatatttatggttcatatctggaaatagaggagaataataggcggcagcagtcgccaccagtgccgttagttcagttggttagagcagccgcctcataagcggcaagtcgtgggttcaagtcccacacggcgcattgtgtagcaggcatggcgagcctgcggcagagggcagcaggctaatagctgcaatctgtataccgtggaaaaatagcggcggtcataccagccagaaagtatgtggacagtcaacaggttttcagctgctttttaatgcgaaaagcagcccgcacggtaaaaccaaacgccagaacaggagagcggcacacatggaaagacagagagcgccgccgaaaggaagagaggcagagaatggcagcagaggcattgatagtagaggacgcataccagagaggctatgcagatgccatagcagatatgcgaaagaaaaaagagcagaggcggcagcgggagcaggcaaagaaagcccgccgctggtatttcattaagcagaaagcctacgggcttgcaatgctggcagttaccgtgctggcggcatgggcgacagagggcgacataacaatagcggttattaccgtaccgctggggcttatgtgccttttcagtaaaaaaatgctgatagtagacaactactattttgctacagaagagagggcaatacatggacgaaaaaacaatacagcgtattaaaaagctgcaagcactggcagagcggggcgtaggcggcgagaaaacgacagcgcaaaagaaacttgcaaagctgcttaaggataacggtataaattccttagacgaactgcaaaaggaagagtatgaatatacgatattttcctacaacggaaagcacgaaataaaactgctgcggcagtgtatgtataaggtcatgggtgctaaatctgacagaacagcatacaagccatacggacggcggaagaaaatcggcatatattgcacgaaagcgcagaaaatcgaaatagagttagagtttgaattttacagaaacgtattttatgaggaattaagtacatttatggacgctttcatacaggcacagaagattttcccagaagatgcaccagtagaagactacgacgaatttaacgaaagagatatgaaaatagcgtttatggctacggggatagaacggcgtagcagggctgcaatgatagaggaaagcgaggcgggaaatgagaaaacgaaaacgacaggcagttaagaaactgatacagtgcgcagccgttatagcggcaggcgtgctggcaatcattttgtttatgctggctatctggtacagaggaaagaacagcgagccagtaacagacgaacaggtagcagcgcagatgcagcaggcagagccgctggttattgaaacaccagaggcagccacagagggcagtataagagtatacgactatgacggctgctgtatttattcctactacggcaaaattcggataaacagcgacggtaaggacggcaaggaaattgacgtagaggcattaggctatttagagggctaccaagaacataaagaggaaagcggggcgggagaatgagccacagatattacagccctttacgcccgttatcgctgggaacatttccaaagccgcagggaaacgagattttacatatagaaaattttgaggaacggcagaacgtaccagagatagcacggcaggcgtggggatacattgagtacaaagaggcgcttacagaaatagaggcggcagcttatgagctgataccgtcaaactgcatttctgaaatggaaaacttagaggcaaggagataaaggcaatgagcgaggtatatatacgcagccagaataaagaaaagctgtatagactgggcggtaattacgcctgcgtagagtatggagagtacgaggacataaagaaaaagagaggcggcgcagaggcagacaaaaagcgccacgtaatttgcataagtgacgggtgtttagaagaaattggagagtatgccacaaaagagcgctgcttagaggtgctggacgagatacagaaagcgtgcgtaagctatctgtttacggctggcggtgcagccgtaataaggggcggcatggacgtacagccgtttgcagcagtaataccgaggctgtacgaaatgccagagaagtaggagaggcagacagtgacagtaaaggaatttataggcacgctggagagttcagaccgcctgcgcattatcgagggcaaagcagaggtttacgtagggtatctggcagcgttcaaaccgtttgcagaccatgagataagcgaggaataccgaaaatacagcgggcatgaggtaaagaagtttagagcagtgccggagataacgcacagacgctggaaagagctggggcttatgaaaccattagagccagaccagacagcacagtataagtttagtgatttgcagatgtcgctttactacaccatttacatataagaaaggaaagggcaggaagtatgacaaagaaaaagccggattttttacgggatttagatactgcaatcatggacgagcttacaggtggcggtatcaagggaaatgcagcgggactggtaggaacgcttacacagattaaggaaattaagcagctatgcgggctgccgttttgcggttatatggcaaagttggaaacggtaagaccaagcggcgtgccggacgaggtaacggtagtatttgcagaggacgtaccatacagggcttgcaacggcatagaatttgacgttatgcaggaatttgtagagggcagcaggcttttactgacaggtaaggtgcagacgcttaaggacttccagagcggtagactgctggtatatattctggcagattttgtggcggtatcggaaaaggcagtagagcaggacgaggcagcagtaagaggcgttatagcgaataagccaacatacagagaaacaccgagaggcaagcgcattactgatattacggtaaaggtaagaaatgagcttacaggcggcagctgctttttaccgtgcatctgttggcaggaacaggcagacgaggcggcgcagtggcagcagggcgacactgtagagctgctgggacggtatcagagccgccagtatgaaaaggtgcttgatgcagccacaggagaaagagaacagcgcacagcttatgaggtatcggtacggctgattagaagaaaggaagaggcagaaaatgagtgttgaacatatcggcaagggctatgtaaaaatctgcgtgagagaggaagagttagagaacagcatagctgggcttagccagttaaaacctattttgcaaacgcaagtaatgaaagggaacggaagaaacacaaagcaggggattattgacgcagcagagctgggaaaacattttgatacagcgatagatgcaatgactatgcttttggctgggtttaaggaagaaagcgaggcacagaatgaagagtaaaacaattttaggagcagacggcgcaacaaaaatgcggcagattacagtagggatacacggaaagggcggcgaggcaggcataaaggcaatacagcagcttgcaggcatggtggacagcttaaagcagtgccagacaccacaggaagtatacgacagatatttacagattacggggtactgtaaatgctgcgttgattgtaattttatagaccaaaagggagcagacgagctgatgtgcttagcagcatatctggcaggaaatgaacaggcacgggcagaggtacaacagaaagcgggtaaaaaggcatgagaaaggtttatatatgcagcccatacagggcgaaagacggcgcagagctggacagaaacatagattatgcgcagcagctgacacggcaggcgttagaggcgggcttagcacccattacgccgcatttatatatgacgcagtgcatggacgataaaaagccggaagagcgggcaaggggcatggctgcggggcttgcgctgctgaaaggctgcgattttgttattgctggtgtgaaatacggcataacagagggaatggacagagaaatacatacagcaaatatgctgggaattgcggttatagatgcaaaccagattaaacggcatctggaatatgaggaaaagcgacaggagcgggtagcgagcgactacgcaaagctgcataagtgcaagcattgttacgagtgtagattatgtagccttatggggtataagaactgctgtaccgccagcgcttgcacagctgcatataaacgggcttatgagtatgccttaagccgcataagagagtggcagaaaacatgaaaaataaaagcgcctacggtggggaaacaccataggcgctaagctatacagctttgaaatactataaaaattataagctatgtatggcgcaaagtcaagaaatttaacgggcaggcagcccgttttaacacttgataaaagtattaacgaaccgacagagaggtagatatatgccatacgtagagagggtaacaaaagcaggaaatacgatagagatagagaggtactttaccagcagatacaaaaagaaaggtatcagcagaggggataaggtaaagccaacaaaagaagagcaggagaaagtaaacaccagacaggcagagagaaagttaaggatactcataaatgcaaactatggctatggggactaccatttagtgcttgactatatccgcaggaaaggagagccggacagaacgccggagcagatgcggcaggacatagacgtatttttgagggagtgcagaaaggagtacagaaaagcagggttagagttcaaatacatacacgttatggagataggcaagaaaggtgcgaggcatcaccaccttgtagtaaataaaattgacacagagattttacaacactgctggtataaggcatacgaggggcataacagggttaaggtattcccactggacgatagcggcaactatgcagagctggcaagttatttaatcaagtacacaggaacgcacaaaaagggtactgacggagcattacagggcaagcgctggaattgcagcaagaatttagtaagaccagaaccagagtaccgcataatttcagaccgtgagtatttcaagaaagagccaaaagcaataaagggctattacgtggacaagaacagtgtaagcatgggggtacatagcccagagtattacggctatgggtatttaagatacaccttagtaaaaataacagatagggggggctgaaatgcagataatcaagggcattgccattgcagcagtgttgataatagctggactgctggcgctgattgtggcagcatatctggcgtttagaattgcggcggctatttttgaacagcaggagagctggaaagacagcggcagcagaaagggcagaaaacatgatagaaaaaattaaatactggttattccagaaaggcaaggactgtaagcgctgctgcctgcggtgcagatactacgatatatgccgctgggacgtactgggaaatgcaggactacaaagcgaggaaacaataacgcttttggcgatagagaacagcaagccgcataaggacgggctactttttagaatttgccagtatgtagaatttaagcagaaagcgaggcgagaaaatgagaaactttagactggacgacgaaagcgggcatcaagaggcattatttagctgggctgcatacagaacagggcttatgccggaactgcaatatatgtatcatgtgccaaacggcggcaaacgtgatgcagcaacagcggtggcgcttaagaggcagggcgtaaaggctggtgtgccggatattatgctaccagctgcaagggccgggtatcacgggctttacatagagcttaaggcgggcaagaacacgacgaccaagaaacagaaagagtggttagagtatctacggcagcagggctattataccgccgtctgctacggctggcagccagcagcgcagttgatagagcagtatttattacattcagacaagcttacaaaagaacaggaaacagtaaccatgcgttagaggcgaacgcaggaaagagaggcaaagaatgaaaacaataagcattttgaatttaaagggtggcgtagccaagacctttacagcggcaaacatggcgtatgagatttacaggagaggttacagggtgctactgattgacaatgataagcaaggaaatttaagcaaggcgtatagcagatacgacgcagagagcgtagcaccagttacaaggttgctggctggggactggcagggagcaacagagctgatacagaatacaaattacgtagggcagcagtgctgcatagatattgttacgtcgaatatgtcactttttggggctacgtggaatttgacaaaagaggacagcgagaaccagacagaacgctataagagatttgcagacattatgggcggcttttatgattactgtatcattgataacccgccggatattggacttaatgtcataaatgcgcttgcaatcacggacgaggtaatagtacccgtaaaggtggacgaggacgctttagaggggctggacattgtgacagagcagatagaggacgcaaaggcatttaacccagcattaaagctggcaggcgtactgattacgtcataccagaacacagacggcgaggcagcaggcgtagagtggctggaacaaaagacagattttaatattttgggtattattcggtattccaagaaagtagcagaaaatactttcatgcgtaagccgatttatgagtatagcccatgctgcggagcggcgcaggggtacaagaaatttgtaacagcgtatacagggaaagcgaggtagtgggtatggataaagaaaaacggttttgcccgttcaaaagcagtatgctggtagactacaggaacggcgcaaggaatgtgcgtaatttgtttgtaagatgcagcggcagtaagtgcatggcatataaaaacggcggttgcttaagactgggaacagaaacagagaagaaagcgaggtagagaatatggcaaagtttggtattaacgatattttgaacgcaaagacaaaagcagcggggcagcaggcacagacggacggatacaaagagatttatttaagcccttatgaggtaaaggcagcgcaggagaatacacaccagaaattagagaacatagaagagctggcagacagctttttacacgtagggcaggaacagcctacagtattggcgagagtaaacggggaataccgtataatcgacggacacagacgtaatgcggcaaatattttgaacttagagcgggggcataaggagtatgagaaagtgctttaccgctttatggatatgagcgaggcaatgtatgagctgcgcttattggcgggcaacggatatacgcaggaacttacagcctatgaaaaaaccagattagtagagcgcaccaaagctgcacttatcagagccaaggaagaggacggcttagagatacaaggcaaaatgcgtgatttagtggcggctatgataaacgaaagcagcacaaacgtagccagaatggacgcaatcaacaacaacgcaacgccggagattaaagagcagctgaaagagggcaatttaggtatcactgctgcatacgaggcagcaaagctggacgaggacgagcagaaagaaatagcggaaaaagcagcagcgggcgaaaatgtgagggtaaaggaaatagcggaaaaggtagcagagaaaaaggcaggggacgattacgaaacaccgcacccagaaagcataacgtctttgtgctattcctgccagaaatacaaggactgcaacgtaaaaacgggaacgtgccagaaatgcgaccagtacataaacaaggcagaggctgaaaagacggacgaacagcggtacagcgaagaacaggacgctatagaccgccagacaaagaagaaattgcaggagcgggcagacgcagaaaaaatggagcatctgccaagcgaggggaatatagagcataagcaacatgaattaaagatagtggtatctgattacgaggacgtaataagcgggaaaaagagctttgagctgcggaagaatgacagaggctataaacagggcgacagccttaaaatgctggaatttaaggacggtaagcatacagggcgcatgattgatgcagatattatttatatgctggaagattatacagggcttacagagggctactgtattctgggtatcagagtaacagactatacgggtaaggtgtccgaaacggacacagaaagcggggcagtaaatgtttgagtttatggacgacgtagtagatgcgatggaagaaacgggaaaggtagtagtagacggggtggtatattgcctgatatgcgtagctaaactggcgttgataataacagcgccagtatgggcgctgccgtatacgatatggagaaaggggcgtaagcagtgaaatacagacagtggaaaaagaactataagaaaaagcatggagtaaacccgccgttagagctggacaagcgaaaacagcgcaggcttgcaagaaaaatggcaagacagataaataaaaccttgccaacagcagcagaaacattgacggcagctattaaccgctgggcgcagagtataaagccagcactggcgacattatgcgagaacgtagcagcggcgtttagcaatatggcagcaggattgagagaagaaagcgaggcggtagaaaatgactaatattttactgggaattatagcactggaattgctggctatattttcaaagctggacaaactggaagagaggggcagagagaatgaataacgtatcacttacagggcggcttacaagagagccagagcttagatatggcgggcaggacaatagcacagctattacccgctttacgcttgcagtagacgacgggaaagacacagattttataaatattaagtgtttcggacgtactgcggaatgggcgcagaaatggttaagcaaaggcagcagggtagaggttacgggcaagattaaaacaggcagctacgagagccagcgcacgggcagcaaggtatattacacagaggttgtggcaaatagcgtaggttttggagagagtaaagcagaggcagaggcgagagggcagcagctgccggagagtgacgggtttatgaatatcccagagggagcagacgaagagctgccgtttaattaacagaaagcgaggtacagaacatggagcaggaagaaacaaagacaacagcggcggcaggggcagaaatgccgccagaggctgaaagctgggtacagctgcacgaaagcgaattaacggagctgatgcagaaacaggcaaaggctgcaataacggaactgaaaagacaggaaaagcaggaacggaagaaagagaaataccacaacacttttacgcttatgaaatgttaccgtgatgcggtttttcatatcgagaacgcaataagcgacgggcagcagttagagcttaagggtatgacggacgagcagcagcgtacatacttagagagtatcagacgcacacgctttaagacattgataatgacagcgcatatagacaaggcggtagaagagatagagcgccgcagagaggcagcaggcagaggcgtagagtacaaggcttttgaaatgtatttcatgcagggtatggactatgcggaaattgcagagcagctggacacaggaaagaatacaccgaggcgctgggtaacaggtatcataaatgagctgtcagtattattgtgggggattgatgaagagcgcacagctggcgtggtaaagtaatggtaaaaacgtggtgtttacatgggaaaacaaaagagatacaatggtagcatgaaatgagtaggcgatagcttaagccatgtgcggcagcagttgcctactctttttctattcattctttagcctccacccagcgcatgaaacttagggcgctggggaatgaagaaagagaggggacagtatgaaagcatgggctaagagtttttatttatcagcggcatgggaaaaaaccagagccgcttatttaatgtcacaagattatatttgtgaacgctgcgggcagcccgcaaagatagtgcatcataagcgctggcttaacagagagaacataaacgacataagcgttacgttatgctgggataacttagaggcgttgtgccaagactgccacaacaaggaacaccacaaacaggagagacataagcggtatcggttcgacgagaatggcggcatactccccccatatcagaaaaataattaaagggggcgaataccgagggggataccctaaaattaccctacgggcgtgcgcacgggtggtgtagggggtgtggtgcggcgcaggaatggaaagcggggtaaaggaatggcaacaaagaaagagaaaaccaaagaacagaggataaagaccgaaaagaccagacttaagggtattttcaaggacttagacgaaaacaaaagaaaattagtaacgccgctgatagaaaaggctgcatttatgagcgttgagctggacgacttgcaggcgaaacttgaaaaagacggctggacgagtgagtaccagaacgggcagaaccagtgggggacaaagaaaagcccagaggcagaaacttacatagcgcttagtaagaactatgcagcagtgattaagcagcttacggaattagtaccagctgcgaaacgaaagacaagcaggctggcagctttgcgggaagagtaagcaatattgccgccttatcgaaactatatctatgagtaccacgcaaagattacaagcggcgaaatcatagcgggaaaatggataaagaaaatatacgaaatcattataaacgggctgcaaaagcaggagtatttttttaatgcaaaggctgcaaataaggctatacggttcatagagaacttttgccaccacagcaaggggcgtaatgatttaatcaagttggagctatggcagaaagccatagtttctgttatttttggcatacaagacgcagaaaaaatacgtattttccgtgaaatttttattgtaattggcagaaaaaacggaaaaagtttatttgcatctgcgattattgcatatatggcgtacttagagccggagtatggacaagaaatatactgcttagcgccgaaattagaccaagcggcgctggtgtatgacggattttatcaaatggtacaggcagaggacgagttagcggagctggcaaagaaacggcgcagcgatatttatattgcggagagcaacacggtaataaaaccgattgcttttaacgccaagaagtcagacggatttaacccgcagcttgtggtatgtgatgaaatggcagcatggagcggggacgctggactaaagcagtatgaggttatgaaatccgctttaggcgcacgtactcaacctatgatattgagcataagcactgccggatatatcaacgacagtatttatgatgaactaatgaaacgtagcacaagtttcttaaaaggaaacagcaaagagcgcaggctattaccattcctttacatgattgatgatgtggagaagtggaacgacatagacgaac

SEQ ID NO: 11469 - DNA, 1144 bp, Unknown
  gut microbiota DNA sequence
caatatttcctaaatagaacaaaaaagccccggaaagacaaactgtctttccggggcgggatcttcttctgcaacttctgcttgtattcccgcggtaccacccgctttgaaaaatgattcgtaaaaatcattcttccactctttgtgcttaacgcgcaccaacgtactgacctactttaccgctgccgtcccgcttttacttctacccgcaggataaccgcctgttcgaccagtctgctccagagtgttcccgttatctgctctcccaaacagcgctctcagtcggtgacgctgtattcctgtcgatgtctgaagataagagtctccttcatagcctttcatgctttaacaatttaatgttgtaacatttataccacatcattctggggttttcaagatattttttcaaatattttgtaaaatatgtgcggcacggtgcattgccggcatcttctctatattgcgcctttttcttttaagtacgccagaaatccctcgcatccggcatccacatcccggtaggtatcctcaaaattaccgctgtaccaggggtctgcgatcgagcagcccggtctgtccgtgtaatctaacaacagccggatcttgccctccgtatctgctcccgtaatcctgatcgtattgcgtatattcgcagtatctgcacagagcagatagtcataatgctcatagtcttccctggttacctgtctggcgcgcttgccgctaaaatccgtgtacgccgtcccgccaattccccgccgtcttaattctgcctgcgccggcggatagatcggattgccttttccgttccagatctcttctgtggaggtggcggcggaagcaatctcgaaacgggaggtgagatgccgcttttcgactttgtcttttaaaatgaactctgccatgggggaacggcagatattgccgtggcaaatgaatagtatttttatcattgttgcataacctcgcatttcttagtttttcttggtttttcgggctttgtaagcctttgtgaatttttcttttctggcataacctggtttattttctcataatatcgtccgcaaaaggtgtaaaataaggtgtatgtttttccattttacaccttgctattttcaattaaaaatcgtaattacacaacctg

SEQ ID NO: 11470 - DNA, 3787 bp, Unknown
  gut microbiota DNA sequence
gtcttcacaagtgcacggctttgtttaattgcaagctcgccgcgcaaaactgtcataagcatatatactccctgctctgtaaacacataaggtttgtattttatatttgaacctcttcccatattcaaggtgaaatttttgcaccttgaaagattttccacttcttcatcattcaattcaaacataaaatcatcgccttcaaatttggcaatgttattcttaacctgccttttaaaatttttggtttcatacccataaatttctgccaagtctgaatcaagcataacttttttccctctgaattcataaagccgatccttcatgtattcttctgtaatttcaattactgcaatttctttctttttatcttctgccatatatttccttccttgttttgcggtcacaaactgtgaccgcaattctcatatgaacatagtgccgacatcagcaatatgtccgatttgttattattgttctattatttcagttaatcattttcttttccatactaaactttctcctcccacattgaaccattttactgacgtcagtaaaatggtctattcttcttttttcttcattttgtcataatacgctttatacctataaatcgtccgctcactgacattgttcctcttcgcaatttctaccattgtcatgccgctctcatacccaacaacaaaatcattataaattgccatccatttggcgttatgtttctgacgaccgcttaacttacgatttctgtaatactccaattcctcccgaagttctgcattctctttttccaactcctcaattctttttaatgcctcttcaagtgttacaattttctccattatcctgtcctccgttcatgtcattttcgttttgtctatattataaatatttgtgtctctttcgtcaatccgattatgtcatgttgtgttattttttacaatagctttcatacaatcgaaataccgctgatatcttttacaggctaaacttctccaaaagcagtcagccttaatacttcagtatcattaccttgtcccttgaacacttccatatcagtaaaaaggacatccccttacctgtaaaatctacagttccggaatgtccttttttccatacttcactatatttttaacacatgatgctacttatccacaatctatacaattccaaaatgcttaaacgcctgcataatcgcttcttccttctccggtgtacattgtggctgtctcgcattctctgacttaggcagattaaaattctctcccacatccaatccacatttcttcttaatctgtgcaatatacaacgaagaaaccttcagtcctgtcttttcaagtacatatgcctttatctgctcataagttgcttttcccttaaattcagataaatccatatcctccagagagaagtccaccttcacttttctgctgtcgaccagtctccgttccacttcggtccgcgctgagcaaaggtccaccggacctttagcgcccttggaaagtaagacaaccgtctccacatgcttcgtccatgggaacatatcgaccggctggcactcctgtgcccgatagccatgctttgtgagatacaaaagatcccgcgccagcgtctccggattacaggaaacgtagacgacacgcttcggtgccagcgtcaccacagaggagagaaacgcctcgtcacttccggcgcgcggcggatccatgaatacgacatccacctcgtctgccccgttcttctctccggccttcgcatccgcacggtattctgccatctccaccatgaactgtcccgcgtccgcgttgtaaaactcaatatttttgacgttgttacacttcgcattttttaccgcatcgcgcaccgcatcacggtttaactctacaccaatcacttttttggcagacttcgcagcaataatgccgatcgtaccagtgccgcagtacgcatccacaactgtctcttttccggtcagacccgcatatgcaatggcttttccgtagagaagctccgtctgcaccggattgacctgatagaaggacttcggcgaaatacggaacgtacagccgcagagtgtgtcctcaatatagccttttccgtagatcacactctccttgtcgcccagcaccatgctggtacgcttatcatttacattgatgatcaccgtggaaatctccgggtgcagcttgccaagcgcttttacaaagttattcttcgacggcagcaccggcgagccaagcaccaggacaaccatcacctcaccgctgtggaatccgcgccgcaccagcacatgacgcagcagaccgtaaccggtgtcctcatcgtatgtcttgattttaaaagaatgcaaaagcctccggatgtcacggatgatcgcactggatagttcatcctcgatctgacaggcatcgatattgatgacctcatgcgttcccgctttgtatacacccgaaataattccccccggtgccggctttgccgctaatcttccgtttttgccgtttccctgctttccatttgcagctttaccgtttccacgggctccgggacggctgccacgctttttttcaatatcaaacacggcgtgcaccttgttccggtaatgatacggctcgtccatccccagaatcggcagcactttgcaaaagtttccgacctgcttctgcacatatgcctgcttctctttgagctgcttctcatatggcatgccctgataatcgcatccaccgcacttcttcgcgtaaggacagaccgcatctgcgcgctccgccgactttatcggtttttccgcatttgccggtcttgtcgcctttatcggtttttccgctttcgccggtcttgccgtcttttccactttcgacattttttcctgcgttccccgccgttcttctttcttcttatttatctgcattttctttttcatatctgctcactcctgtggttcttccaatgtcacaaagaccggttcgtgctccagcgcaggaacaattttttcccacatgtctttctgccttatgcgaaggctggacgtgttgatgcacggatggcacccgatatagtcaccctccagcacatcccggtccaccagaagccggacacggtgttcccggtcgttcatcagaccgagcacgctgaccgacccgggcgtgatgtctaaaagctcctccatataagtctcttttgcaaaagacaggcgtgacgaatggatctgtgccgacagatcctttgtcttgaacttcttatctcccggtatcatcagcaggtaaaatgttgtctcctgccggttgcacagaaacagattcttgcagatcattgcgccgagcgcttcgtcgacatccgcacactcttccatcgtcattgccgcctcatgatcaatccgctcatattcgatattcagtttgtccagaaaatcgtacgtccggacttcttttcccagacgtcccgcgcagtcggcaggacgtcccttctctaattttaacatatgtttacctcgcttttttcatcatacatcaggaatgatcgcttgaaaagctttctttttcgatgcaaaaggctgccaaaagaaacagcagtaaaatggcgccgagcagcagcaacaccgtctttaacccccaccggtccgcaaacgctcctgcgagcgggaacagcacaatcatggcaatggaaaaacacatgctgtcgaccgagattaaggttgccctctgttcggacggaatcaatgcgttcagggagtccgactggatcggatacaatgccgcgttcgcaaatccggcacacataagggccgctg

SEQ ID NO: 11471 - DNA, 38800 bp, Unknown
  gut microbiota DNA sequence
gtatgtatcgacggggcttctggcggaggcgtgccttctgtacgggtttctgcgcaaaagaaaagcataccgggcggcggcactcggctatggcatcctgctgttgctgatcccgatgaacgggggcatgagaacggtctggggactggtatttttctgcagcgcggtgctgctgatccggttctgcagggaacagtatgaaacctggatgaagatctgtggttatctgatgtttttggcattcctgtcagaaacggcggtgtggggaacggatctggcagcggtcgcagatgtttacctgagcgatctgatctgttttatgccgattgtgctctgcaatattctggcggcgaaagttccgctgtttcgcagaaatccaaagacgggagaggaagaaaaagcattcgcggcggtaacgatggccgtgcaggcgctccttattgcagcggttctggttctgatgggaaaaccggacgcgccggtgcttcaccttatctatgtgcttttgggactggtgctcgtgtgcaccaatacctacagcctgctgataaggaaggacggagactggtggggaatttacgtggcgttaaagctgctgctgtttgcatcggtcgcactgcactcctatggggtgcccgtgttcgtgaacgatgtgacgggcattgtgattgcgttctgctgtatcgtggcgggatttctggcggaaatgcggatgaagagaaaatataaggcgctgcgggtctgcggactggttctggtgctgctgtgcgttgtaaaactggtgctcgtggacatccgctacgacaatgtgctgctccgggcggcgggattttttgtcggaggcatcctttgctttggtatcagtcttgtatacaatctggtcgacaagcggatggggcggcgcgaaaatgcaaaaaactgaaaaaaatccttgcaattcgcggtttcatcgtgtatactatgcattgctgtgacattgatagcgttgaagcgtgaggttgctgcagagcattgcaggttttccgtggagcgaatgtcaagttaggaaactggcgacaagtcactgtatcacgaatagaatttgtccgaaggacagagggatggcgtgtaggaagcgcgggcttctttgtgggcgtgagtccatgatacacgcgggtatgtgtgcagtcaccgcttgtcgtacaaaaagcgattacatcgcttgtaaaagtgcgaaaaggaggcgactttttttatggcaagtcaagtaatgagaatcactctgaaggcttatgatcacaagttggttgattcatcagcacagaaaatcatcgaaactgtaaagaagaacggatcacaggtgagcggaccggtacctcttcctacaaagaaggaagtagttacaatcttaagagctactcacaagtacaaagattcccgcgagcagttcgagcagagaactcataagagactgatcgatatcgttacaccgacgcagaagacggttgatgcattatcccgccttgagatgccggcaggtgtttacatcgatatcaagatgaagaacaaataatttcttcatcccagacaaatcaatgatttagttaatatcctgaagggttttatatagaagtaatgcaggcggtgaaaacttcccattccacttatatggactttctaggatgaacggttccgctaccccacatggttgggcatgaagcgttccgctgtagagaaaacaggaggtaaaagtatgaagaaagcgattttagcaacaaaagtcggaatgactcagatcttcaatgcagacggtgttttagtaccggttactgtattggaagcaggtccatgttctgtaacacagatcaagacagtagagaacgatggatacagtgcagtgcaggttgcatttgctgacaagaaagaaaaggttgtcaacaaggatgcaaacggcaagaagcaggtagcacacagacatggtgtaaacaaggctcagatggggcattttgcaaaggctggcgtatccggcaagcgttttgtgaaagagttcaagtttgagaacacagcagattacaatcttggcgatgtgatcaaggctgatatctttgcagagggcgacaagatcgacgctactgcaatttccaaaggaaaaggattccagggcgctatcaagagattaggacagcacagaggtcctatggctcacggttccaagttccatcgtcatcagggttccaacggtgcgtgttcctcaccgagccgtgtattcaagggaaaaggaatgccgggacacatgggaagcgtacaggttactacacagaaccttgaaatcgtaagagttgacgcagagaacaacctgcttttagtaaaaggtgccgtaccaggtgctaagaagtgtttagtaacagttaaagaaacagtaaaagctggtaaatagtgctcgaataggaaaggaggaactaaacgatggctaaagtagctgtttataatatggaaggcaaggaagttgacagccttgagttgaacgatgctatcttcggagtagaagtgaatgagcatttagtacacatggcagtccttcagcagcttgcaaacaaccgccagggaacacagaaggctaagacccgttccgaagtacgcggtggtggtagaaaaccatggagacagaagggaaccggacatgcaagacagggttcaaccagagctccgcagtggacacatggtggcgtagtattcgctccggtaccaagagattattctttcaagctcaacaagaaagagaagagagcagcattaaagtctgcacttacttcaagagttgctgagaacaagttcatcgttctcgacgagttaaagcttgacgagatcaagaccaagaagttcgtagaggttatgaagaacttaaaggttgagaaggcacttgttgtattgaacgatatggatgtcaacgtaatcaaatccgcagacaacgttccgactgtaaagactgctcagacaaatgagctgaacgtatttgacgttctgaagtatgatacggttgttgtaacaaaggacgctgtaaagacgatcgaggaggtgtatgcataatggcaaacgtacagtattatgatgtaatcctcaaaccagtagtaacagagaagagcatggcagcaatggctgagaagaagtatacattcttagttcacccggaagcaaacaagtccatgatcaaggaagcagttgagaaaatgttcgagggaacaaaggttgcaagcgtcaacaccatgaacatggacggcaagaacaagagacgtggaatggtaaccggtaagactgccaagaccaagaaagctatcgtaacattaacagcagacagcaaggacatcgagatcttcgctggactgtaagatgaaaagcgtttcattctgatagcaaactaggcgcagcgatgcgcgataacaaacatcgaaaggagaacaacaatgggaattaagacatacaacccatatacaccttccagaagaaatatgactggctccgatttctccgagatcacaaagacaactccggagaaggcgctcactacttctttaaagaagaacgccggtcgtaacaatcagggaaagatcaccgttagacatcacggcggtggaaacagaagaaaatacagagtcatcgacttcaagagaaacagcaaagacggaattccggcaaaggttgttggtattgagtacgatccgaacagaacagcaaacatcgctctgatctgctacgcagacggcgagaaggcatacatccttgctccggcaggactcacagatggcatgactgttatgagtggtgctactgcagaggttcgtgttggtaactgcttaccgctcgagaatatcccggttggtacccaggtacacaacgtagagcttcatcctggcaagggcggacagatggttcgttccgctggtatgagcgcacagctcatggcaaaggaaggaaagtacgcaacgttaagacttccgtctggcgagatgcgtatggttccgttaaactgccgcgcaaccatcggtgtgatcggtaatggagatcacaaccttgtaaatatcggtaaagcaggacgtaagcgtcacatgggtgttcgcccgactgtacgtggttccgttatgaacccgaatgaccatccacatggaggtggtgagggccgtgctccgatcggacgtccgggcccatgcacaccttggggcaagcctgctcttggtcttaagaccagaaagaagaacaagtcttctaacaagatgatcgtaagaagaagagacggtaaggcgttgaaataagtttcaaccattgataagcccatcgggtgtttgtcaaaaatatacaaataagctggaatttgaccgggagaagttgtacttgcttcttccggcatgttctgctataataaacaagatgttcgtagtccgaggaaacacacgggtgtgtgtaaggactgataatattaggaggtaaattatggctcgttcattaaaaaaaggaccatttgcagatgaaagcttactgaaaaaagtagatgctatgagcaaagccggtgacaagtctgtaattaagacatggtcacgccgttctaccatcttcccacagttcgtaggtcacacaatcgctgttcatgacggaagaaagcatgtaccggtatatgtgacagaggatatggttggacataagcttggtgagttcgttgctacaagaacttacagaggacatggaaaagacgagaagaagtcaggcgttagataagaactatttttgaaaggaggtttcatccatggctaagggacatagaagtaagatcaagagagagagaaatgaagtaaaagataccagaccatccgcaaagttatcttatgcaagagtgtctgttcagaaagcatgcttcgtattagacgcaattcgtggaaaggacgttcagacagcattagctatcgtatcctacaatccgcgttacgcttccagcgtggttaagaaactgttagagtcagcaatcgcaaatgctgagaacaattatccggagaagaattacaagttggagaacctgtatgttgcagagtgttatgcaaacaagggaccaacaatgaagagaatcagaccaagagcacagggcagagcttacagaatcgagaagagaatgagccacattacaatcgtgctggatgagaaataataaggaggtcaaacatgggacagaaagttaatccacatggcttaagagtcggcgttatcaaagattgggactctaaatggtatgcggaagcagatttcgcagatttcttagtggaagactacaatatcagaacttatcttaagaagaagttatacgcagcaggtgtttccaagatcgagatcgagagagcatctgatcgtgtaaaggttatcatctataccgcaaaaccgggcgttgttatcggtaagggcggcgctgagatcgagaagatcaagggcgaggttcagaagttcacagacaagaagttagttgtagatattaaggaagtaaagagaccggaccgcgatgctcagttagtagctgagaacattgcattacagttagaaaaccgtgtttctttccgtagagcaatgaagtcctgcatgggaagaaccatgaaggctggcgcaaagggtattaagacatcctgctccggacgtctcggcggtgctgatatggctcgtacagagttctactctgagggtactattccgcttcagacacttcgtgcagatattgattatggattcgctgaggcagacactacttatggtaaggtcggcgttaaggtatggatctacaagggcgaggtacttccggtaagagcaaataaggaagggggagctaactaatgttaatgccaaagagagtaaagcatagaaagcagttccgtggttccatgacaggaaaggcaaccagaggaaacacaatcacctacggtgagtacggtattgttgctctggaaccatgttggatcaaagcaaaccagatcgaggcagcccgtatcgctatgacaagatatatcaagcgtggtggtaaagtctggatcaagattttcccggagaagcctgtaacgcagaagcctatgggtgttcgtatgggtaaaggaaaaggctccctggagtattgggtagctgttgtgaaaccaggtcgtgtattatttgaaatctccggtgttccggaagacgttgcgaaagaagcgttacgtcttgctacacacaaattaccttgcaaatgtaaagtagtttctcgtgcggatttagaaggcggtgtatcaaatgaaaactagtaaatatttagaagaattaaaaacccagtctgtcgcagatttgagcgcacagttagtagaggctaaaaaagaacttttcaatttgagattccagaacgcaaccaatcagttagataatacaagcagaatcaaagaagtaagaaagaacattgcaagaattcagacgatcattactgagaaagaaaaagttgcgcagtaggattccagaaaggagaatagtcagtcgtggaagaaagaaatcttagaaaaacacgtgttggtattgttgtaagcgacaagatggataagacaattactgttgcaatccaggataacgtaagacatcctctttacaacaagatcgttaagaaaacatataaattaaaggctcatgacgagaagaacgagtgcaagatcggtgacaaagtcagagtaatggaaacaagacctttatccaaggataagagatggagacttgtagaaatcatggaaagagcaaaatagttagaaggaggctacaagcatggtacagcaggaaagtagacttaaggtagccgataacacaggagcaaaagagttgctcgttatccgtgttatgggtggatctactagaagatatgcgaatattggtgacgttattgttgctacggtcaaagatgcaacaccaggcggtgttgttaaaaagggcgacgttgtgaaggctgtagttgttcgttccgtaaagggcgcacgtcgtaaagatggttcttacatcaaatttgatgagaacgcagcagtcatcatcaaagatgataaaactccgagaggaacacgtatttttggaccagtagctagagagcttcgtgagaaacagttcatgaaaattgtttccttagctccggaagtattgtaggaggatcggaatatggcaaccatgaaaattaaaaaaggcgatatggtgaaagtaatcgctggtaaagatatcaacagcgaaggtaaagtcattgctgttaacagaaaagacggaactgtactggttgaaggtgtcaacatggtgacaaagcatacaaagccaagtatgcagaatcagcagggcggcatcgttcaccaggagggaccgatcgatatttctaatgtaatgtatcttcacaacggaaagcctacccgtgttggtttcaagatggatggagataagaaggtacgtttcgcaaaatctacaggcgaagtaatcgactaattagagagaggaggccaatcaggtgagcagactgaaagaacagtaccagaatgagatcgtagatgctatgatcaagaaattcggttataagaatattatggaagtgccgaagctcgacaagatcgttgtcaacatgggcgttggcgaagccaaagagaacgcaaagttattagaggctgctattaaggatatggaagcaatcacaggacagaaagcggttgcaaccaaggcaaagaattctattgcaaacttcaagatcagagaaggtatggcaatcggatgtaagacaactttacgtggcgagaagatgtatgagttcatggatcgtttgatcaacttagcattacctcgtgtacgtgactttagaggtgttaacccgaacgcgtttgacggtcgtggaaactatgcccttggtatcaaagagcagttaatcttcccggagatcgagtacgataaggttgacaaggtacgtggtatggacatcatcttcgtaaccactgccaagacagacgaggaagctcgcgaattattgacacagttcaatatgccattcgccaaataagtaggagggaattttaatggctaagacaagtatgaaagtaaaacagcagcgtaaaccaaagttctctaccagagcttacacacgttgcaaaatttgtggtcgtccacattctgttttaagaaaatacggaatctgcagagtatgtttccgtgagttagcatacaagggccagataccaggtgttaagaaagcaagctggtaaaagaccgtgcagcatatttgctgcaatcaataataaggaggaaatatacaatcatgactacgagtgatccaatcgcagatatgcttacaagaatccgtaatgcaaacactgctaaacatgatacagttgacgttcctgcatctaagatgaaaattgctatcgctgacattcttgtagatgagggatatatcgcaaaatatgatattgttgaagatggtaacttcaagaccatgcgcattactttaaagtacggcgcagacaagaacgagaagattatcacaggattaaagagaatctccaagccgggacttcgtgtatacgctggcaaggatgagctcccgagagttcttggcggactgggaatcgcaattctttccacaaaccagggaatcatcactgacaaggaagcaagaaagcttcaggttggtggcgaagtattagctttcgtatggtagattttgcccgccattggacggacaaaatcggaagaaccaaaggctggttcttccgagagcatcttccgggagcatctgtctctggtctgtccagaagcaatgttgctttcggttcttccgggttacttaacctggaggaggttcttaccgaatcgggtaactacggcgcaagccgcaatgatataagcacaaattaggaggtacgggcatgtcacgtataggaagaatgccaatcgcagttccggctggtgtaacagtggatattgcagaaaataatcatgtgactgtaaaaggtcctaagggaactcttgagagaacccttccgtccgagatggacatcaaattagagggtgacgaagtaatcgttacaagaccgaacgatttgaagaaaatgaaatccttacatggattgacaagaacactgatccacaacatggttgttggtgtaactgatggatatacaaaggagctcgaggtaaacggtgttggttacagagcttccaagtctggaaaagtccttactttaaaccttggatactcacatccggttgagatgaccgatccggagggacttgagtccaaagttgatggaaacaagatcattgtatcaggtatcgataaagagaaggtcggccagtacgcagcggaaatcagagataagagaagacctgaaccgtataagggcaagggtatcaagtatgctgatgaagttatcagacgtaaagttggtaagactggtaagaaataattaaaggagtgacgaaaaatggttagtaagaaatcaagaacagcagttcgcgaaaataagcatagaagaatgcgtcatcatctcgtaggcactgcagagagaccacgcctggctgtgttcagaagtaataatcatatgtacgctcagattattgatgatacagtcggaaatacacttgtttctgcttctacccttgagaaggatgtaaaggcagagttagagaagacgaataacgttgaagcagcagcaaagcttggtaccgttatcgctaagaaagcattagacaagggtatcaacacggttgtattcgatcgcggcggtttcatatatcagggaaaagtgaaagctttagccgaagcagcaagagaagctggattagaattttaataggaggaaacgcaaaacatgaaacgtgaaattattgatgctagtcagttagagttagaagaaaaagtagtatcaatcaaacgtgtaacaaaagttgttaaaggtggacgtaacttccgttttacagctttagttgttgtcggcgacggcaatggccatgttggtgcaggtttgggtaaagcagccgagatcccggaggcaatccgtaagggtaaagaggatgctatgaagaagctcatcacagtaaagctggatgaggttgacagtatcacacatgatgttattggtaagcacaccggtgcttccgtattattaaagaagtctccggatggtactggtatcatcgctggtggtcctgcacgtaacgtatgtgagcttgcaggtatcaagaacatccgtacaaagtctttaggttcaaacaataagcagaacgttgttcttgcaacgttaaacgctttgagccagttaaagtctccggaagaagtagcgaagcttcgcggcaaatccgtagaagagatcgtaggttaaggaggaatttaagatggcagagaagaaacttaaagttacacttattaaatccacgatcggtgcagttccgaagaacaagaagaccatcgaggcactgggactcagcaagctttacaagactgttgaacttccggacaacgctgcaacagcaggcgcgcttcgcaaggttgcaccatatgtgaaagtagaagaagtttaaaataagaggataaggaggtgtcggtaatggacttatcaaatttacagggagcggcaggttccactcagagcgataatttcagaagaggacgcggacacggatcaggaaatggtaagactgctggtaagggacataagggacagaaggctcgttctggagcaccaagaccaggtttcgaaggtggtcagatgccattatacagaagattgcctaagagaggtttcaagtgcagaaactccaagacaatcatcggaattaacctttcagctcttgaggcgttcgaggacggcgcagttgtatctgttgagacattgatcgaggcaggcgttgttaagaacccaagagatggcgttaagatccttggtaatggcgaacttactaagaaactcaccgttcaggcaaatgcattcagcgcaagcgcaaaagaaaaaattgaggctcttggtggaaaagcagaggtgatctaatgctagagacactccgtaatgcatttaagattaaagatattcgcaaaaagattatttttacatttttgatgttaatcgtcatcagaatcggaagctgtcttccgattcctggtgttgacagtgatgtatttgcgaactggtttgcaagccagaccgcagatggaatgggattctttgatgcaatcacgggaggttctttctacagaatgtctatccttgcattgaacattaccccgtacatcacgtcatccatcattatgcagcttcttacaatcgcgattccaaagttggaagaaatgcagcgtgacggagaggaaggtcgtaaaaagatcgcagagatcaccagatatctgacggttgctttagcactcatcgaggcggttgcaatgacaatcggcttcagaagaggcggctatctggaattcagcagtggataccagggtgttcttgatattatcatggttatcttcacattgacggcgggatctgctgttcttatgtggattggtgagagaatcacagagaagggcgttggaaacggtatttccatcgtacttaccatcaacattatctcacgtatgccggatgatattaagacgctgtatgatcagtttatttcaggtaagaatgtaccgaaggcaattcttgcagcagtcatcattcttgcaatcattgttggaatggtactgtttgttgtatacttacagggcggcgagagaagaattccggtacagtattccaagaagatccagggaagaaagcaggttggcggtcagtcaacatatattcctctcaaggtaaacaccggtggtgttatcccggttatctttgcacagtcactgttgcagacgccggtaatcattgccagtcttcttggcaaaggaaatggaacaggtattggaagcaagatcttaagaggtatgtcacagtcaaattggtgtaatccaagcgagccgatttattcgatcggactggttgtatatatcgtattgatcattgcgtttgcatatttctatacatcgattacgtttaatccgttggagattgcaaacaacatgaaaaaagcaggcggatttattccgggtattcgtccgggtaagccgaccagtgattacctgaaccgaatcctgaattacattgtctttataggtgcggttgcactcgcgttcatcgcgtttgttccgattttctttaacggtgtgtttggtgcggatgtatccttcggtggaacgtccatcatcattatcgtaggtgtcgttatcgagaccttaaagcagatcgaatcgcagatgcgtgtacgttattataaaggatttttaaatgattgatccagcagagctgttggatatgggaaggaacgctggacttattttataagttcagcgttttcgcttaaaaagaaaaaggagaggtattcctatgaaaattattatgttaggggctccgggagccggtaagggaacacaggcaaagcagattgcagacaagtacagcattccgcatatttccacaggcgatattttccgcgcaaacatcaagaacggcacagaactgggacagaaagcgaaaaagtacatggatcagggccttctggtgccggatgagctgacctgtgatctggtgatggaccgcattcagcaggaggactgcaagaatggatttgtgctcgacggatttccaagaacgatcccgcaggcggaagctctggatgcagcgcttgttaagatcggccagaagatggacttcgcaatcgatgtagatgttccggatgagaacattgtgaaccgtatgagcggaagacgcgcatgcttaaactgtggcgcaacctaccacattgtttccattccgaccaaggtggagggaatctgtgaccgctgcggtaattcagtggtactcagagacgatgataagccggagaccgtacagaagcgtcttaaggtatatcatgagcagacacagccgctgatcgattattataagaagcagaacatcttaaagtccgtagacggtacacagccgatggaaaaagtgtttgcggatattgtggcaatattaggagagtaacatgtctgtaacgattaaatccccccaggaaatagaacttatgcgcgaggcggggaaaatacttgcaaaagtgcatgagcagctgggaaaagaattaaagccgggaatgtcaacactcgaggttgacagactgggagaagaaatgattcgaagctttggatgcgaaccgtcatttaaaggttatcagggttatcccgcatcaatctgcgtatcgatcaacgaggaggtcgtacacggaatcccgcgtgcagaccgcatcattgaggagggcgacatcgtaagccttgacgcaggtgtgatctacaaagggtatcagtccgatgcggcgagaacgcacggtgtcggtgagatctcggatgacgcgaagcttttgatagagagaaccagacagagctttttcgagggtattaagtttgcgacagcaggcaatcatctgcatcagatctctgcggcgatcggtgattatgccggaagttttggctatggagttgtgcgtgacctgtgtgggcacggcatcggcaagcatatgcatgaagatccggagatcccgaatttcagacagttccggcgcggtatcaagttaagacccggtatgacacttgccattgaaccgatggtagatctgggatctgccgaagtggtatggatggacgatgactggacagttgtcacagaagactggtcgctttctgcacactatgagaacacgattctgatcactgacggtgagccggagatctttacgcttacagagtctgagattgccacaggcagatggaatcagtatctgggcaggcagacagaggcatagaccggtcagtaagcgaatggagaaaaagatagtatgattgaatttgcaaaatccatggcaggtcatgacaggaaccatatttatctggttaccggaaaggatgagcggttcgtgtatctggcggacggcaatgtgaagctgcttgcggaaccgaagaaaaagaacagaaaacatattcagattattcacagattaccggaggaggtgctgggatgtctggagcaggaaattaccgatcttacggtaaagagggcaatcaaagcgtatgtgcgtatcttgaaagagcgtgcagaatcataatattaggaggatttatttatgtcaaaggcagatgtgattgaagtagaaggaacagtggtagagaagttgccgaacgcattctttaaagtagagcttgagaatggtcatcagattctggcaaccatcagcggaaagctgcggatgaatttcattcgtattcttccgggtgataaagtaaccattgagatgtctccgtatgacctgacaaagggcagaattatctggagagataagtaaaaaaagaattgacttctaataagtgttcatgctataatgctaaacggacacttttggatagtgcctttttgcgcatacagtgcgccaagaagagctatgatagaacatgagagatgcacgcgggtgcgtgccattcattgtttggaaaggaggatttgctgtgaaggtaagatcatcagttaagcctatttgcgagaaatgcaaagtcatcaagagaaaaggaagcatcagaattatctgtgagaatccgaaacacaagcagagacagggctaattgttcttgtctttttgcgctttcattatgtgcggctgcagtggaacaccaggatgagttgttcgcactgttatcatatgaaacagcagggatagctgcttttttgcgtttacataccgaggacgcaggggagaaccatccggaatacgagagaattgcgagggcacacatttcaggccggaggacaacggagctgccgcagcagattcttgaacgtaaaagtcatgatgtcaagtggcttgctttaagacgcggtctgtcatctggacagtcgcaggaatcagaaaataacaagatgcgcagtgtgtatcacaggcatcatatgaatcaatggaggttaaaaagcacatggctcgtatcgcaggtgtagatttaccaagagaaaaacgtgttgagatcggtctgacttatatctacggaatcggtagaacaagttctaaccgcatccttgcagaagcaaaagtagacccgaatacccgtgtcagagatctgacagatgatgaggttaagagaatcagtgcagttatcgacgagagtcagactgtagaaggtgatttaagaagagaaatcgccatgaacatcaagagacttcaggagatcggatgctatcgtggaatccgtcacagaaaaggtcttccggttcgtggtcagaagacaaagaccaatgcaagaaccagaaagggaccgaagcgtacggttgctaacaagaagaagtaattacttttgcgatttcgttcgcaggatcgccacagatgaagtatggcggtcagttgcatacaatcattagattattttgagaaagtaggttagtttagatatggctaaagttacaaaaaaagtgacaaaaaagcgtgtaaagaaaaacgttgaacgcggacaggcacatattcagtcatctttcaacaacacgatcgtaacgatcacagatgctgaaggtaatgctttatcatgggcaagtgccggtggtcttggatttagaggttcaaggaaatctactccatatgctgcacagatggcagctgagactgctacaaaggcagctttagtacacggattaaagacagttgacgttatggttaaaggaccaggatcaggaagagaagcagcaattcgtgcgctttccgcttgcggtcttgaggttacaagcatcaaagatgtaactccggtacctcacaacggatgtcgtccaccaaaacgcagaagagtttaattaggagggagagacgaaaatggcagtaaataaagttcctgttctgaaaagatgtagatcccttggtttagagccaagctacttaggatatgataagaaatccaacagagagttaaagagagcgaacaagaaggtgtctgagtacggtcttcagttacgcgagaagcagaaagcaaagttcatctacggtgtattagagaagccgttccacaactactatgtgaaggctgatcagatgaagggcatgactggtaccaacttaatgaccatgttagagtccagattagacaacgttgtattccgtatgggattcgcaagaaccagaaaggaagcaagacagatcgtagatcacaagttcgtattagtaaacggcaagcaggtaaatattccttcttaccttgttaaggccggcgacgtaatcgagatcaaggagaagaacaagggtcttcagagaatgaaggacattgttgaggtaaccggcggaagactggttccggattggttagatgttgacgctgagaaattacagggaactgtaaaagaattaccttccagagagcagatcgacgtacctgttgacgagatgctcatcgtcgagttgtactccaagtaatcgtgattaggcggagacaatccaataggcaaattacccgagaaggagggattttgtagtgttcgattttcaaaaaccaaaaattgagatcgcagaaatttcagaagacaagaagtacggaaggtttgttgtagagccactggaaagaggctacggtacaacacttggtaattctttaagaagaatcatgctttcttcattaccgggtgcggctgtcagccaggtcaagattgatggtgtgctgcatgagttcagctcgattcctggcgtaaaggaagacgtaactgagattatcatgaacatcaagaatcttgcaatccgcaataacagttctacgaatgagccgaaagttgcatacattgaatttgagggcgaaggcgtggtcacagcagcggatatccaggtggattctgatattcagattttaaatccggatctggtaattgccaatttaaatggcggagcagattgtaagttatacatggagcttaccattactaagggcagaggctatgtcagtgcagagaagaataagactgaggatacaccgatcggtgtcatcgctgtcgattctatctatacaccggtggagcgtgtcaacctttctatcgagaatacacgtgttggtcagattaccgattacgataagctgacactggatgtatacacgaacggtaccttagagccggatgaggctgtcagccttgcggcaaaggtattgagcgagcatttaagcctgttcatcgatctgtctgaggcggcacagcaggcagacgttatgatcgagaaagaggataatgcgaaggagaaggttcttgagatgaacatcgatgaactggaactttccgttcgttcttataactgtctgaagagagccggaatcaataccgttgaggaattgacgaaccgcacaccggaagacatgatgaaagttcgtaacctgggacgtaagtctttagaggaggttcttgcaaagttaaaagagcttggacttcagctgaaccagggagaggaataaatagaatcgagcatgctcgattcattagaagtttgacaggtcaaacttcgcgctaccttctgaactgctaccgttcagaaggtaccacgttatatggcagaaacagtaagaccgaaaggcatggagtatgtcgggagccagacaggaatgaatctgtgtgatttgttccggcgcgaaatggttcgcgcggcatcgggtgagtaagaccaaaaggcatcatcggatgtaccacatcaatggaggaaaagaaaatggcaaagtatcgtaaattaagcagaacctctagccagagaaaggctttattaagaggtcaggtaacagcattattaaacaacggcaagatcgttacaaccgaggctaaggcgaaggaagttcgcaagatcgctgagggactgattgctatggcagtaagagagaaggataacttcgaagaggttactgttaaggctaaagttgcccgcaaggacaaagacggcaagagagtcaaagaagttgtagacggtaagaaagtaaccgtatacgacgaagtagagaagaccatcaagaaagataagccttcccgtcttcacgctcgtagagagatgttaaaggttctttactctgtaacagaggttccgacggatgctgccggtaagaagaagaacaccaaggaagtagatcttgttgcgaagttatttgatgagatcgctccgaagtatgcagatcgtaacggtggttacacaagaatcgtcaagatcggtcagcgtaagggtgatggcgctctggaagtactgcttgagttagtataatcagatcgattttataaaaagagaagaaaccgctcagatgatgtctgggcggttttttattttataggaaataccgtgatacattcatgtgtgaaagtggaactttcctatgaaataaaaaacgctccgcgaggatgcgcagctcgcggtaaggaaaacatcgctttgcgaaccgctcgcgcgcggagaatctcacaagcgagattcttttttatgtagaaaataggagagcacggctttctgactgtgtaatccggtgatttcatccgatatatatataaggaataggatcgtaaaattacaatgaaggaaaaggagatttttctgtatggacagagacgacaacagaaaaatggatgaaggattgcagggaaatgagaagatcgaacaggcaatcagagaactccagcaggcaccgtctggtgaggaactggcgcatacacttacggtagtgcgcagacgcatgaaagaaggcgggcagtttattgtggcggtggaaccgccgcggggagatggaaaaattcagattcaggcaattcagacggcagatgggcagcaatggtgggcggcatttacaagcttcgaggaagaattaaaggggagtgggagcgtaatgtccacattcctttcggatatggaaaagttattcacagctgcattggggacagaagggataaacggtgttatcgtaaatccctggaaccgcacattgatgatggacaagaatctgatccagattgtgttgggaaatcaacattcctgactgtaagacccggcatttaggtccgatatatagagaaagacgttcagaagaacagggggaatgagttatggcgtttgggattgcatttgaaaatgggatcagatacgacggcaggacgggcggagaagcgcataagcccagaacagaccgcatggaaaaagaatttaagctggagacggcaccttacagtggaatggcggagaatggcatgatttgctataagggggttgtgtttacctgtgataccgagaataaccggatctgtctgggagatacgaccgatctgaagaaatgtatcaatattccgctggcgggaggcggaagtctgctggtcaacagagataatctggacgagctttccagggcgatcggaatgttttcgccggaggatgtcaagcgcattatgcaggcaatcgcacaggatacaaaggtacagcagatgcaaaaggaactggacgatgaaaagaacagcattggtaatttggcagccggtgaataaagtctggtgttgaagagttcaagagagaggagcgcgtggatgaatggatatgtgatagggttggtaatactgattgtgctggtgcttgcagcttctgcagcagcctctgtgatctgggatatcgactataagagacaggtatccggaaagagacagtttcacaagctggaggatggaaaacgcatatcgcatgatctgcgcgagagacagccggaagatccggagatcatttatctgggatcgaagatcaaaccggatctggaactgcggcagaaatagaaagcgttcgtttacattcctgctttttaataaaagcaaggaactctgggagcggaagaggctttgaaaaatagaagccctggatgtagtcaatgccaagctgctccattgcagtaagctgctcctgcgtctcgattccctcggagacaataccgagcttcatgtcctgaatcatatgcatggcagcgttcatgacaaaacggcctttctggctgctaaaatatgcctgggtcattacccggtcaaatttgacgatctgaacaggcatctcgacaatatagttcagattagactgaccggttccaaaatcatccaatgagaagctgacaccgtaggaaatcagcttttccatgttggtaagcagtgtctgcttcatctccatagttgcggattcagtgatttccagattgatattggaaggatcaatctgataacgttccatgatgcggatatagcgctcggcaagtttttcatcggaacactgtgcaacagagagattgacttcgatgtaatgaagcccatattgtgcaagctgttcgttgcggatggcatggcatactttttcaaatacgatctcaccgatctgatgaatgcgaccgctctcttcggcagcgcagatagaatcatatatcggcagcagatctccgtgggcatcgtacatgcgcaccagtgcttcggcgcaggtaaaagccttctgccttgtggaatagatgggctgaaaaaatacttctatccggttttgcgatatggcatcgtcgattttctggatcagatcattttcggcatacatgtgtgctgcgacagaggaatccacgggaataaaacgctgcacagtctgtttgatttttgtcctgcggcaatagcgcagcagagaaaagaagtcttcctggcagggtgttaaaagacagtcttccagaaaaagaattttcagattgctgcccgaggaagctgacaggtaggtgtccagcgcaaatttttggatggaagcagtatcggcatgattccacatggacgcgggggtcagcattacgatctcatcatctgcggtcttaaaaatgtatgcaccgtcagtagacagcagtttttttgccagatcctgcattgtctgctgtgagtcgtcccccgaaaaccggtgatcattgatgaatacaaaggcagtataagcagacctgtcataatagatctgatgaatgaattcataaaaagcagtctggttatacataccgcttgcgcggtcaagattgatttcaggattttcaaattgcaggtaaatgatgacaacgccaaggcagctgccaaatcccacaaccaggatttcaggatttaaaaactggatgatcgctgagagtatccatacgagcatccagagtaacattcctgtgcgtctgcgcacacggatctgtctgcaatatttcaggatgagggcaaaattcagcaggatcagtccgaccgcaccaagatacgtcatgagtgcagaagaaccataagtgtatacgatgtgtgtaacaggatcacagtatatggaaatcggaagaagatagatggaaagacagatgacggaggtgataagcaggataaggtgctctgttttccggaaggctttgttggagagcagaatatccacgccgatatacataacaccgcataaagcggtcagcaccagggtgataaggtaggttttgcacacaaatgttacaaagagtgcaggcagatgggaagcagattcaattgcgacaatggaaaggatgtccatcaggatgcataacaccgtgaccgcatagaaacgcaaaaaagcgcgccgcgaatacgtctgcaacgtgtgctgctgatggtagagcagatatagaatcactaataaaacaaatccacatgcctgtacttttatattcataactccattacctcattcgtatagaaacatctatgtaagtggctttctccctgaatttatggtatcatatatggaagcggatgggaacggaaaatctgtggacttgatagaaaatgacggaggttttctcagaatattatagatcaggaggaagcagatatggacatgtccctgcttcagacaaaaatgaagcctgcaacaccgctgccagaacttcagacagtggaagatatctatagatggatcgatgaaaatattgcatatggatggcaggataaagacggaggaacgcataccagcgaaatgaaagatttccggagattgtaccggacaatgtctgtgacggaaaccctgcggcagaagatcggaacctgcattgaacaggttgcacttatgcatgaactattggatgcaatcggcattccgaaccagatgtactgctgtcggatatttgagccggatgattacggaaatctggaggaagaggagcatatgcactgctttcttttgtatttccaaaatggaaaaacatatcacatggagcatccgaatgtagaacaaaagggaatttatgagtatccgacagaagaagccgcgctccggacaattacggaatattatgtgaagctgcgcggtggaaaagagagtcctaccacctgtttttccggcgtgccggcaggggtatcattccgggagttcaacgcatttatcaaccatctggcataggaacggagcaatgctcggaaacacgcgctgtggcgtcaccagaaaaaggggtatgcatataatatgcataccccttttggtaaaataatggatggtgttttacttagccgaagtatctctttaagagtccctcgaaagccttgccgtgtctggcctcatctctggccatctcatgaacggtatcgtggattgcatcgaggttggcagccttagctctctttgcaagatcagtcttgccggcagtagcgccgttctctgcatcaactctcatctgcaggttcttcttcgtgctgtccgttaccacctcgccgagaagttctgcaaactttgcagcgtgctcagcctcttcgtaagcggccttctcatagtacattccgatctccgggtatccctcgcggtgtgcaacccgtgccattgcaagatacataccaacctcagagcactcgccctcgaagtttgctctcagatcagaaaggatatcttcgctgacgccctgtgcaacaccgactacatgctcggcagcccataccttctcgccttcctgaagcttgaacttctcggccggtgccttacagaccgggcagaactccggagctgcatctccctcataaacataaccgcatactgtgcatacatactttgccataattcattctccttttcttataaaaattttaattggaatcaataatagtaactgttactgattttaaactgcaaaaaaacttttgtcaatatcttttttgcaattttctgatcaggatgagcatttttcagatgccttgcaggaagggcaggcgccgtaaaaataggtaatatgcccttcaatctcaccgtcaaagtcctgaccggcaagaatgttgatatgatctaagccgctcaccgtaagatccatcacacagccgcaatggcggcagatgaaatgatagtgtggagcagggttgccgtcgaaacgatccggtccgattcccggggaaagcttctggatctcgccgatttccgcaagcagattcaggttgcggtagacggttccaaggctgatattcgggaactcccttcggatattcagatatacggtctcggcggtagggtgatcataccgggttacaagaaaattcttgatagactcccgctgtttactgtacttcagcatggatgcgatacatcctttccttaaaactagtaattgttactgatatcatcttacacgcacagaaagaatttgtcaagagaaaaataggaataattattattttttgaaaagattctatttatggaatgcgtgcatatatatgaagataaggatagaagcatcagggagtacccatggcgggaatgaagcggtttgttacatatatatatgcctatgaggaggaaaaaaagggaagcaatgtcggatttgcgagaattgagatccggggacaggatgcaagaattgagattcatctgcgcggcgtctatgcggcgtctgcggcatgcagagtgtatctgttccagcgggaagcggcaggcgggaaggaagcaacaggtgtgaccggagtactggtcggtgagatgaagctgacgaacggaagcggcgatggcgccgttgtcttaaaaggcggcagagtcggagcatctccttatggcattacagagatggagggattgttttttgtcatcggagaagagcggattctgatgagccggtggcgcgagggtgctccgtttaaggtggggctgtccggattccgggagtggcagccggatgagccgaaggagaaggcagcagagaaaggggcggcagcagaaactgcggcgcaaaaagaagtgcgggaagcagccgcggcgcaggcggaacagaacagccagacggcgacgcaagagatggcgcagagaaagcaggggggagcagcccctgtacagtcggaacagaacagccggatggcggcaaaaggaatggcgcaggatgtgccgtccgggtccggaatggagacagcaggggaggagacggaggcgattcatgtcaccgagcttcccatgcgcaatctgttcccggaatacgactggaatgccgtgtgggaggagctctgcagagaacacaaaccggcggctctgtttgaggagtgggatacgcagtgcatccagctggaattaaaggatctgcggagtctgccgaaaaaatactggtatctgggaaacaacagctttctgctacatggatttttcaattatcggtatctggtgcttggcaggacggcggaggaacggtggttccttggcgtgccgggagtatatcagagacaggagcgcgtgatggcggctattttcggttttccggaattctttgccgccggcccagggggtgagcgcagggaaggcagggaaccggtcaaccattttggctgctgggtgcgttatattgaagagtaaggatttaaaagggcatagcggatgtggtcttcccattttccctgaatctgggtgcaggcgtattcggtgccctcacaagtgaagccgatgacttccaaaagccggagagagggagtattttccggcatcacgcgggcaaacacgcggtgcagggaaagatcggtaaaagcgatgtttaaaacctttgccacggcttccctggcgtagccctgatgctggaatgcggcgtcgaacttgtagccgatctcgctgcagcagtacggcatgcgcagaatatcgtgcaggcagacggtaccgatgatgatccgcgggttggtttttaagaagacataaaaacggatcgatgcacatttccgtgcgagatcatactcacatttcagaatggcctgctggtgcgccggagtcagaaaataggggggacgcgtcggctcatagcgttcaaagagctcacggttgcggcactggaaagccagaacctcgttcgtgtcatcaggggtcagtatttttaagatcaggcgatcggttgtatacatggtatggacaggaagactgccggtaatatggttgttgcagttcatacatactccctctgccgaaaatgttccatcgacaaaatgcatcaaatcggctaaaataagtctatactatagtatagcatttctggagaaactgtccatgacacaggaagaaaaatatatgaaagcggcgatacgcgaggcaaaaaaggcatacgcgctcgaggaggtgccgatcggctgcgtgatcgtccagaatgacaggatcattgcgcggggttacaacagaagaaatacagagggaaatacgctggcgcacgcggagcttactgcgatcaaaaaggcgagcaaaaagaccggcgactggcggctggaagactgcacgatgtatgtcacgctagagccgtgccagatgtgtgcgggggccattgtgcagagccgcatgaaaaaggtcgtgatcggcagcatgaacccgaaggcagggtgcgccgggtcggtgctgaacctgcttcagatggcacagtttaatcatcaggtcgagatcgagaggggcgtgctggaggaggaatgttcgacgatgctctccggcttcttccgggaactgcgcgataagaaaaagagactgcgtgaaaacgtgtagaatgcttgacaatcgggcgtcagataggatatacttaagtctccgagcagccggggtggtagcggtaccctgtaccaacaatccgctatagttggggtgatgccaaacagaggatcaggtaagctgtaaagctgcccatcataagtggcgttgacgtctgggtcttacgcaacaggaatctgtgaaccgggtcaggtcaggaatggagcagccctaagcagaagctcttgtgtgccgtgagggtgcctgggctgagctaactgtggtggtaacgtttatggttttggattcgaagtgaggcgctcggattttgcgttttataagtgttttttataaagattctgacagataacttttgggaagagggagagataccatgtgggataaggcgagaaggatattgtaccgtggcggagagatcttagagcttctgatggcggcagccgtcgtggcagggattctggtggcaatgatcacgcttgtgccggaactggcacgctactgggaacaccggacgatagccggtgcgtttatggagtatctggatgccgtttttaacgttgtcatcggaatcgagtttttaaagatgctctgcaagccgagttcggcgaatatcattgaggtgctgattttcctgatcgcgcgtcacatgattgtgcagacgaccacgccgctcgaggatctgctctcggtggtcagtatcggtattctattctttttccggcgttttatgctgatgaccaaaccggacaaggaccagcatgtcccgaagctttttggcgtgataaaggcgtcacagagcagcgggacagcacaggcggagcacgtggatgcagagaaaaatgcagaaggaagcaaaggcgccggggaaaaatagcacattgattgacagatgcatgacggtgttgtatgctgggagttagagatgactaacaaaaagcacaacccgtcatgcatttattttcgtacaagcattgctttttgtaaaaagcgctatataataaaagcataacggtggcgcagcccgcatgaatacgggaagtaagcgcttacattaaacacattgtcaaaggagagagtatactatgttcggatttggtcagttgatcgatatcttgaagaaagatccaaagaaaattgtttttacagagggaaatgacccgcgtattttagaggcagcatccagattactggcaggtaccttcctgcacccgattctggttggtaacccggatgagatttttaaggctgctgaggagagcggattcaatattcgtggcgctgagatcattgatccggcaaactatgacagatttgacgagatggtagatctgttctgtgaactcagaaagagcaaaggtgtgacaccggagcaggcaaagggcattctgtcccaggcaaactacttcggaaccatgcttgtaaagatgggcgttgctgatgcacttcttggcggagcaacctactctaccgcagatacggtacgtcctgcattacagctgattaagacaaagccgggcaactccatcgtatcttcctgcttcattctggttcgtccgtctgcaaccggtgagaacgaggttcttgcaatgggtgactgtgccatcaacattcatccgactgaggatgagttggttgagatcgcaggcgagtctgcagagtgtgcgaagatcttcggtgtagatccgaaggttgcattcttaagctactctaccttaggctccggcaagggtgaggatgtagacaagatgcgcaatgcagcagcaaaggcaaaggcaaaatatccgtctcttccgatcgagggcgagttacaatttgatgcagcagtatccccgcgtgttgcacgtaccaagtgcccgggcaacgaagtggcaggacatgcaaacacctttattttcccggacatcaacgccggaaatatcggttacaagattgcacagcgtcttggtaatttcgaggcatatggtccgatcctgcttggcttaaatgcgccgatcaacgatctgtcccgcggatgcaacgcttccgaggtatattccatggcaatcatcacggctgcactggcataatccggacactgcacagaacaatagaatgacagtcatttgtggcatggcgtgacgctgtgccacatttttttgagggaaaaatggaagcattactttttaccagagaagatttgaaaaaactgattgtaccgctcattatcgagcaggcacttgctttgagcatcgggctgtttgacacgctgatggtctcctcgtgcggcgaagcagcggtgtcgggtgtgtcgttagtggacagcatcagcacgctgctgatccagatcctatcggcacttgcaaccggtggcgctgtggtgtgcagccagtatatcggcaagaagatgccggagagggcaaagctatctgccggacagctgatgcttatcatgctgttgtccgcggggacggtgatggtggtcatcctgctgtcttaccggtttctgctccgggcaattttcggacagattgatgcggacgtcatgcagaatgcggagatttattttatcatttccgccatatcctacccgtttctgggtgtctacaacgcgggagcggcgttgttccgggcaatcggaaacagcaaggtcagcatgtatacaagtctggtcatgaacgtgatcaatatcggcggtaacgcggtgctgatcttcgggcttaagatgggcgtgctgggcgcagcgcttgcaacgctcacggcgcggattgtatcggcgctggtcatggttgtgctgctctcaaggaaggacaacccgctgtgcattgcgacaccgggctgtatgaagccgcagagggatgtgatcggaaaaattttaaagatcggtattccgagcggtgtggaaaacggaatgttccagattggaaaacttctggtgtcgagcctgactgcgacgtttggaacagcggcaattgcggcgaatgcggtggcgaacagtgtggcgggatttgccaatattccgggtattgcgatcggacttgcgatcgtgacggtcattggcagatgcatcggagcaggggaaaaagaacaggcgaaatactacagcaagcgtctgcttggtctggcttatgcgggaatggtgctggcggatctggcactgtttgtactcgtaaaaccaatcatcgcctgcttcgcgctatcggcggaagcggcacggattgccacacagcttctggtaagtttcgcaatctgcgcggcgctgatctggccgctcagctttactcttccgaatgtgctgcgcgccgcaggggatgcaaagtacacgatggaggtcagcgttttttccatgtgggtattccgcgtggcaagcagttacttttttgccggaacgatgggacttggcgtgctcggtgtatggatcggcatgtatgtggactgggcgttccgcacgctgcttttcgtgatccgctaccggcgtggcaggtggctggaaaagcgcgttgtatgacgccgcaagggaatggattcctaatattttcttattttttgataatacagtttcatttttgcgggaaatacggtagaatatcagagaaatacgttcagatgatgaggattttgaagaaatgtacaagaatatgggaaaagtaaaacgtacgctggaggaatatgtgattctgacggttgccacgctgattctggtggtgggcgtttatgtgttcaagttcccgaataatttttcgtttggcggagtcacgggtatcgcggttgtcctaagtgccgttatgccggcaactccgggaaatatcacatttatcatcaatatggtgctgctggtggtaggatttattttcctcgggaaaagctttggcatccgcaccgtgtatgtgagcgtgctgatgtctgtggggctaagccttgcggaagtgtggtttccgatggagcatccgctgacgacgcaaccggtactggaactgatgtatgcgattgtgctgccggcattcagtgcggcgatcatgttcaatatcggagcatccggaggcggtacggatattatcgccatgatccttaaaaagtatacgaagctgaacatcggaggcgcgctgtttctggtggatctggggattgtcatagcttcgtgttttgtgtttgatgcacagacgggactttgttcgctctgcggacttctggcgaagtcgctcgttgtggacaatgtcattgaaagtatcaacctgtgcaagtattttacgatcatctgcaatgatccggagccaatctgtgattttatcacgaatgagctgcaccgcagtgcaacgatctataaagccgagggggcatatgagcacaaccagaagacgatcattatcaccattatgaagcgctcccaggcggtagaactgcgtaattacatccgcatccaccagccgaccgcatttattgccatcacgaacagcagtgagatcatcggcaagggattccgtggatttaattgatatttaggaaggagaagatttttatgaaaatttgggaagacgaacagcagtgctatatccgtgctgcaatggagaagaattcagaggcggagaacgaggcgctgaagacacagctggatgcggtcgactggtctgtattagagcagattgagcgcaaggagaccgtgaatgaacggggcgtatttgcaccgcttgaggcggttgaggcagatgagattgagcgccgcagggacgagttccacgaactcggcatcaaggcgctccgggaaggaaaagtcggagcagttcttctggcggggggacagggaacacgtctcggactggacagaccgaagggaacactcaatatcggaatccaccgggagctgttcttgtttcagcagctcatccgcaacctgatggatgtaacggatgaagccggcgcttatgttccgctttatatcatgacgagcaacatcaaccatgacgacacgcaggcattttttgaggagcatgggtactttggctatccgaaggagtatgtgaagtttttcgtgcaggagatggaaccggcctgcgattatcagggccgggtatatatggaatccagcaccaaggttgccatgtccccgaacggcaatggcggctggtttggttccatggtgaatgcaggactgctctctgacatccgttcctacggaattgagtggatcaatgtatttgctgtggacaactgcctgcagagaatcgcagacccgctgttcatcggtgcaacgattgcctacggctgtgagagcggcgcgaaggttgtcagaaaggcagcgccggatgagaaagtgggggtgctctgtaccgaggacggcaagccgtcgatcgcggagtattacgagatgacggaagagatggcgactgcacggaaggcaaacggcgacctgctctatggatttggtgtgatcctgaattacgttttctcagagaagcgtctggaggagatcgcagatgcacatatgccgatccatgtggtagagaagaagattccgtatatggacgaatccggcagcctggtgaagccggatgcaccgaacggatacaagtttgagacacttgtcctcgatatggtacacatgatggcggactgcgttccttacgaggtcgacagaaagcgggagtttgcgccgatcaagaatctgcacggcgtggattcgctcgacagcgcccgcgagcttatgcagggctgcggcatcgaattgtaacataaaacggacgggcttcccggcgggaagtccgtccgtttttggcgctgcagaagatttaataaatattttatggggatttaacggcgggttcatgaatgtctgatataataatacctgatgatggaaaacagacaatggaggtttttataaattggaggaacaggggaagcagcaggaaatagaaatcgaagaggtgaccgcacaggagaatgtgatcgcggtgcgggatctggtgccgatgcgtgcggcgatggatgacagcatggaacggatcgcagatatgaaggatcagttttcacagacgatcgatccgatcctgcgcatgtacaatgcggcgatgtgtgcaacgacggcaaggcttgagataatagaggacgagttcaagtaccggaagctgcgctgtccgatccaccatattgacacccgcctgaagtcggcgaagagtattctgggcaagctccagaagaaggatctggatctgacgctgtcggctgcctgcaacaacatctacgacatcgcgggaatccgtgttgtctgctcttatatcaaggacgtctatctgatccgcgaccgtctgatggcgcaggatgatgttatgattatgcagatcaaggattacatagagatgccgaaggagaacggttaccggagtcttcacatggtcatccgggtgccggtatattttatgaacaaaaagcagctggtgccggtggaactgcagatccgcacgctggcgatggatctgtgggcaagcctggagcatgacatcaaatataagtgtctgtatcagacggagacggagaatttctccgaggaactaaaggaatgcagccggctcatttacgaggcggaggagaaaatggagatcatgaaccgtacactggaagcataaggggaggcgcgggcgatgagagagaaacagaatccggtcgaaaaagaatgggcagcagttgtcaaggcagaggagcgctttctgcgccatgccatgccggcgcggacggcgggctggcaggagaagatcacgcgctatgtgccacagaagctggaggcgactctgcacaccgctttttacaaagcgtttgaactgatctttgacaagggaacgccggtgatagagaagacctgtcagaaggagaaaaaggagcagaattataagatcaatgcttacgccgcagaggtgcgcgacacgagacatgccctgcgggcattcgggagagaggcgggtgccagccggaacctgaatctggcggtatcggcggtggaaggtgtcggcatgggatttttcggtctgggtctgccggatataccgctgttcctcggtgttttgttgaaaagtatctacgaggtcgcactcagctacggatacacgtatgacacgcaggaggagcagatcttcatattaaagctgatcgagacggcattgtcgcacggcgagcagcttgcccagaacaatatggagctgaatctgtggatgcgtgaggagcgtacgttttccatttccagaaacgagcagatccggcgcacatcggatgcactggcgggagaactgctgtatctgaaattcgtgcagggactgccggtggtcggtatggtcggtggagtttctgatatggtttatcagaagcgcatcagcgattatgcagcagttaaatataaaagacgttttcttgagacaaagaggaagaccggggaagaaaagagacatccggcaggataagtttgcggatggcatgcagaaggggaagccgttattcggcttccccttctgcgacaatatcctcaagaacatgaatcaggtcatacatgttgttgagacagacattccgttccagaatcagatttttcagatcagcagacagggtatcaaaccggtcgcggatctcgggagatacataagatgccataagattacctcactttttcatatttcagaaaaagtatgagcatccggagagctttttatgtgtaaaaaatgccgtaaaggtggtatgatagtggagaaaaagtggaatggaataagagtatgaatgagaaaatttactgccggattaggcgtgtgcgcgcggtattgctgacatttttcctgacggcagcagttgttttgacagacgcacagagcatccgggaaaaggaatacgaaaaaacagagatcatatactgtattggggacagtatcacatacggcagcggtctggaggatgaggaacggctgacgaagtcgtatccggcgcagcttggaatccggcttggcccgcgatacttcattttcaattacggcgtgagaggagcaaccctgcaggatctttcccggaaaagctaccgcaacatggggtatctgaacgtgatagaggcgcagtccccggatgtggtgattattatgctgggaaccaacgattccaaacagaaatactgggatgcagagaggtatgaggaacagtatcttgcattgattgacgaacttcacaatctgccgggacatccgtatctgtatctgatggcaccgccggaagcatttcctgcggaggagggagagatcctatacgggatcaacaatgatgtgatcggaggagagatccggaaccttgtgccggacatcgcggagcaatcgggctgcggaacgctggatctctacgcgctgacgcaggatcacccggaatatttcgtggatggaattcacccgaccgaggaaggatatgcgctgattgcgcagatggttgcggatcagatccgggcagaccggaatgcgggcgtgtggtgacgcggttaaaaaagggcttcaaaaattacaaaaaatatgatataatgaatccattcatctgaaacggagtatggcgtagtttggtagcgcgcacggctgggggccgtgaggtcgcaggttcaaatcctgttactccgattccttggcaggggcacggcaggtggagcgatccgtctgccggcttgagaaagagagagaccgtatattgcggtttctcttttttatgtaataggaaacttcgttcctattacacaaaaacgttccgcggggatgtgcagctcgcggtgaggtacataatgctttgcataccgctggggcgcaagtgtgcggcaagcgcacactttgtttttaggaaaaaagaaaggcatagaaaaacccggcagaatcaatttatgattctgccgggttttgtgacagcggagacggcgggattcgaacccgcgtgccccggagggctaacgcatttcgagtgcgccccgttatgaccgcttcgatacgtctccgaatgaatggatcacagaggattctactgtgagacactcgattagtatatcatatctggtttattttgcaagatgctttcgcgaaaagtcttgaaataagttttttcgggagatactatttttatagcataacaggagggtaaggtatggaaaataagacacgggaagcaattcggtttgagggaagcgtgcagggcgttggattccgctaccggatgtcacagcttgcaagacactacgatgtgacgggatgggtcagaaatgagtacgatggaagcgtctcggcagaactgcaggggagacgggaggcgatcgacgagatcattgcgcgccttagggaggattcctatatttatctggacagagtgagccggcagaaactcgaattaaacgaagaggagcgggcattttccgtgcgctattaggcgctgcggcgcgctggtgctgtgaaacacagttgcaaaatggcgtcgaagagggtaatattctatatagaaaaactgcggtccggatgcggacccacagaccatgaactgatggtacgaaaagacggaaacaggaggagaagcagatgaagagaatcggtatgttgacgagtggcggagactgccaggcattgaatgctgccatgcgcggtgttgttaaaggactcagcgagaacgtggatgaattggaagtatatggttttttgaatggctataaaggtctgatttacggggactaccggctgctgacatccgcagatttctccggtattctgacgaaaggcggcacgattctcggatcatcgcgacagccgtttaagcagatgcgtgtgccggatgcaaacggactggacaaggtggaggcgatgaaggcgacctaccacaagctcaacctggactgtctggtgatcctcggaggaaacggaacacagaagacggcgaacctgcttcgggaagaggggttaaatattatccatctgccgaagacgatcgacaacgatatttacgggacggacgtcacattcggatttcagagtgccatcaatatcgccacagattgcattgactgtatccacacgacggcagcgtcccacaaccgcgtctttattgttgaggtcatggggcataaagtcggctggctgacgctttatgctggcgttgcggggggcgcggatattattctgcttccggaaataccgtacgacatcgagaaagtgattgccgcgatcaacaagcgcacgaaggcaggaaaaggatttaccatacttgcggttgccgagggagccatctccaaggaggatgcggcgctctccaagaaagagtacaaggaaaaagtggcaaagcggaaatatccgtctgtttcctacgagattgcagaccgtatattcaaggagaccggcgtcgaggtgcgcgtgactgtaccgggtcacacacagcgcggcggaagcccatgtccgtatgaccgtgtgctctgcacgagactcggttcggcggcggcaaaagcgattatggacgagaactacggcaacatggttgccatggtcaatggcaagatcaaatatgtaccgctcggagacgtggcgggcaaattaaaaacggtcgatccgaacgaccagatgataaaagaagcaaagcggattggaatcagctttggagattaaggtgagggaaaagcatgtcatatcaggcattatatcgtaagttccgtccgcaggagtttgacgatgtaaaaggacaggatcatattgtaacaacgttaaagaatcagattaaagcagacagaatcggacatgcttatctattttgcggaaccagaggaacgggaaagacgacgattgccaagatttttgcgaaggcggtcaactgtgagcatccggtggacgggagtccgtgcggggaatgtccgacatgcagggcgattgcggcgggcaattccatgaacgtgattgagatcgatgcggcttccaacaacggcgtcgacaacatccgccagatccgcgaggaggtggagtaccgtccgaccgaaggaaaatacaaagtctacattatcgatgaggtgcatatgctttccataggagcgttcaatgcactgcttaagaccctggaggaaccgccggcgtatgtcatttttattctggcgaccaccgaggcgcacaagattccgatcacgattctatcacggtgccagcgctatgatttccgcagaatctcgatcgacacgatcactgcccgcctgcgggaactgatggatgcggagcaggtgacggtggaggacagggcgctgcgctatatcgccaaggcgggagacggctcgatgcgtgacgcgttaagccttctggatcagtgtatcgctttttacctgggacaggagctcacttacgacaaagtgctggatacgctcggagcagtcgacacagagattttcagccgcctgctgcggcagatcctcgataaaaatatcacgggggcaatccagaccgtggagacgctcgtgatcgaaggacgggagttagggcagtttgtcacggatttcacatggtatctgcgcaatctgatgctggtgcaaagctcggacgatatggaggatgtgcttgacatctcttcggaaaatctggcgctcctgaaggaagaggcgtctatggtggacgccgatattctgatgcgctatatccgcattttctcggagcttggcagccagatcaaatatgccagccagaagcggattctgattgaaattgcagtaattaagttatgtaaacctgaaatggaaaaagattacacgtccctggtggaccgcatcgacagcctggagaagaaactggaaaaaggcgttgtgatggcggcaccggggagtgccaggcagggcgtaggtggaagcgcgcagggggcacagggaggctcgctgcccaaggcagaactgcccaaggcgattccggaggatgtgaagcaggtgctgacaaactggggcggcatcttatcgcagcttaccggcgtgacaaagacgtatcttaagatggcgacccggtcgctcggaccgaacggggaattgatgctggtgttcgatgacaaaaacgcttacgagtacgtcgagcagaaccgttcggattgccaggacgcattaaaagcggcagcggcggatcggattggcaaagaggttgcgattctggtgaagttaaacgacacggggcatgccagtgacgaggtctatccggatctgggcgcgctcatccagatggacatcgaggaagaggatttttaaagctggacgaatcacacaatttatattatgatagatggaacagtcctaagagaaaagcaggaggaagcagacatggcaaaaagaggtggattcccgggcggtatgccgggtaatatgaataaccttatgaagcaggcgcagaagatgcagcgccagatggaagaggctcagaaggagttagaagagaaggaagtgactgcggcagcgggcggcggagctgtggaagtgacagtatccggcaagcatgagataacgaaagtaaagctttccccggaggttgtggatccggatgacatcgagatgctggaggatctgatcatggcggcgacaaacgaggcctaccgtcagttagacgagttttcccagagttccatggcaaagattaccggcggcatgggcggacttggcggaatgccattttaatagaatttataactgcacctgtgtggcgatcgcgctgtacgggtgcagttttgttttatgtcactgccgctttagcgggtaaataccgtctgctgataagcaagg

SEQ ID NO: 11472 - DNA, 3629 bp, Unknown
  gut microbiota DNA sequence
atcctggcgtcgacggtcattaccgcctcggcggtatccatgtgcggtcaggtcggctggatcggtctcttagtcccgcactgcgccagaatgcttgtcggaagcaacaaccgttatgtggttcccatcagcttaagtctcggtgcaagctttatgattctgatcgatacactctcaagaaccatcagcgtcattgaacttccactgtccattctgaccgccatcatcggagcaccggtctttatttcactgctgaataagaacaggagcaatctgcaatgatacttgaaataaaaaatggctgttttggatatcccaaacaggatataatattacctgatatcaatctctcattagaggaaggtcatattttagcaatcttaggtcccaacggtatcggaaagaccacactattaaaatgcatgatcggtctgctcccctggagagagggtgcgacttttctgtacgggcaggacatcaaaacattaaaaccaaaggaattgtggagcaatgtctcctacattccgcagagccacggttttgctttttcctacaccggactggaaatggtcatgctcggccgctgttcgcatcttggcatttttgaacagcccggcagacgggagattgagatggcggaagccatgatggagaaaacaggcatcacgcatcttgccaaaaaggactgtaaccgcatgagcggcggagaacttcagatggtactgattgcgcgcgcactgatcaatgaaccgaagctgatcattctcgacgagccggagacaggtcttgattttcacaatcagattctggttctcaacatgatcgaccggctctcccacgaggacggcatcagcgcaatcatgaacacgcactatccgaccaatgccatgtctgtcgccgacgaggcttttatgatgaatcacaaaggcacttttttctacggcagcacggagaaggttctgacagaaaagaatatttccgtgtcctttgacgtcaatgtggttgtcaatgagttcagccatcatcagaaaaaaataaaaagcatcgtacctgtctccctgacagataaagcgatgtgacagaaaggatctactatgtcagaaggcgtatttaccatcgcagcaaagcgcccgatccgcgcggagatgaccatctcacgaaataccggactcggcacttccaattccgctacctggttttccctgggcgcaggcacatccatcacaccggaaagctacgatacgatgtccatctatatcggagccgccggcaccggaacgtttctcatcggtgaacagccggaaacaatggatctgcacccggatgagatattgctcgtaccggagagaactctctgcggcgtcaaaaccggcgagggttgtatctatacagaaattattacaaaaaaggagaacactatgaacgatcttgttaaagcaaaagaggtattgaatctgaaggaactgatctcttacgaggagggaagtattgcaaacgtggatatcgtacacaatgatacaatgaagtttgtcctcatggcattcgatgagggaaccggactgacaccgcaccgcgcaccaggcaacgcaatcctgaccgcgcttgagggtacagctgtcatcggatacgagggtaccgactacaccttaaacgcaggcgagagcttccgttttgagaagaacggtctgcacagcgtaaccgcaaagggacgcttcaaaatgtctctgctgcttgttctggaataagaccggaataaaaaaagagccgaaaggctcttttttgttgcaggaaaatgacccgctacatttcttctaatgtgtgatactgtcggattgctgtctcgtagaggttgtttccctcacggtcgatcacgacgatgaccggaaaatcttttacctcgatcttgcggattgcctccgcgccgagatcctcataacatacaatctcagattttgtgatgcatttggaaagcagcgcgccggctccgccgatggctgcaaaatagacggcatgattgcggatcactgcgtctacgacttcttttgagcgctttccttttccaatcatcgccttttcaccgagatccaacagtctcggcgcatatttatccatgcgggtggctgtggtcggtccggcagatccgatcggacgcccctctctggcgggagacggtcccatataatagatcgtcgcatccctgatgtcaatcggaagctcccctccctcatccagcgcctcgatcatgcgcttatgcgctgcatcgcgcgccacatacatggttcctgtcagatagacatagtcccccgcttttaattctgcggtagtttcttctgtaattggcattgtaatatacttatccataatctttctttcaaacctcctgcttatcaacattggattttcattttgtggaaaacctgtcgttttttatttttctgcacgcattacatgctacatgcaccacgatcttacagtgttctcacaacgtgccggttgacatggcagcagatattgacagctacaggaagtcccgcaatgtgtgtcggataggtattgatgttcactgcaagcgccgtcgtcgttcctccgagtcctcccggtccgattccaagctggttgatctttgagagcatctcttcctcgagatctttgacataggggatatcggaatgttcatcgaccggtctcgtcagcgcctgcttggcaagaagcgcacatttttcaaatgtacctcctatgccgactccgacgaccatcggcggacatgcattcggtcccgcatccttcacggcggtaaggatcgcatgcttgactccctcgatgctgtccgccggttttaacatgaacacgcggctcatattttcactgccgaatcccttcggcgccatagtgatctttacctgatcgcccggcacgatggaataatgaatgactgccggcgtgttatcttttgtattttcacgaatgagcggatcaccgacgacggatttgcgcaggaatccttctgtgtatccctgacggactccctcgttaacggcatcctcaatcgctgtgccctcaaagtggacgtcctgtccgacttccagaaagatcactgccattccggtgtcctgacagatcggaatcatctcctcgtccgcgatctttaaattgtcctgcagctgatttaagatcttctttccgagttcagactgttctgtgtcagcggcatgcttcatcgccgcatccatatccgcggacagataatgatttgcctgtatacacatttctttgatattttttgtaatctcatctgtttgaattgttcttatcataccgttcttcctctccctgtctgctgtgtatgtggcgtttaggatgcctgatcttttttgttttcgtctttctttttgatattaaagtgaatcttgaatttttccagcgtctcgttgttatcccgcgacttcatatccgggaaggctttcatcagacgttgaaaaccaaagcttttctcttcgtacagcttctcgtagcgctccataagctctgcgcgctcgcgctttttctcctcgagtgcaagttcgcgttcgcgctttttctcctcacgggaagctgcataattctctgccttctcggcaagcttgttcttc

SEQ ID NO: 11473 - DNA, 25170 bp, Unknown
  gut microbiota DNA sequence
cctccagacaggtaaccggttttacggaattataaaaatttctggctccggcatcgtaccaggacagaccgatgacatcatccgcgctgacactctccagaaacgcatccccgatctccccgtcgagcaccctccacatatggtcggaatccgtataaagatagggcatctgcagcacattcaggctcggaatatattccgcaagctgcgccagtgacacccgcgtaaaatcaatcccgccgtactgcatctgtttgatgactttattctctgacccgagcaccccgaccggctgcaccagaatccggattctgccgtttgtccgctcctccacgagttctgcaaaatacttggcaccgagtgtcgtcggatagtcctccggctgattttccgcataggaaaacacatattccggttccacctccgccttggagggatacatgtgatttctccaggcagacagtgtgagcagtatcaacattccagccacagctgccgccgcgcatatccgtctcatcgctcccccgcctcctttaatacctgcgtccggtattccgtcggcgtgacgccggcaatccgtttgaatactttcgcaaaatagttggagtcacggtagcccaccttctggctcacatcctttacattgataaggacgtcacccagcagttcttttgcccttgccacacgatactccgagagatagacaataaagttcttgtcaaaacactgtttgaaaatcttgcagaaataggcgtcggagtagttcatggcctctgccaccgtctgcaaagaaatgtcgtccatataattgtgttcaataaacgcctgaatattcccggcaaccgcctgcagccggattctcgagcgctccgtatccgccgcgtcctcatgacagtcccgttcggcaaaaaccggctcatcttccttcttctctcctgcctcccggtcatccgtatgctcatcggcaatccgtatagcctccgcaagcactgcctccagttcctgatcctcgacaggctttagcagatattccatggcgcggacggcaatcgcacgcctggcatagttaaattcatcaaatgccgtcagaaaaataatgctgcagtttttatctctctcgcgaatctgctccgctgcctccagcccgttcattccgggcatttcaatatccagcagcgcaatctggcagttctcggcaaaaaactgttccaccgcctctcttccattggccgcactcacaaccgcaagctcctccgggaaatatttctggatggttctggttacaatcattctctcaatcggttcatcatccgctatcagcactcgtttcatgtcatatcccccgtttcctctctgcatggaatatctataaaaattactgttcccgcattctttttactgtatatctcaaaatttccgtccgcatacatggcagtgatccgccggtacacattgccgagaccgattccgctgtgtctggcatcgtccgtcttaaggcggctctttaactgctgcagttcctcttccgtcatcccgatcccgtcatccccgatcactatgtgcagccgcatttccttctgtctgaccacaatgcggatgcttccgccttcctccttcggggaaactccgtggataattgcattttccacaagcggctgaaaggtaaatgccggaaccatgaccagttcctgttccaccttacagtttaattcataacggatccgctccccgaagcgcatctgctgcaggtacatataatctgcaaccacgttcagttcctttgccagtggaacggactgttcgggtgtctttaaattgtaacggaacagggaactgagcgccagaatcatcttttcggtcgtctctgcctcctcaagctttgccattccgctgatgacattcagcgtgttgaacaaaaaatgcggattgatctggctttttaacaattccagctttatcatctccaggcgtttctccgtctccagctttcccagctcctcctcgtgcagaagatccagcgtcttgcgcttttcttccagcgccataatgtattcgcctgtcgcgtatttcatcttgttgaacgcatgcaccagttctccaagctcgtcctcattctgcacctgcacatcttccacgaaaaagtcgttggcggcaatgcgctgtgccgctttcacaagtgcaacaacaggtgagataatcgtctggttcatcagtgctgccaattccatcatgccggtcaccagaatgattccggagaccacaaccacaatcggcatacacacgagcatgggcaccttcttgcggtacaggctgtcgccatcttctatcgtctcattcatcagcgttgccgcatattcctcgagatagtcctgcatctcgtagacttcatacagacttctgatataatccggatagttttcacccatcgccagcataatatcccgtttctggcagtacacttcataacagctcttgatcgaccaggtctttgcgtagcgctgctctccaatctcagaatagcggaacggaagcttttccaccgctcttccggttcgttctatcgcaatatccagactttctctctcctcgcgattgccctttatgtatgtctcaaactggatactctcttcctcgagcgcctgtgccagttcgctcaccgctgcgttatcctgtaaaatccggttaaagtcgattagggaaaacttgacaacccatacattaaaaagaacagagactgcaatgatgagaaatactgtcccggtaaacgtcgctattttctttttgatcgtaagtgcctgccagaactgttttatcctctttctcacgcttgtttttcccatgcctctctgttctctctataatgcggcaaaagcaaagccgtagatacacactccgtaaatacagctttgcatatttgctttatctattctgttccactttgctctgtacaaaggaccaaaacgcctcccggtcggctccaagcacacggttggtgagcatgtaaccgcttccggctcccgagagcaccagcaccattccgggctgctttgtcacccgaagccggttccacggcaggtgctgtctctctcctccggttgtaacaagcagtcccttttcatcaaaggtaagcctgacatcctgcggtacagccgccgcctgacgcctggctttcgcatagattgccgccggctggatgaccgggaacagcaggcatccgatcagcatcagaacctgcaggacttcccccgactgactccagaactttgccgtaagaaggatcatcgccaccgtaaataccagattacacatccccgccatggagcggtaggtctgacgcatggtaagccggaaaaaatcccatgccgtaattctgcacttatattgatattccatatgccatctcctctgtattcacaaactggctccctttacgttccaagtaacatcggaagtccgatacttaattccggtataaaggtcagaagtaataatacaacgatcatgcacagatagaacgggagggttgcttttaccacgcgctccatctttacaccgctgactgcagaaccgatgaaaagaactgatccaaccggcggtgtcagaaggccgataccacagtttaataccatgatgataccgaactgtaccggatcgataccgatggaggttgcgatcggaagtaagatcggtgtcgcgatcaggatgatcggtgccatatccatgatacatcctaaaatgagcagaatcaaatccactaacagtgcaatcacgatcgggttgctcgagaatccgatgattgcctttgcagccagatccggcacatgaagtgtcgtcaggcagtaaccgaaaatactggatgtcgaaattaagatcaggacgatagacaatgtatcaatgcactgctccaggctcttccagacacccttccaggtaagacccttgtaaatatatacactgacaatcaagctgtagaatactgcgatcgcagcggactctgtcgcggtaaaccatccggctacaacgccgacaactacgattacaactgctgccaatgcccagaaagaagttccaagctgttttaacagtctcttgacactgaacttatcccccttcggataatgtctctttttcgagataatataagatccgatcattaaggagatcgcaagcagtgcgcccggcacatatcctgcaaggaaaaggcttcctaccgatacaccgccggcagacattgcgtagattaccatgttatggcttggcggaaccagaagtccctcacaggaggaagtgatcgtaaccgccgttgagaaatcatcatcgtatccctgatctaccatcatcgggatcatgatacttccgatggaagccgtatctgcagatgcagaaccggaaataccgccaaagaaataggatgcaacgatatttaccattgccattccaccggtcatccagcctacgcaggcatccgcgagtgcaatcagcttatccgatatacctccggtgcccatcagcacgcccatcgtgataaagaacggcacagccatcagactaaaggaactgattccctttaccatctgctgacagatcgttgtcagcggaagaccctgcgataacaggcacagaagggaagataacgctactgcatatgcaatcgggaaacgcagcagaatcatgacaagaaagcttacgagcaacactgcgattgccatactctgtacactcattatttcgtcccctcctttacaaaaatactcttaatgtggttgtaaattgcttccagttcaaaaacgaccatcgcaactccggcaagcggaatcgggaaatacatccaaaacttggacagccacggcatgctgacataattacctttcgcaccaatgccggtcgcgtagctgaatccaacgataatcatcacgattgccagaataaatactgcgacatccgccagaatgtccaacaccttaatcacgttcttcggcaggtaagcatcaaacgccgtcatgcggatatgcgcatttctgcggattgcaagtgccgccgaaagcactgccatgtaggacatcaaagtcagcacgacttcctcactccatgccggatccggcacgaacgaaacatatctgcccacaacacagacgctcgtgatcacgatatcagccgtgagcagcagtttgcacacaaacagtacaaacttgtatgctgcatcatataccggctttactttatctaaagtctgaaaaatcttaggcattttttcctcctcaaaaagtcggggcacgggggagcagccattctccctgtgccccttgaaaacgcacttacattattgcgggttttccttctatcaaacctataagtgtcaatctttctgtcgattactgcatatcaacgatctgctgatataactctttgttattcttggttgcctcttcgatgacatccttgcaggcatcctgccacggtgtgatatcgtctacttcaataacattaacgccgtctgcctttaactcctcaaggatcttatcctctgtctcctgggagatctgacggttgtactgggaagcatactcgccggcctcggtcagcacatcctgctgctccggtgtcagggaatcccatgcctcgtctgtgataactacctggattgctcctaaggtatgtccgtcaagaatgatgttcggtgctacttccgggaatgcatttgcctgatagtttgcgatcggctgttctgctgcatctaccacaccggtctgtaatgcggaatataactcacccatggcaacaacggtcgggtttgctccaagtccttccaccatacctgtcatgatcgggtcgttggatacacggatcttcatgcctgccagatcatccattccctcgatcggattgacggtgaagaaatggcggaaaccttcctcaccgtagaacagtccgcggataccggttccgttctcatgcggctcaagcaggaactcctgtgccagatcagaggttgcaaagttccagaaatgatcgcggcttacgaatgtgaacggtacggataagagactggatttctctccgccgtagcttgtgagtgcgaatgcggaaatacgtgccatatcgatggtaccgccgccgccgagcatggtgtcgagtacatcggactctgcgccgagaacaccgtttgcctgaatatcaatcgtgatgcttccgccggaaagctcttctaccttctctttgaatgcggttgctgtctgtcctacaatggttccctccagcgggtttacctctgcgtataccagagtcactgccggtccgaccggctcggttcctgtggaatcaccggcttcggtcgccgctgcgtcagccgctgcatctgtcgctgccgctgcatctgtggtctggcttgtcgtcgtgtctgccgtctccggcgctttcagtccacaggcagtcatggaaaccaccattgctgcacataacagtgcggataaaacttttttcttcatgtaaaaatcctccttcttctcctcccgccgcgcatcatccggcggctttgtttatgtcttaattataaagttctatcctcacaatggaaaccgtacatttttattaactttagcacatttttaacagttttaatagtttttttatatttatatggtcaaaacattctatttctttctgaaattctagcgatatacggatgaaatgcacaaaaaagagtcagtcgaaagactgactctaatctctgtgaaatatcttacagtttattttgataattcccgcactgctgctctggcatccttcacctgtcctttttcaacttttttattccatcaaacctgcatagtcaaacgaacagaactccatttactccgcaaatgtctctgccaccttcacaagcaggtcgcggatcggcagatgctgcggacattgtccctcgcacttgccgcagcggatacagacatccgcactgccgccgtcagcggtatgccgccgataactgccgtggtttgtctcattgatcccgaactgcacggtcatattgtaatcctcaaagacatccggaatcggtatctttttcggacatccctccacacagtagcggcacttggtacaggcgatcgtcggcatggcggcaagttcctccactacccgggcgatcgctgcgcgctcccgctcatcaagcggtgtgaactctctcatataagccgtgttgtcgatgagctgctgctcatccgacataccgctcagcaccagcatcacattttccagtgacgccgcgtagcggatcgcgtaggaagcgaagcttgcctccggtgaaagctcccttaagatctctgccggtctgccggtcatgttggcgagtgttccgccctttaccggctccatcacgatcaccggtacaccatactttttcgcaacctcatagcatttgcgtgactgcacgttctccgactcccagtcataataattgatctgaagctgcacaaactccatctccgggtgatttttcaggatctcctcgagcgcttctgccgtatcgtggaacgaaaatccgatatggcggatgcgcccttccgtcttcattctctgcacaaacgcaaagccgcccgttttctctgtctcttccacccgtgtcttgttcatggcgtgaagcagataaaagtcaaaataagtcacgccgcagcgcgccagctgtctctcaaagatctcgctgtagtcctccgtattttgcaccagccacaccggcatcttgtctgcgagaaggaaacgctctctgtcatagcgctccaccagacagcgacgcactgcctcctccgacttctgattgtggtaagggtatgccgtgtcaaaatagacaaatccctgctccatatagcggtcaatcatcctgcagaataccgcgtcgtcaatctcttcgctattgccgtttgcgacgggcaggcgcatacagccaaacccgagcttcttcggcatgatctgttttaaatcttccataacatatctccttttacatcgcgcagaactgctcaatctcttccgcaatctcagaaagtcccgttctccagaaatccttctttgtgaggtcgattcccatcattgcacctgcctcctcgatcgtgcagcacggggttgccgaaagcatcgccttatatttctcaataaaagcctctccctctttttcaaactggctgtaaagtccgagtgcaaacaggttaccgaacgcatacgggaaattgtaaaagctcagtccctcgctgtaataatgtcccttgcacacccacatatacggatgcatgcattccgggtccagcccgtcgccatacgtgttcttctgcgcgtccagcatgatctgctttaaatcgtccgccatgaggaacttattctggctctgttcaaataccgccgtctcaaacagatagcgggagtaaatgtccacgatacactgtgtctgctccttgatgtcgttctcaagcaggttcaaaagttcctctcctgatgcctctgtgcgcgctgcttttccgagatgcacctcgttaaaggttgatgcggtctcagccaccggcatcggatagtcctgattgagtggcgcatggttctcgatctggcggttatggaatgcgtgtccgagctcatgtgcaagcgtgtccaccgatccgaaataaccgtcgtaattggtcagaatccggctctgttttaaccacatggctcccgcgcagaaagcaccgccctcttttccttttctcgggtagaaatcgatccacccgttctcaaatgcttcccgcatcagatctgtcatctccggtgtcagcttcgtgaacgtatcgatgagatactgcttcgcctcctcgatgctgtaggtcttatccgccttgccgagcggcgcaaacagatcgtaccacggcagaccgttggcatgtccgagcatctcaccttttttccgcagatacttgcggaataccggcaggtattcgtcgatcgccgccatcatggcgtctaaggtctcgcgtttcatgcgcgactgctctaacgtcatggcaagcggtaaggcatagcctctcttttcgctgagcatcgtcacctggttcttaatataattcagggaaaacgcaatggcatcctccaccttctcataagcggcaatctccgcctcataagcgctcttgcgcacggaagtctccgggctgtacgctaagttccttacttccgacagtgtaatctgctttccctgataatccacttttaccatggaggtcagataggactgcagcttcgaccacgccgcgccgccgctcatgttcatggaagcaaccatctcctccacttcatcactgagcagatgctttgcttctttctgcttctctttcaggtagaatgtgtgctcacgcacaagcccactctcttttgccagcgcatccacgtcccggattcccgctaaaagctttcctgctgcggcctctaacggtgccatttttgcctgaagcttcatcagcttcgcattttctgccatcactgtgccgtcctccgtattgacagactgtctcaattccacatagagcgataactgatagaaaagctgcgcgatcccgctctgcgccgcaagcaccttctctgtcctttccttttcctgcatccctccggcatctgcaaccagtgtggtaagcgcatcaatctgcgccgtaagctctgccacatccttcccgtatgccggatcatcaaatcctttataaagctcgtctaacgaccattctgttgtcattgttcccctcctgtaatgtttttgcttctcagaacacctctcctgtgaagcgaaaaagtgtcccaccgcttgcatgcggcagaacacttttattatagcatggattctatttctggtaaatctgaataaaatttgtgaccacttccacaagcttttcgtagctcatggacgtcgtgtccagacagaaattataatttctggcgtcattccagtctcttccggtataatagcggtaatattccgcgcggtacttgtcgattttctcaatccgtctctccgcttccttctccgagagaccgttctggttcatcactcgtgcgacgcagtccttcttcggcgcacagaaatacagtttgatgacatccggatcatcccggagtacataatccgcacaccggccgataatcacgcaggattcctgcgctgccagctctttgatgaccttcgcctgataattgaacaggttatcatcggacacaaaatccgaattctccggggggatcacaccacccttgtacggatttttcttcaaaattccaaacaatggagatcgcttcaaccgctcgtctgcctgtccgaacagcgcctcgttgatgccgctggcatccgatgccattcttaagatttccctgtcataacagttgattccaagctgctcagccaaaagctttcccagtgttcttccaccacttccatagcttctcgcaatggtaatgactgtttttttcattccattttacctccctgcattttccgtctattctcccagatatgccttcttaatagaatcattgttcatcatttccttcgcgtcaccggagagaacaatatttccggtctcaagcacatacgcgcggtttgcgattgcaagtgctttcttcgcattctgctccaccagaagaaccgtcgtaccgctcgctgagatctcccggatgatgtggaaaatctcctccacaaaaatcggggaaagtcccatggacggctcatccatcagaatgatcttcggcttggacatcagggcgcgccccattgcaagcatctgctgctcaccgccgcttaacgttcctgcaagctggttttttcgttcttccagacgtgggaaactcttgtaaacctttgccagtgattccgcaatctcatttttatcttttctggtataagcgcccagcttcagattctcgtagacggaaagttccgcgaacacgcgccgtccctccggcacatgcgccattcccatcgatacgatcttatgtcccggcaccttcacgatatcctgtccctcaaaaaggatctcgccctcggatggctttaacattcccgttatcgtctgaagtgtcgtcgtcttccccgcaccgttcgctccgatcagcgcaatgacttccccttcgtttacttcaaacgagatccccttaattgcctgaatgacaccataatgtactttcagattttttacttccaacattgccatagtcgttcctccatctatctcatgtcattctccaagatatgccttgattacctgcgggtcatgaagtacatcacccgtcgcgccctccgcaagtacctgaccgaagttaagcaccgtcagcttctcacagataccggacaccagtttcatatcatgctcgatcagaaggattgtcatgtcgaactcatcccgcacaaaatggatcgtttccatcagctctttcgtctcgttcgggttcatgcctgccgccggctcgtcgagcagcagcagcttcggattcgttgcaagtgcacgcgcaatctcaagctttctctgctttccgtatggaagattggaggacaggaaacccgcctcgcgctccagatcaaacacttttaataattccattgccttctcatccatctccgcctcaaccttgcggtatttcggcagacgtaagattccggtcagcgtcgagtaggacatctggttgtgcagtccgatctttacattgtcaagcacgctctgatccttaaacagacggatgttctgaaacgtacgcgcaatgcccgccttgttgatgtcgatcgttttctttcctgtgatatccgcaccatccaggctgatagttccctcatccggcgtatacacaccggtaagcatattaaataccgtcgtcttgccggcaccgttcggtccgatcagaccgtacaactgtcctttatcgatggaaatatgaaaatcatctaccgcacgaagtcctccgaaggagatgccaagattctttacctctaacattgccataactatactgcctccttctttgtgtttttgcagaacttctgtgccattttctgtctccattcaatgcacttcggagcccagttgaaaagcatcatgacgatcagcacgatcgagtagattaacatacggtaatcggacagtcctcttaacacctccggaagaagggtcaaaagaacggctgcaatgatggaaccacggaaattccccataccgccgagtacgacgaataccagaatcatgatggacatattgtaaccgaagttcgccggcgtcgccgtaactgtggaaaggttgtgcgcatagagcacgccgcccgctcccgcaatcgccgcagagatcgtgaatgccatcagcttgaacttggtgatgttgatgccgacagactctgccgcaatacggttatcacggattgccatgatcgcacggccgcttctggaattgaccagattgtatacaacaaataaagaaatcagaattaagatcacgcccgctgtaaagctggagagatgtggaatctttgcgattcccttcgcaccgttgatcagccagacaccgtcatctgcgagatcaatcgcgtttccgttcgagattgcaaagtggaatccgcttccgtcttttgcgatataaagaacgttgatgatatttttgatgatctcaccaaacgccagcgtcacaatcgcaagataatcgccgcgcagacgtaagaccggaatgccgatcagaaatccgaagaatgccgccatcgcagtacccacgagcagcgcaataataaagagcacaatctggctgccgatcacaccttccagcagcttagtgcagaaggcactggaaaaagctcccacacacatgaagcccgcatgaccgatactcagctctccgaggtatcccacgcacagattcagaccgatcgccacgatagagtaggtgcacatgggaacgagcagtccctgcatcagcgaagaaattgctccggcagctaccatgatctgaaccacaatatataccgcaatcaccaacacaaaggtaatcagctggtcttttgtttttttattcaccgtttttaaatttaactttgccatagctgttctcccttttgcattatactttctcatgaatctgttttccaagaattccggtcggttttacaagaagcacaacaatcaaaaccgcaaatacaatcgcatccgaaagctgggaggatatgtaggcacgtcccagaatctcaataattccaaggagaattccgccgatcagtgctcccgggatcgatccgattccgccgaaaacagcagccgtaaatgctttgatacccggcatggaaccggtgtacggtgtcagcgtcggatacgcggaacagaacagcacacctgcgatcgccgcaagtccggaaccgatggcaaaggtcagggaaatcgtcgcattgacattgactcccatgagctgtgccgcatctttatcctcggataccgcaagcattgcctgtccggctttcgtcttcttaatgaacatcatcagtgcgatcataatcaccacgcatgccagcacggtgacaatggttgtgccggaaatggtcaacgcgccgtctgccagctttaaggaaggcaaggacacaacggaactgaatgatttcgtatccgctccaaacagcagtaatgccgcattctgcaggaaatagctgacaccgatcgctgtgatgagcacggcaagcggcgttgctcttcgcagcggcttgtaggcaattttttcaacaacaattccgagaacggtacatacgatgatggagagaaccaccgccggaagcgggctgatcccctggccgctcattgcaaggaacaccacatagcacccgatcataatgacatcgccatgtgcaaaattcagcattttcgcaataccatataccatggtatagccgagtgcaatgatcgcatatacgcttcccagactgattccattgatcagataggataagaaattcataacaacacctctgtctttccttgtttaatacgttaaaacgtcagcagtttcacttattataacatgttacatacctgtatacaacttaaaaccgaaaaaagaagaggttccgcgccggcgggtagtcgcccccgccaacgcgccaacctctttattggcctttcctgcctgctctattacattgctgaataagcaccgtctttgattacgactgccttcggcgccttgctgacctcgccggttgcctgccatgtcatggaatcaccagtcaaaccgtcaacactgatctctgtcatagccgcctcaagtgcactgccgatgtctgccacgctcatatccggtgtcacacctgcctgctctgccgctgctttgataatgtagattgcatcgtaagcgtctgctgcgaactggttcggtgtatccccatatgcttctttgtactttgtaacaaaggactgtgtcttctcatcatctgcatctgctgcaaacggtgtcaagagcattacgccctctgccagctctgtgttaaaattctcaacaccaagcagtccgtccagaccgtcgcatccaaagaatgtcggagcataccccatgctgtctgcctgtgtcaggatgatggatgcctctgtgtagtagatcggaaggaatacaagctctgcacctgcgctctgtgccttctgaagctgtgtggagaagtctgtcttggaatctgcggtaaacgcttcttctgcaacaacttcaagtccctgattctgggcttcttttacgaagttcgcctcgataccggaagaatatacatcggaactgtcgtagatcactgcaaccttggctgccagcttgttctcaccgatatactgtgcggatgccgtaccctggttcgggtcggtaaagcatacctgaaatacattatcattatcgattacatccgtggaagatgcggacggtgtcagttcatacatgccgtcctctgcggtcttctcaacaactgccacacagggagtcgttgtaacggtacccatcagcatctgcataccccaatcctttaaggagttgtaagcattgacggatttctcggcatcatgctggtcatcctcaaacttatatgcgatctgatatccgttgataccgcccgctgcgttaatctcatcaacagcaatctgtgctccgttcataactgctgtaccgtagatcgctgctgctccggtagtcggtccgataccgccaatcttaaatgccgcgccatctgccgctgcggctcctgcgctctctgtacctgccgctgcgccgttatctgtggtcgtaccggatgctgctccgtcggaagagcttccacagcctgccatcatacttgcagccatcgctgctgtcaacaatacactcaatgctttcttcataatattgtcctccctcaagtgcctttatcttttctgaaataatagcaaaattagagaggattcacaatgttaaaattacaccaaattcttgatttattttatcgtgtgattatgcaatttgtcttttccgataacccctggttatattgtgtattccagacggctatattgtccgtttttctgctttttttaactgtttgacgggctttcttccgtgttgtaaatgtacttgcgcgtcataaaacgcaccgtctgctccgcctctgcccggcggcacagttccaggaaccggttccagaaatgttcaccgcagtaatccaccacatagctgttgcgctgcgcattctccatttcccgcagagatccccggtcctcatgaccgatataatatgccagtgcaaaaaaatccggttcctcccagcctgccgcatcctttaataccgccgccacattctcaagctcgctccgaagcatgatcgctgccagcttactccccgcctcggtctgtgccttcgccgcgtgtccctcatactctgccaccatctgttttaagttctgaatcgtggactgaaaatcgagatcatcctcccttatggaacagtcatgatagacctgatccagatcccccatcagcccctccagactctttttgacttcactcaccgggctttccttcatacactccaacagccggtcaatcgccgccctcgactgcgcgaggtgccttctcgcctcctcatactgttcccgcagagtatccccctgttccagcgccgcctggtaatcccgtagcgcctcgttcacatacgccttctcgccccccgcattcagaagactcttttttaaatccttcaactccccttttaattcttttgacttctttcctttcgcagctctgtcaaacaacatttccctcgctccttctcacgatctgacatttctaccctttattatataaaacccatccgtcatcttcaagccaatttcaaacgaagaggctgacgcttcaagcggcagcctcccaggatagataagtaaataggataaaaagatcacacctctcgatttcgatggaatgtagatggaaatccggatcaaaaaaagcggcatttctagccagccgaatgtctgcatcttcgatgatccgtgtctttccaagtttggagcactccgcgggttatgtccgcatcccggaagacaatttgtaggacttttgtgtgtgtcccttattggcaccagacaacaggtggcataaatgccacctttatgtcgaacataacataaccgcgcgaagccgatgtttgaattgccatctgccatgtttttaatagcagatggcaaagagtttcggttcgcgcggttttatattgtctgtgaagaggtgccattagggacaccagaaagtccgcccattgtctccggtgtgtcggacatgcacccgtcggattgtccaaacgtggaagagacacggaatctgatgcaaacattcagccggaagaaatgcacgcatttttttcaacgaatgttccatctacacttccagcggaatcgaaaaatgtgatcttttatcctagtacatctctttcgacgccagctgtccgcctgaagcggcagcctcccgtctatttttcatcatagagatgacattttaccttatgtccgttgccaacatccttgacctgcggctcctcgtgcttacagatctccatgcactcactgcagcgggtgtggaacttacatcctgcaggcggattggccggggaaggaatatcgcccttcaaaaggatacgttcctttctgacatccggatccggcatcggaatcgcggaaaacagcgctttcgtgtacggatgcaacgggtttccgaaaatatcggccgtctcgccggactctaccatgccgccaaggtacataacgcccacggtatcagaaatatgctctacgacagacagatcgtgagagataaacagataggtcagtcctctctccttctgcagatcgcgaagcaggttaatgatctgtgcctgaatcgacacgtccagtgcagataccggctcatcgcacacgatgaattccggattcagcgcaagcgcacgcgcgatacagattctctgtctctgaccgccggaaaactcgtgcggataacgatccttgtgatactcctgtaatccacagtccttcataaccttggtgatataatcatcaaactgctccttcggcacgagtccatgctcacgcactgcctcaccgatgatctcaccgatcgggagacgcggagacagggatgaatacggatcctggaaaatgatctgcatctttgtgcgcagatcgcggagctgcttcttatcgtacttgctgatgtcctcgccattgaagagaatctcgccgtctgtcttctcgatcagacgcaagatcgttcttccggtcgtggactttccacatccggactctcctacaagtcccatggtagtgccgcgcttaatgttaaaagacacgtcgtcgaccgccttcacactgcctgtcgcaccgccgaagaaccctcccttaatcgggaaatactttttcagatgagacacttcaagaatattgccgctctgattggttgtctttgttgcttcgttattgctcattcttcgtgtctccttccttgccgactgcctccgccgcacagcggtagcagcttacaaaatgtgtcggggaaatctggtacattcccggatatgctccctcacagccgtctacgcacatctcgcagcgatccttaaagtagcagtagttcggcatatcaattgggttcggaacgcttcccggaatgctgtaaagcttctccgtatatttaccgaccaccggctttgacttcatcagtccgatggtatacgggtgtctcggatctttgaaaatctcgcgtgccgttcctttttccacaacacgtcccgcatacataacgaccacgtaatctgccatctctgcaaccacaccgagatcgtgtgtgatcagcatgatggagctgttgatcttatccttcagtccgcggagcagatcgaggatctgtgcctggatcgtcacatcgagcgctgttgtaggctcatcggcgataatcagacgcggattacatgcaagcgccattgcgatcatgattcgctggcgcataccgccggaaagctcgtgcggatacatccggtatacgccttccttgttggcaatgccgaccatctcaagcatctggatcgtacgtgtcttgacgtcatcctttgtcatatccggattgtgaagtgcaatgacctcatccacctgctcgccgatacgaagtaccggatttaaggaggtcatcggctcctggaaaatcatggacatgtagttgccgcgcagcttctgcattacagaagtcggcgtgttgaccacattgtatacatgatcgccggtattaaagcggatctctcctcccacggtctgaccggatgggcgctgtaccagctgcatcagggaaaggcttgtcacggattttccgcagccggactcacctacgataccgaccgtcttgccctgcggcacatcaaacgatacaccatcgacagacttgaccgttccgatgtccgtgaagaaataagtctgaacgttgtcgaactcaacgcagttctccggattcttcatctttgtcacatattcctcctccggaatatgctttctgtttctttttttctcgatctcctgcgtaatcttgcggttctcccgcgcaatcgcgcgggattcttttgcggagatataatttgcgtttttcttcttattattaaatgccattcctgtcacctaccgtttcatcttcggatcgaatgcatcacgcagaccatcaccgataaagttatatgcaagtaccgtgagcaggatcaggacgcctgccggaacccacacgaataaatagttcgtcataacgtaagagtcgttgaccgcattgatgatacttccccaggaagccgccggatacttgataccaagacccaggaaactcaatgtggactcggcaagaatgacatcaccgattcccatacttgcgaatacgacaagctgcgggataacattcgggatcagatgtctgaaaatcctacggcttacgcggataccggttgcctctgccgccgtcatgaactcctgctctcgcagggacaagatctgtccgcggataatacgggcaatgctgacccagccgatgatactcatgacaatacacagcatgtagatacgtgtctttgccgaagccttgtagtaatccatgatcgaaccgaggatcagatacagcggaatcgccgggatacagtaaacaacatcaaccacacgcatcaggagtgtgtccacccatccgccgaaaaatcctgcgataccacctacaatgataccaatgataagctcaatgataactacgacaaatccgatcataagggaaattcgtccgccgtacatcagacgcgccagaagatccattccgttgccatccgttccgcacagatgctttgcagatggtgccgcataactgtcgatgacacgcgtctcctgatagcgctgaatcgtatactgaccgtttttatccttgatcagataggtgtcggtctcaccctgctcgtccgtatactcaaaggaattctccccggcagtcattgcagcctcagctgcctccttgaacgccggtgtcagcacgataccactggaaaccggattcatgctcatatcagatacataagcataatccgcaccgtctgccgtatgaatcatggcagcgctgccctcgttttcaaccgtgtagttcacgccgtccgcctcaacgttcttatcgccgtttgcaatcgcagtcagcaccttgctgtaaaaatcataagaaaatgttgtgccctcatcaaaagctgtcacagacttccggcaggcaataccaagctctgtcgtcgtgtacagtgtctctttcacaccggatgcatcaaacacatactccacgccgttgtaagtaaactggttctgtccggctgcctccgcagcgtcatgctcctcagactttaatgccagcggattcatctgctgctctgccgcgtagatgtgatatgtgtcgtcatcaattttgccaagtgccagtgtctgtccatctctggtctcgaacaccagggcatttttcgtcacggccaggatcatcttggaatacacatcgctcggaagctccacaccgtccgctgcaaacacctgaaactcatcaatttttgccgcgccggcataatccttcttcatctcttccgtgcggtaaaagacctcactctgggaatacggattgactgcacctccgacaaaggcaaacaggaacatacagataatgataaccagtcctacgattgccagtctgttgcggaaaaaccgctttgcaaccatcattccgggggaaagtacgcggacacgctgcgcgtcatcaagcttcatattattcttctcgttctccatgttctctcctcctttctagttcacgcggacacgcgggtccacaactgcgtataaaatatcggcaatcaggttgccaagtaagatcaacactgcggaaaacagcatgtagaacataacaaacggaatgtcaccctgtaataccgcctggtaagaagtatatccgatacctgggatctggaacagcgtctctgttaccatggcaccactgaagagtcccggcagtgtaccgccgagcagcgtgataatcgggattaagatattgcggaatgcgtggtaatgaatgacacgcttctccggcagtcccttcgcgcgcgccgtacggatgtaatccgcattcagcacttcaagcatattggttctggtgtaacgcatcagggaaccgatgctcacgatcgtcagtgtaattaccggaagtaccagatgccatgccatatccagaatctgccgtccggaggaaaggctctggaagttacgtccgacaataccgtagaggtcgaaccagccaagctttacggaaaagacccattttaaaagtgttgcaacgaaaaagctcggaagagaaataccgaccagtgcaataacggtgattgtataatcggttgcagaatactgctttctcgcagcggcaatacctgccggaattgcgatgatgatctccagaacaaaagatgccagtgacagtgcaaacgaataccagataacgcttgcgaatttggtcagtaccggctggttaaaataccaggaatcaccgaactgtccgcggattgcttttgctgcccagcggaaatatccctggatcacaccggtgtccagaccgtacgatgcatttaactgtgccacccattcgtcataactctttgctcccggtctctgtgacaatgtcagtgcctgctgctccacgaatgacgacggcatgcaacgcatgatcgcgtagatgatcatggagacgaagaacagtatgacaatcgagagcaatactctcttaacaacaaatttcttcatgattctttttcctttcctcgctgcttctgatgctaaaggtattttgcaaaaaggcgtcacgcatcctcttgcaaaatacctttaaatccctatgcaccatggcacaggttgtagaagaggggagcctgctcccctctccctccaccatcagccagttactctgatccttagttcatctggatcttctcaatctcgttgagatagctatagaaggttgtcagatcctgcggaatggaatccacattgacacgctgtgtactgaatacagaagcgttctgtctctgatataccggaatctctacagcgtaatctacgataaagtcaagtgcttccttataaactgccttacggaatgcctggtcggtattggttcttccctccattaccagttcatccagctcgtcagagtagattgcatagtagtttgcgctaccgccttcgctgtgatagatctggaacatatccggatctaaggttgcctgccatgctgcacaccacatctctgcagtctcactgtttaacgcatcccacatgatggttccgtcagccagatcgttgattgtcagatcaaagccgatggtcttaagtgcctcggatgctgcggtcagaataccgaaggaaggatgatctccctttccgcctccgccgatcattacctcatagcttaacttcgcaccagccggagctgctgttaacttgccatctgttactgtgtaacctgctgcctcgaagaatccgagtgctgcgtcaagtgctgcagcatacttctcgtcatccgacataccgtctgtgtagatcgggttgccgtctacgtccttggagaatgcaacctcgtagtctgcgtcagacttctgcggtgctgcccaggaagtattggagatcgggtagttaattactgctgctgcctctccataataggagtcgataaccatatcacgatatacagaaattactgttgcgattgcttttcttaaatctttggactgctcagaagaaggatcatcgccaaccttgacgttctgggagttgattccgatgtaaccataaccattgttatcgtacagtgctgtggttaatacatcaccggacacctcaccgttgctgttctcagagcagatctgtgccataacctctttggagatggacggatcagaaatatctaccgtaccctgaacaacacccggaagcttatctgcctcagcggtctccttgaactggagttccttggtaaccggtgctcccttgtagtatgactcattcgcctcgagatatactgtcttgttctcgtagctcttgaagacatacggaccagcgccaagcggagcggtcgtcttctcgcggattgcggaaagatcaccctttgtgaaaccgaactggttgttatcgtaatcgtactggctctcatcaccataataatgaagcggtgtgatctggatatccatggtctgaagtgccggtgcgctgacctctgtcaaaacaacacggacggtcttgtcatccagcttctggataccggaaatatttgctgctgcatcaccggtctcaacaccttcggtagcgtatgcatatacgtcttccggaatcagatcggagagagcgcttcctgcagactctgcctccatagctgtaaagctccatccgtacttgtcaccgattgccataaagaaatccttagcggtcgcatctgccgcaagaccgtcgaagccccactgtgctgctgcgcctgctacgtcgccctcttcgctgacgccgttctctacgcagtaatcaacgatttcctgtgcaaatgctgcaccaccatcgtttacagcatcccagaatgcgttctgctgatcttctgtccagtatgtgaagtctgtgttatcctcgcccgctgccgcaagtaaagatgccaatgtggacataccgcttctgtactcttccataccctcgatcgggagagagtatacagatgcgcctccgtcataagtcggatcacagaatacatagaaagagaagatgatatcatctgcggttaccggctctccatcggagaaggtcagatcatcacgaagcttgaaatcatagtatacggttccgtcttcgttctctgtgatagtcagatcggtcggtccgtagtaagtataatcggtaccgttgtacgaagtggtctcaccctcgataccattgtagataaactcaccggaacgatcgttgtaaaccagagaaatctgtgtcacatcaacgatgttctgatccggcacactctcagcgaagaatgggctgaacttctcgctcataccgtcatttgcgataacgagcggtgtgtcgctgccggatgcagccgtgcctgctgcctctgtgcctgctgtctcggttccagctgtctcgccgccagccttgcttccgccgcagcctgcaaatgaaccgacagtcagtgctcctgccagtaacaaagcaagagtctgtctcatttttttcataatatttcctccttataaaaatattatctatgttttaaccttataaaaggaaaaaacctactccattgtggcattctcaatcagaatgccgctataattgcggtcataatactttccgaagaaaaatgcaaccgccagaaacaggaaatgacatatcagatagatacattccattcccatacggatcccaccacggtgcagcaccatgtatacaaggtccagaaccgctccgattcccgtcagcaccattgccccgatacaggaacgcttcatgcgaagcagccccgtctcatagtgtgcccggtgcatacggaccggtgccccgatatagctgaccgcaccataaagcatgtatccaagcggaagaatcacaaacagatacgggaatacaatccacgctgtgcgggacgaatccggatttaaaagtcccattccaagctcaatcacccacagcgcgatcgtccagatgacattaaaaatgcctgtccgccgcttctgctgttcatcaaacggaagcacataaaaatctccctgataggacgttcttgtcaccagaagaccgtgccggttctgctttaattcattttgataatccttttggtaagggttcttgatcatcgccgcttccgcctcatcgctctgcctgccatactgcatagtgcaatattaccgcgttattgcgctaaaatatttttgtgtaacaaaaaaaagtgacaatgaacctctttgtccactgaacactttgcaaaatacacttgtatgttgcacacgcacaacactttttttattatacatgggaaactgtttttgtcaatacttttcccgctggcacattctgcctcgtttcgcatgtttttacaatctcat

SEQ ID NO: 11474 - DNA, 803 bp, Unknown
  gut microbiota DNA sequence
agccccggatgcttcaatgcctttaaaagctccatttccctgcggatctcccggatctgttccatctcctttattgccaccagacggtttaaatgcagatctttcgctagcattacacgccctgatgcgccctctcctatcttccggagctgctcatactgattgttccagatttttctcattggcatctctcctcccctttcagcaggttctgatataaattgcggaaagattatccttttcgccctgcttcttcacataggcagcgttttcctgaagtcttctttcaatctgcccctcttccacaatggaagccggctcgaacatctctccccagcactgcttattataaaatccatccgtacacagcaaaaatccctgtttctttctcacccgtcccctccggatgtccggcttctggaacggaaagctccccatacacttcaacagccggtgtccgcctccactgtgatccgttgtcagaagttccatcctcttcttacggcaacgataaatccggctgtccccgatatgacagatcagataccggtgtccccagatcaacagcagagacatcgttgtccctagctgttcttcttttcccttccgatatctgcaaaactcctcattgatgctgtataggcatcgcattatactcttttccatgaaggaagctcttctcccttttccgatcagatcaacgatctgccggtaaaagcaggcaaccatgcgctcaatcacataaccgcttgccacttctcccttccaaaggccaccaataccatcacaaacgattgccatca

SEQ ID NO: 11475 - DNA, 145 bp, Unknown
  gut microbiota DNA sequence
gaatccagagtacatcgagacacgagaaaccttgatggaatgagcggggaccaccccgtaagcctaaatactacttagtgaccgatagcgcatagtactgtgaaggaaaggtgaaaaggaccccgggaggggagtgaaagagaac

SEQ ID NO: 11476 - DNA, 3348 bp, Unknown
  gut microbiota DNA sequence
cgcggggataaccggttccgtcatagcgctcgtggtgggcgacaaccgctgggatcacgtaatccatgttcggaaggtaacggatcatcttaatggaattctccacgtgcgttttcatgatcgtgtattcctccggcgtcagccccgaggttttctttaagatatgctcagggatgctgatcttgccgatgtcgtgaagcatgcctgcaatccgtatcacctcgatatcattgtcgctcataggaagcgcttctgcgagcatgaccgcatattttgagacattcatggaatggatgaacgtaaaattatccttggcatcgatggcggcggtcagcgcatagatggttggcgccacccgctcgtaggcggtgcggatatccggattctgggagcggttttcaagacctttgcggtaaacgatgagatggcctttcccgtcaagctttccaaaatagacagcctgctcgacattgtggattaactctctgctgtcggcagaaatatccggaaacacggagatgccgcaggtgatggtaatttcccacaccatgtctgacatgctgccttttgtcagaacctccacgagagactgggcaaacgctttggaggctgcgacatcactgccgtgtcttaagatgagaaattcgtccgaaccgaaacggaatgccatgtcgtcctcatccagagcagagagaatgatcttggcacagcgctggattaagtgatcgccctccttggagccgtaaagttcgttgtaaagtttgaaatcatcgatatcgagcatgattaatgagcacggcgtaccggagaggcagagttcatcaatcatctcaaacgcatgcttgcggttgtagagtgccgtcagatcatccgtgatggaggcccggtaggcgttcatgtagagattcgcgttgcgcagtgcgtgggtggcataaaagccgatcttgcacagtgcggacacctgatctgcagacagtggcatgtgagtgtgccgcgcgatgaagagaaagccgatcagtgcccggttgtacttcagacaatagacgccgatgatattctgctggatcagccagctgcgcgtatggctggaaatgccgtcaagcgcagctggcaggcctgcgcccggcataaacggaatgtagctgtctgcgtttaaaagctgttccaaaagaatgcttgaatcgagaaaagaatctttttcccaggtgatatcgccaaaactgcgtgtgacgtggtaggaaggactgacatcgtcacggatcgtgagcagcagaccgtccggagacagcagacggacggctgtgtctataatagaatcaaagatttcgtccgggtgaatcgtgctgatgacggatgacaggaattgatcgatgagaacagtttgatcgctcataaggctcctttgtatatgataaatgaaaacatcttgagaattcagaatcattatactataatgaaaaatgcatggcaatagtgggaaatacatagaaaagccatagaaacagggatattttcatgcgtagagaagagtttaaaatggagcgcaccggactgcttgagatcggcgatgtgcttccgattacagaggggaagctgcccaattcctattactatacactgggcaaggcgtacgcgatgtcggcgaactatgtggtaagccagcgcatcaagtcgcgggaaggcacagtggtagacgtcaaagagaccccgaagggatattttgttacggttgaatttgatgagtaaaagcgctaaaataataataatttagcggaaaggaagcacaaatgcgttatttaccgacgagcagactgacgccgggaatggcactggggcaggacatttatgacggggcgggaagacttcttctgggaaggcatattctgctgacagaagaacaaatttcaaatctggaattccttgggttcccgggtgtctatgtggacgatgagttttccagggggattgagatacagcagattgtcagcccggaagtccggaggcaggcactgaaaattgtatatgatctgtttcacacggatatgcggaagcaggaaccgtcggaagcggagtttaagctgcgcaaaacggtggagtctgtggtcgatgatgtgatatgcaatggagacatcatgtgcaatatcatggacatcaagagttatgatgattatatctattaccattccattcatgtgggcatcctttctgtggtagtcggcgcacggctggggcttccgcatgatgagctgtgccagcttgcagcggcggcgctgctgcatgacattgggaagcggtttatcgatcatgacatcgtgcggggaggtaaggcgcaccgcagcgaaaaagagcaggaggtctatcggagccatccgaagatcggtgcggaatatctgcgcgagacatgccgattttccgcggatgtgtatgagggaatcatggagcatcacgagtgctacaacggcgaagggtatccgcttggcaaaaagggcggcgagattcacctgtttgcccgcattatccggattgcagactgttatgacgcaaaggtttccgcgtttccggcacagaaatcactgtcgccgtcggaggcgttagaatatgtgatggcgctgggcgaccgctggtttgacccggatattgtggctgtgttcgcaaggaaagtggcggcgtatccgatcggctgcgaagtcgaactgtccaacgggcagcatgcggtggtggcacggaattttgagaatttcccgctgcgtccgctggtgcgcgttgtggagacgggagagatgttgaacatgcgtgacgatgaaaaagcgagggcggtaactgttgggagactcatagtgcgatagagcacctggggcgagagggagttatgactggacagggaaagagtgcgattgatacacttttggcagagagctttaaggaactggcgttaaagcagccaatagagaagattacaatcaaagagattacagataaggcgggcgtgatccgcccgacattttacaatcattttcaggacaaatatgatctgctggagtggattatcgacaaggaactgctggaaccggtggaaccgctgatccagaacgggatgatcaacgaggcgctggtgcttctgttcagcgggatcgagcgtgagaaggagttctacacgaaggcaagccggctggaaggacagaattcattcggcagcattgcacaaagctgtgtggagcgcgtgctgctacaggtcatcaaaggacaggcagagggcagaaaaagccggtacgtgtggctgacaccagagcgtatcgcggagtattatgcacagtccatgtgctatgtggtgatcacctggatcaagtc

SEQ ID NO: 11477 - DNA, 3908 bp, Unknown
  gut microbiota DNA sequence
atcaaaactgcatttaattttccgaatcagtctgtccagctgataaggttctaacgtcgtcggtgtaccgccgccgatgtagatggaatttaaatgtctgcccgcaaacttcaccgctgcaaactctatctcccgctccagcgcatccaggtaggaatccacacgcttcgcccacgatgcaatcggataggaggtaaacgagcaatacagacaggtcgtcggacagaacggtatcccgatatacaggctgtacccgttgtcataatcgatcttggaaagcagggagagctccctctctgcaatgtctgtcgcaaggcagatcttctcatccgacgcaaaataagtctgcttcatatacgtatagatctcgtcccggctttttccctcttcgagcagcttcatcggaatcttggtcggccggattcccgtgagcgttccccacggcagatactgaccggtcgcatccgacagaagcgcatacagattctgtttcagccggttcttcgtctccgggcgatctaaaggatcgactgcaaaggtacgctccaccgcaggcgccgtctctccctgctgccagcgcagcgttatcgcatcgtccgtgtactccacatgcatgcgggatgtcaccggctcgtcatactccttcttttccgcggatactccgacatattccgacggataaaatgccttgatgagtgaatggatatcgtactcaaattccggctgattcaatgttacttctatcatatctgactcttttctaaactaaatattatatcatctttttgcgctgctttctgcgcatccgaagttccgcaggaacttctaatatgaatccgataggattcattatatcatatgcgtctttgcttcggcaaaagtccggaaaacctctggtttcccggatcatacgcttacagatatggattgtatctgcgctctgttccgatcgtcgtggtgtcattatgtccggtgtagacggtcacttcatccggaagcggcagtaacttctccttgatgccgcgaatcagcgccgaagcgctccccttcggaaaatccgtccttccgaccgactgggcgaacagcgtatccccggaaaaaagggcgtcctgataggcaaaataataacagcagccacccaccgtgtgtcccggtgtaaacaatacccggatatggaatcccgcgagatcaaactcctgctcatccttcagaaacacatccgcgcgataggtcgtctccgctcccgcccatccgcttaagttcagctttggatcatcgagggtctctctctcatgctcctcggcatagaccttgataccaaaatgcgctgcgacttccgcagcgcccccggcatggtcaaaatgtccatgtgtcaataaaattgcaacaggatttaacttttcttcctctatgatctgtatcagacgatccgcatttgcccccggatcaatcagaatcatctctttcgtctcatcattgaccgcgaaatagcagttcgtctgcaccggtcctaccacatactgttctaccttaagaggcgccatctttttccctccgtctgcctttcctgcttcatcagcctgtcgttctcacaatatcaatcacgctgtcgatctggcgcagcttatcaatcacgctgcccagctcctccctgcctttcgtgctgaaggaaacatcgatcgtcgccacaccctgtttgctcgtcttggagtggatcgcatcaatatcaatctcacgctccgtgaacactctcgtgatgtcgaccagaagtccggtacggttgttgccgaaaatcttgatctctgcgcgatacagaccattgctgccgtcctgaccgtcatgctgccattccgcatcgatcagacgctccttctccatatctgacaagttgatgatattgacgcaatcagttctgtggatggacacgccgcgtcccctcgtcacaaaacccacgatctcatctcccggcaccggactgcagcacttggaaaaatgaacagcgacatcgtaaagtcccttgacaatgattccgctcttggagcgcttcgccgactccggattcttgttctcggaaccgatggtctcaagaacctcctcgtccgtgatccgcgccagatgatcccgcttatattcctcgtacatcttattgacaatctggccttcctttaagccgccgtgtccaatggtcgccagacaggaattccagtcatggaaaccatattttctcagcactttctcctggtattccggcttgttgatgtctgcaaagttgattcccttcgccttgcaggacgccacgagaagctccttgccgcgcgtaatattttcttccttcagctcactgcggaaccactggttgatcttattcttcgcctgggtactctttacgatgttcagccagtcacggcttggtcccttggagttctgcgaagtgataatctcgatccggtcaccgttctggatgacataatcgatcggaaccagctttccgttggcttttgcaccgatcattttgttgccgaccgcggagtgaatgctgtacgcaaaatcaatcggcgtcgacccgttcggcaggttcttgacatcgccggtcggtgtaaagcagaataccgtgtccgaaaaaagatccagatcactctttaaaaggctcatgaactccttattatcagacatgtcgcgctgccactccaagatctggcgcagccagcttaacttctcctcctccgtgacagtcatcggcactgccgcgccgccgttgttgctcgcttccttatatttccagtgcgccgctataccgtattccgctgtccggtgcatctcataggtacggatctggatctcaaacggctgtccggtcggtccgattaacgtcgtgtgaagcgactggtacatgttcggcttcggcatcgcgatataatccttaaaacggcccgggatcggcttgtacatctcgtgaatcacaccaagcgccgcatagcagtccttgacggaatccacgatgatgcggatggcgaacagatcgtagatctggtcgagcgttttgtcctgattcaccatcttcttataaatgctgaaaaaatgcttcgcgcgtccctcaatctccgccacgatgcccgccgccttgatatgtgcgcgcacttcctccacgagcgactgcacgtagtcgtcgcgcacactcttgcgctggtcaatctgacgcacaaggtcgtagtatgcctccggctccagatactttaacgagagatcgtcaagttcaatcttgatctttgaaataccgagccgctgtgcaatcgggcagtagatctcctgcgtctcacgcgcaatgcggatctgtgcctccttggactggtactttaatgtacgcatattgtgaagccggtctgcaagcttgattaagataacccggatatcttttgccatggcgaggaacatcttgcgcaggttctccgcctgcatctctaagcgctccgcagaacggtccttctgatcgtgattatggctgttgtccgcgagatgcagatggcgcagcttcgtcactccgtccacgagaagcagcacttcctcgctgaactcctccttgatctcatccgccgtcatgaccgtgtcctcaagcacatcatgaagcagacctgccgcgatcgtctccttgtcaagctccagctccgctaaaatgatcgccacgcacagcggatgcacaatatacggctcaccggatttgcgcgtctgtccctcatgcgcatcccgcgctacatgatacgccttttcaataagagaaatatctgcggaagggtgatatttgcgcacactggcgatcaactcatgatataaatcctccggactctcaaactccttcattggcttgatactgcggtcctcttcctttaccagtttttccaaatgctcacgct

SEQ ID NO: 11478 - DNA, 2569 bp, Unknown
  gut microbiota DNA sequence
cttaggtcgctatataaaattaatgcagaggaggattttatgtacacagcattaacaatcgctggaagtgattccagtggaggcgccggcatccaggcagatattaagacaatgaccgccaactgcgtatacgcgatgagtgcggttacggctttgactgcccagaatacgaccggcgtaacagatattatggaagtaactccaaaatttttggcagagcagctggacagtatttttacggatatttatccggatgcagtaaagaccggaatggtctcatccagtgaactgattgagacgattgcggacaaactgacagagtatcacgcaaaaaatattgtggtagatcctgtcatggtggcaacgagtggagcaaggcttatcagcgaggatgccatcggcacattgaaaagtaaattattgccccttgcaactgttatcactccgaatatcccggaagcagaagttctttccggaatggagattaaaacagaagcagatatggaaaaagcagcagaaatcatctgtaacaccttaggctgtgcagttttattaaagggaggacatcagttaaacgatgccaacgaccttcttttccagaaagaaaaagaaccggtatggtttcacgggaagagaattgacaaccccaatacccatggaacaggctgcacgctttcttctgcgattgcatcgaatcttgcaaagggaagggacttagaaacttccgtcaggtatgccaaaaattacatttccggcgcacttgccgccatgcttgaccttggaaaaggaagtggtcccatgaaccatgcatttgcagtcgaaggagagtacaaaggatgaatgaaaagagaacttccgttttttcaaacggactaatctggtttggcgcaggcgtatccctggcggaaatactgacaggtacctattttgcaccgctcggtattggaaaagcaatggcagcaatcctgcttggtcatctgatcggcggttttatgatgtttgcggcaggaatgatcggagcgaaagagcgcaaaagcgccatggaaactgtaaaaatgagcttcggcgagaagggaagccttctttttgccgtattaaatgtgttacagcttgttggatggacggcgatcatgatctatgacggtgcacttgcagcggatggtgtgttacatattggaaactgggtgtgggcgctcgtcattggtgttctgattattgtctggattttcattgggctgaccaatcttggcaggctgaatacggttgccatgacagcactttttattttgtcactggtactatttaaagagatcttttttaattcagactttgtgatgctgattacagcaagtgatgacacaatgacgtttggtgcggcggtagaacttgcggtagcaatgccgctttcctggctgccgcttatcagcgattatacaagagaagcagaaaagccgtttgcagcaacacttgccagtgtgcttgtctacagtctggtcagcatttttatgtatatgatcggcatgggagcggctatttttaccggtgaatatgacattgcacagattatgttaaaaaccggtttcggcgttgtcggacttcttattattgtattttccacggttacaacaacctttctggatgcttactccgcaggagtttccagtgtttccatttcttcaaagattcaggaaaaatgggcggcaatcgttgttaccgtgatcggaacggctgcagcgattgtgtatcccatggataatattacaaactttttatatctgatcggttctgtttttgctccgatgatcgcagtacagatcgcagattatttcattttaaagaaggcagatgccgaaaaatctgctttccagtggcgtaatctggtggtatggcttgccggttttatgatttaccgcatattgatgcaggtagatacaccggtcggaaatacactgccggatatggtgatcacagtcattctctgcctgattgtggaaaaagctgcgggggcatcacacaacaggaaaagaggatgaaaaatgaagaaactgaatttaaagaaattgacggtcacagcaatcttagcagcggtagcagtggtgggaagcttgttttccttcccggtattcggttccaaatgcgcaccggtacagcatctggtaaatgttttatgcgcggttaccgtaggaccatggtgggcgttggcacaggcttttattgcgtcgctgatccgtaatctgctgggactgggaagccctctggcattcccgggaagcatgtgcggtgcattgcttggcggacttctttataagtacgggaagaaacttccgtttgcctatctcggcgaggtggcaggaaccggaatcattggaggaatgctttcttatccggtggcatatcttgtcatggggaataaagcagcggcgttatttacgtttgttgttccgttcctgattagtacctgcggtggaacactcattgccattatcattacgctgccgctgaagaaatcaggcctgcttggcagaatgaaggaaagcttagaagagtaagaaaaagaaaagcaatcggg

SEQ ID NO: 11479 - DNA, 818 bp, Unknown
  gut microbiota DNA sequence
atgtgcggcaaaaaaaaatttccatgatacaaaaacggacactgaatcttcttcagtgtcctcccatcacttctaacctgcacattcctggtacagcgtcttttgtccggtcccgccgaagatatccataatatccgccattcccactccgtaggaaagcagcagtaccagattttctttcgcgtactcaaaccgctggaatagctgctgcttctgttccaggttctcatataccttccagtacccggtgcagagataatctcttccctgatgctcgataaaccctctcacatcctccaccggatagcctaaaagcagtcccatctcatgagggaaatccctgcgctcctgcatgtatctgcggtaacgcatccggaaaacaggaagcaccgcctccaaggaagtatcctgataccccagtttatgcagcatccccacaactggttcctgttccatgtattttttcaggctttctcttcggtataagagcacagccgcttttctgccggttgaaaaaagcacatacatggatattccggtatcccggatcagctcccggacctgacatactccctcacacggaatattgaacagattcgacggctttaagcctgcgattaacggcgcacactgcagtgcaagctgcaattccacatcttttggttccatctgctgcaaaatctcccatgtctcacgactcatgccgatccctcctgtgttatacgatctttctagttagtcttatctaactatctgtatcatatacgacagcgggcatcttgtcaagaatcaaaagaattgtcgcaataagcatagac

SEQ ID NO: 11480 - DNA, 39737 bp, Unknown
  gut microbiota DNA sequence
tgtatggaattgcatttacgattaaaatgagcaaaaaggaagatcatcagattgatggatatttcgattatgtcgtgccgccattagagggattctggtggcaaggggagcggcgtccgggggacgccatgctgcgaaccgaccgagccggcaggcgagacggcgtatccggaattgattatgctcgtaaggaagattttaagtggatttctgttattcgcttgccagattttgttaccagggagaatttcgactgggctgtcaggaaagctacggcaaagaaaaaacaggatttttctaaggttgagtttttttcctatgaggagggattatgtgtacagtgtatgcatatcggagcgtatgacgatgagcctgctacggtagatgcaatgcacagatttatggaagaacagggatatacacttgatataacggatcagaggatgcaccacgagatttatctgagtgatgcgcggagagtggcacctgagaaatggaagactgtggtcaggcatccgataaggagggcttaaaggtatggaatatattagagttacgaaagaaaatcttgaaaaggagcacatttgctgtgccatttccgacaataaagatattcaggtatcatcaaagaaggcatggcttgcggatagatttgatgaaggtcttgtgtttcttaagagcgtagaacgcggcaagtgctttattgagtacatacctgcggagtgtgcatggaatccaatcgaagcacctggttatatgtatattaattgtttgtgggtgtccggttctttcaaaggtcatggatattcaagtgacttactttccaagtgtattgaggacagcagagaaaaggggaaggaaggcctatgtattcttgcggcagcaaggaaaaagccatttctggctgatccgaagtttctaaaatataaaggatttgaagcttgtgatgaggctgataatggaatccagttatggtatctgccatttgaagagaaaactgagccaccggtgttcaaggaatgtgcaaaacaccctcatataaatgaacgtggctatgttctttattatacaaaccaatgtcctttcaatgcaaagtatgtaccaatcttggaagaaaccgctcagaagaatggcattccattcaaggctgtgaagatcgaaagtaggaaggatgctcagaatgtaccaacgccgattacgacttatgcgctattttgtgatggggagtatgttacgaatgagcagatgaatgataagaaattcttaaagctggtgggaagataggagaaaacaacatggcatatgctttactttttttacgatatgatgttgtatcgtattctatttttgagaaaatgcagatggtttccatttcaaaagaggtatggagataaaaagtgtcagaaattcggcatcaggcattgctgaccaaagaccgtatagtccaaacttcactggtaaaatagtaagaaattcttgcatttaagggaggcttggcaatgaacaaggattttggatgctgctgtggctttcttgcagacatgattatgaaatatgcaccagagataaaagatgcatacaacatcgacaccttgcagcaatgtagggtgtttttctattacagaaagttcatcggctcgccaccgtgcaagaggtggacatacttcataaccgtatgcaagaggcaggaatgcaatttttgtcatgggttatgcacttaacctttgtaacacacatatttctgttgtaccatataatcagaatataggaaaagaaggaatacatatggcacaggacagagttcggattgcggatgttgcagattcattaggtcttagtactgcaactgtctcaaaggtgattcacggaaaaacagaaaagatttcggatgagacggtaaaacgcgtccagcaggagctggagaggtcgggatatatcccgaatatggcagctattctacttgccaggaataattcaagaatcatcggagtggtagtgaatgataatgaaaagtatgagggcagggttttagaggatggatttgttatggcttcaataaatgctctctcccatgaggtaaatgaaaaaggatattttctgatgataaaaacgacatctgacatcagtgagattccggtgtttgcatctatgtggaatatggatgggctgattctgatgggtttttgtgaagcggattatgagaaactcagaaatcagatgcggatatcgtttgtagtgtatgatggttattttgaaaaatgttccaaggtggtcaatctggtcatcaatcattatgacggtggttatcaggcaggaagatattttagggagcttggacataaaaaagcgttgtgcataacggacaattttatctgcatgaataaagagcgcatcgaagattttagcgaagcctttggaccgggagaaacattaagatggaaaataccaaggacagaaaaggagagaatgcgtttttatgaggataaatatcaggcgctgttagagaaaaatgttaccgctgtttttgcggtatcagatttctatgcacttgagtttatgaggtttttacagggaaagaacattcggattccaaaggatatccagatcatcggttttgatgacaacatggcaagcagggaaagccatccttctctgacaaccattcatcaggaggcgtcccttagggcagaaactgcaattaagtgtcttgaggcaatgcgtgatggagcagaatgtgagacagaaatcgtgcttccggttgagttaattaagagagaaagtacgagggaattataatgtcgaagtttatgaaatcattgtgtaaaatagcaattccggtcaccttgcaaagtatgctgcaggcatctttttcaattgtagaccagattatgataggacagttaggagagactaatatatcggcagtcggactatgtggaaacttttcgctgattttttccgtggtgattggtgcagtgagtacggttgcggggatactgatcgcacagtttattggtgcggaagatacaaaagaggcctggagcagctttgatgtgagccttattagcggaatggtaatagctacgctgtttttatttgcggcaggagtttttccctcgcagattctggggctgtacacgagggatgtgagtattgtaaatactggtgcggtctatttcaggatagtagcgttttcccatattccaatggcggccggtaatattttatcctcatggctgcgctgcagggagcatgccacaatacctttttgggcgggctttggggcagtcgctgtaaacacaggtcttaattatctgctgatatttggaaaattcggattgccatgtatgggaataaagggagctgcgatcgcgacactgatttcgcagttgtttaatctggcatttattgctgttggatttgccttatgtatcagaaaggatgaagataaaccggtatggtcattgcgtttcagcaaaattactatcaaggattatctgatcatgattatgccgattctggtcagcgaatttttgtggagcctcggacaaaatgtggagtctgccgtctatgggcatctcggaatggcaaatctggcggcatacacacttacctgtctgatacaggggcttattgtaggagcgcttagcggattgtcggcggctgccggtgtgattgtcggcaagagacttggcaggaaagaatacgatgaggcttacacagaatcgaagaaaataatgtatgcaggcttggccggagcggtagccgtatcgatattgcttattcttctggcaggagtatataccgggttgtatcgtgtagatggcagcgtaaaagagcttggaaagatactgcttatggtatttgccctgtatgcaccggtcaaggttgaaaatatgatacttggaggaggtatcataagaagcggcggcaatacaaagattatcatggtgattgatattgttggcacatggtgcatcggaatcccactgtgtctgcttgcagcgtatgtatttaagtgggacatagttggtgtgtacacattgcttaccaccgaagaaatattcaggctggttgtatcgcttgttatttttaagaggcgtaagtggatgatcagtttatcgtagagtgaggtgttggatatggattatataaaagaaaattatatcagcagctggcaattgactattgctgtcaggtttcggatataaaggatgataaaaattattttatggaatatgaaaaactggaaggcaggagatagtttgaagaagcggatgattgtatcttaaaggtaattactgtaaacgaggcatatctcaggaagctgtcgtatgcggcgcagacgtacgctgggggaagtgctgattgattttacggaaaacggcagcagtgcacaggggaatctcatgtatgaggcgaatccgggcggagcaccctgcaatgtgctggcaatgctgcagaagtttggacataagaccgcgatttttctttttaccggaatccgggtgcggatatgatgctgcgcgcggaggaactgcgggagcagatcttaaaggatacccgcatatttcattttggcacgctctcgatgacggatgagccggtgcgaagcgccacaagacatgccattgagaccgcaaaggcaaacggggcgctgctctcctttgatccgaacataagggaaccgctctggcagtccatggaagaggcgaagagacagaccgcttacgggatggaagtgtgcgatgtgctgaaaatatcggacaatgagatccggtggtttaccggcgaggaggatttcgaccgcggagtggataagctttggcgggaatatcatattcccctgattttactgtcgatgggaaccgggggaagccgggtatactgcagcagccgcagaacagaacaacctgcatttatacaggcgggcacgatcgagacgaccggagcgggagacacgttcggtgcatgctgcctgcactatattctggaacacggcgtggcgggacttggcacgacggagctggaggagatgctgcgttttgcaaatgcggcggcatcgattgtcacgacacgacgcggagcgctgcgcgtgatgccggagccggaggaaatacaggaatttcttgtgtaatagggaacttcattcctattacacaaaaaagctccgcggggatgcgcacctcgcggtgaggtaaataatgctttgcataccgcatcaggcagcctgccaaggcaggcgcaagtgtgcggcaagcgcacactttgttccagggaaaagcatttgagcggtgccgtttcagatatcgctctgcagatgttccatcagcttctgggcagcgatgctcttcgggcggcttgtgtcccggataagacagatctcacgttccgggatcggctcgaccagacggatgggaagcacttccccgcgcgcaatcggttcggaggcaagcgcttccggatagaagccgatgccgagattgtgcgcgaccatgggcagaatctgatcggtcgtggaggcttccatgtccggtgaaaatacaagatgatgacttagaaaatactgggaatacaattctctcgtgccggttccggctccgagagagataaaaggaacctccgacaggtcatgcagactctgcatgcgggaggcaatagcggcataggaagaacctccgatcaggatttcgcgaaaggataaaagcgacgtcttgtgaagaggctttttgatgtcgatcggggtcgtcaccacggaaaaatcgacggtgccgtgtgacagggcacggatggcctgcggtgtggaatggttggaaatctgcaggcgcacatgtggataattgtggtggaaaagctctagtttgtttaaaagaaacaggcgcagggccgtctcgcttgcgccgatggtcacaagaccgctctcgagactcttgtcttttaatatctcttgctcccccagcatcagctgttcgttggcgatagcgacatgctcaaagagacgctgcccctccggcgtcagactgacaccgcggttggtgcgcacaagcagtttgcagccgagctcgctctcgagcagattcatgcagcgggagagatttggctggttgttccccagaatctcagcagctttggaaaagctttgatattgtgcaacatagtaaaagatgcggtagtaatccagcgtcatgatctgtgcctccttttatactccttagtatatgataatgatatatccaatatataaaatatactttttacatatctgttttcggtcagtataatacagaaggatcaagaaagcaagagagtttggagtgatacaggtgaaaaagggaaatttcacaggctgcctggcacaggtacttccggaaaagcagatgtcggaagcgtttattaacagtatcttccttgcaatgtctggagggtttcaggatgcatacacctactttaccagagacaaggtgttctccaatgcacagacgggcaatgtggtgttgatgagccagcattttatgatgggagagtggaaggacgggctgaagtatctgctgccgcttctggcattcgcgtttggcgtgctggcggcggagcggatacaggcgcagttccgttttgccaggcggctgcactggcggcagggaattctgctgctggaaattgcaatccttctgattgtcggatttcttccgcagaccctcaacatgacggcgaccattctggtgtcgttctcctgtgcgatgcaggtgcaggcattccggaaggtggacggctattcctatgccagcacgatgtgcatcggcaatctgcggagcggtacggcatcgctttccatgtatttcagggagcgccgccccgagtttttgaagcaggctctttattattttggcatcatcctgtttttcgcactgggcgccggggcaggcggcaacttatcggttcgttacggggtacatgtgatctgggtatcaggcggacttctgatggtgagtgtgctgttaatgttcctggaaaagctgcgtgcatggaacaggtgagaacagacagaaaggggagagtgtgatggcaactatttttccaagggaagaaaaagcggagcagttgtttgagaagattctggaaaatccggatgcgtgtgagagactgaaggatacgttttatgagcactttccggaatcggaggatatggatgcgcagatgccggcggtatcgccacagacctttacgagggcgctgtttcaggcataccagaacaaagatctgtcggcatttctgatggcgatctgcggaaacagcatgtttgatctgctgcgcaactcttttctgatcccgatccggtttaacgacaagggcaagacaaacccgattcttttgaccgatgaccagggaatcttaagagagaagcttccggtgaacgtcccggacaaggtttaccagaagttcagcagaatctatcagcacagggagccgatcccgcagatgcgggaatatctggcgtacggtttccgcgaggagcaccgctacggcgaggaggatctgtcggtggagagcgtggagatcggaagacatctgggaatcctgctgctctatgccatgccggaacatttgcaggagcatctgacggatgcgcaggtgtatgtccatgtatgggacgcgctgatgcggctgcaggatgtgctgccgcgcgcctttatgtattacgggaaaatgcaggtaaacgggcaggagaccggaagcgaggaactgggaattttccttccgctgcgccattttggcgatgcgatggagcgcaacattgagcaggcagacgggattgcgctggggttccgggaagagatggaacgttatgtcagaagtgtctgaaaagggatgagaaacatgaaaaagagtatgccgcgcattggcatgagaattataaaaacatcgatagcggcttttctgatattgttgatttttaccgcggtaggggcaaagcgatcgccgttctacgttctgatcacgacgatcatctgtatccagccggatattgcaaacacaaaggacacggcattcaaccgtgcgatcggaacattgatcggtgcggtcaccggtgcggtggcgatgcttttggaaatgccgctcaagggtctgcccggaggcgaactgtggtgggaccttttaaacgcggtgatgatctgcattaccatttatctgacggtgctgctcggcaaacagtacattgcgttcatggcgtgcgtggcgtatttaagcgttgcggtcatcgcacatgacggagtatcgccgtatgaattcctgttttacagggtggtggataccttcctcggcgtgggaatcggcagcctggttggcagttttcacacacacgggaagaagcgcaacgatgtgctgttcgtggcggagctggatgatgagctgcgcagtgcgcaccggcagatcagcgaatttaacaagacagcattaaatcatatgattgacgagggcgcactttttaccatgattaccagacagacaccggcatctttgattgcggaggtcgagcacttaaagctgcgcctgccggtgatcgcccttgacggagcggttctgtatgatatttatcagaacaggtatctgcatgcatgcctgatggagcacgatatgggaatccgtatccggcagcttttgacggagcagaaccgcgcatttttcaccaatgtcatcgtggatgacgtgtgggtgatttactataacgatctggtggacgaggaccagaaaggatacttaaagaaactccggacttcgccgtaccgcaactatatgaaacgtgcaccgcacgatgaagatcatattttgtatttcagtgttctggacacgcataaccggttgattatgctggagaagcagcttgaggagatgggattcgccgggaagctgaaattcctgttggaggatcacgtattcggggagaagagtcttctcaagattctgtcgattgaggcaagtccgcggaacatgcttgaccggcttatgaagatgctgcatgtgcatcacagtattgtctatggagacaaagactcggagacctgctgcgatgtggcggtggcggacagtgattttaacaggattgtgcagaacatccgcgcagactataccggaagaaaaagaaagacaagagtgtccaagaagctggaggacatccgcaattagaaagagaggcaattattatgttaacatcagtgacgggaattaactggggcgatgaaggaaagggaagaatcgtggatcttctcacagaaaaggcggactatgttgtccgttatcagggaggcaataacgccgggcatacggtggtgacggatcagggaaaatttgtgctgaatctgcttccgtccggtatcctgcatccgacggcagtctgtgtgctgggaaacggtatggtgatcgatccggatcatctgcgccatgagattgcaatgatgcagtatatgaaagtaaaagtggatgcgtcgaaccttaagatttcagataaggcgaccatctgcatgccgttccatgtgagacaggatgtgcttgaggaggagcggctttccaagacgggttccgcattcggatcgacccggagaggcatcgcctacgcctacggagataaatatatgaaaaagacgcttcggatgggcgatctgctggaactggatgcgccgtccgtacagcatcgtttaaaagttatcatcgacagcaagaatctggtgctggagaatgtatacaatcaggagccgctctcctatgatgagattatggagtggtgcagaagccaggcagaatttttcaaagattatatctgcgacgtgggaacattgctcggtgctgctgccggtcaagggaaaaatattctgtttgaggcgcagcttggagcgctccgcgatattgattatggcatttatccgtttacatccagctccaatacaatcgcaagctatgccccgatcggtgccggtattccgggctgcgcgctcgacaacgtggtaggcgtcatgaaagcatattccacatgcgtaggcgagggaccgtttgtagcggagacggcgatgggcgaagcctggaatgaaaaattgcgggagagcggcggagagttcggcgcagcaacaggcagaccgcgccgtgtcggaccgtttgacgctgttgcaagccgttacggcatccggtgccagaaggcgcaggatatcgcactgaccaaactggatgtgctcggagcatttgataaaattccggtaattacgggataccgtctgcacggtgtgctgcttgattctttcccgacggacagcagactcgaggaggcagaaccggtaatcgaggaactgccgggctggggatgcgatatttccggctgcagaagctggaaggatctgccggaaaatgccagaaaatatgtgtgcacattggagaaactcgtggatcatccgatttatctggtatctacgggagcagagagggatgcgtacctgctgcgtgagtgacaagaacgcctgcaagggcattttcgatatccggttttgtttttattacaggggagtgtaatggaaataaacgaaaaggacggggtgacagaaagagtttctgccgccctgtcttttcttatgacagaaaatatgttacattacatatcagtgttagaaacgagagcgataggagcagcggttatgagcagttatctgggatttgtgatcggcggctatcttctgggaagcattttatttgcttatgtgcttccgaagctgacccgccatatcgatatccgggagatgtcggaggacggcaatcccgggacctacaatgcgttctggtacggtggtgtgatctgtggaatctgtgtgctgctgctggaacttttgaagggattttttccggtgtggctgtgcgagcggaccgtcggtctgcaatccctgtggtttgcagcagtaatggcagcgcctgtgctgggacatgcctattccatctatcaccgtggacgcggtggcaaggcgatcgcggtatccttcggggttctcttaggactggtgccggcgggaatctggcaaccgttagcgatgctggtgctgttttatctgctgttttcacttttatttaagatcaaaagccatgcgaggcggagcgttgtgacgtatctgtgttttgcagcgggaacctgtcttacggtggaggagcagtcggttctggtcggaagcctgctgattgccggaacggttatttaccggcacacattcggatgcccgggggaggaaaaaaatgaacgtattgatcttatcatgtaatacaggcggcggtcacaacgcggcggcacgcgcggcggcggaggctttccgtgcgcacggggaggaggcggtggtcctggattatctcaagcttgcgggagagaaagtctcaaggacggtcggtaacgtttatgtggagacggtaaagattgctcctggtctgttcgggcttttatataagatcggcatgcttgtcagccggcttctccgccgttcaccggtctattatgtcaacgggaagatggcagtctatctggcggcgtatctgaagaaacatccggtggacgcgatcgtcatgccgcatctgtatccggcggaaaccattacctatatgaagcgaaagggtatgaagcttccgctcacggtggcggtgatgacggattatacctgtatcccgttctgggaagagacggactgtgactattatatgattccgcacgagagtctgatcccggagattgtgaagcgcgggatcccggaagagaagctggtggtgacgggtattccggtggcggcagcctgcagtgagccgtggagcggtacgccggaagaaagtgctgcggcggatacacatgcgcacagcattgtgcgcaaaaaggcgcagcaggaggcgaaaaaaagtctgggactcgaagaaaaacagcggtatatccttgtggcaggcggcagcatgggagcgggatcgattgaccggctgattccggcgttgctgaggcgcatacaaagggaggaacacctcattctgatctgcggcagcaatcagaaactagagcagcggatgcaggcacgcttcggcagagatgcgagggtgacgatcctgggaagcgtcagcaacatgccggtttatctgcatgcgtgtgacatcatttacacaaaacccggcggactcacctccacggaggccgcagtgacggagattcccattgtccacacaaagccgataccgggatgtgagacaaagaatcggagcttttttgtcaaaaagggaatgagcgtgaccgcatacacggaatatggcctggtcagaaaaggaatgcagctgcttcataatcccgggaagagaaacgcgatgcagagggcgcagcaccggggaatggaaaagcacagtgcggaaaagatatatcagtttgtaaaagcaaagatatagcgggagagaggcatagcagatatgcctctttttatttattaaatttttttaaattgatccgtatactcttgtagaacaatggcattaagctggaagaggctgtacgccgggcgataagggaatgcatcacagagggaatcttaacagattttctgcggaaaaaccgcgcggaggtggaaatggtgagtattctggaatatgataaggaatatgaggagaagaagctgcggcaggcggaatacgaagtgggagaacaggcaggcttgaaaaaaggagagcaggcaggtttgaaaaagggagagcagattggcaggaaccgcggtcttgcacaggggattgtcgagaccggatgtgcctttggcatgccaaaagagatgatactgaaccgcctgcaggaaaagctgcatatttcggcgcagagagcacaggagtattttgcgatgttttccggtcagcagccggtatagcgatcgcagatagaagaaggggctgccgcatgaagcgggcagccccttttgacgtgataagtaacaggaaaaaggattgtcctgtctctggattaagcggtatattttgcaagggttgccgcaacagcgcctgtgcctgcggtaagttcggtaaagtaatcgcataccagcgtatccatgccgagtgcgcacaggtcaacaccccagatctttgcgttggagaggatcggtgcaagcgttttctttgcgtcgaacgcctcgccgagttttacatcggcaacataagaggacgcttctgcaagcatcgggtccgggcttggggtgaatgcattgccgttgtcgtcaacgcccatcaagtagcgcagccatccggcaaatacaagcggaatcagctttaagtcggcaacgttcaaagaaggagctgccgcataggctttgatggtctcgccgaaacggatggccagcttctgggaagtatcggttgcaatacgctgcggtgtgtccggcataaacggattcggaatgcggacatttaacacggtatcgatgaactctttcggatcgagaatgcccggattgatgacaaccggaagtccctctttatatccgatcacttcaacaagcttctttaaagaaggattcttcatctcctcggagattaagttgtagccgagcaggcagccgtaaacagcaagcgcggtgtggagtgggtttaagcaggtgcagaccttcattttctcgactttatcgacggtctcccgtgcggtaaagatcagaccgcccttttccagagccggacgaccgttcgggaagttgtcttcgatgacgagatactggcattcctctgcgttgacaaaaggcgccacataggtgtttttgctggtgacaaccggatccagttcctcgacgccgtccttctttaaaatctcctcgatggaagcgtccgggcgcggggtgatcttatcgatcatcgtccacgggaaagataccttgccggaagtcttcacataagcctcaaatgcctcatcggcaagaccgttctttacccagccctctgcaaatgccgtgatggctgccgcgagcttatctccgttgtgggagcagttatccatgcttaccatggcgatcggcttctcacctgcaaggaaacgtgcatacagaagagatgcgacttttccgatatagctggccggcttttgcggacctgctgccatatctgcggcaactgccggcatgaagctgccgtcagaaccgtagaggttgtaacccttttctgtgatggtaaaagttgccatctgcagggagtccgcggagaaaatctccttcaggcgggagaactgtgcatcgtcctcggaatcgagtgccagagactccatcacactgccgacaacggttttctcaacggtgccgtttgcctttaaagtgacaagaatgctgtagtcgtcatgcggatgattcattttctcgataatttcataatcgtaaccctcggcaacgacaagaccgcggtcaagatctcccttgtttaaaagatcctgtaccacatttgcctggaaggcacggaaaatgttgccggatccgaaatgaatccagaacggattctgctttgttctggcggcaaccgcctctctgtcatactgcggaagtgcgtaaccggcagcttcccatgcgttcttattttctaatcctttgttatttagcttcatagcgtgcagctcctttctcaattgcttcccaaagtccgttcaggtaggtggcgccaagtgcgcggtcataaaggccgtaacccggcatagcgacttcgccccagatcatacgtccgtggtccggacggatcggaccgtcaaaaccgatctcgtagagggcacgcatgatttcatacatatcaaaagtgccgtctgaagagagatgtgcggcttcctcaaagtctgtcgggctgttgaatttcagattgcgcacatgggcaaaatggatacgtccctttaaggaacggatcatatccggcagatcgttctccaggttggttccgtaggaaccggagcagaaagttacaccgttgtgcggattgtcgaccatgctcatcatgcggagaatgtttttcttgttgatgatgatgcgcggaagaccaaatacgctccaggcaggatcgtccggatggattgccatgttgatgtcatacttgtcgcacaccggcatgatgcgctccagaaaatacttcaggttggcaaacaatttttcatcgtcaatgtccttgtacatggcaaaaagctctttgatgtgcgccatgcgctccggctcccagcccggcatgatgctgccgttggtatccccggcgatggactcaaacattttctccggattgagggcatccacagcctcctgggtgtaagcgaggacagtagaaccgtccggacgctttctggcgagttccgtgcgggtccagtcgaaaacaggcatgaagttatagcatacgagatggatatcttcttttccgagattttccagtgtctcaatgtagtgatcgatgtagagatcacggtccggtgcgccggttttgatggcgtcgtggacgttgacgctctcgataccggaaatatgaagtcctgcggcagcaacttccgcctttaatgcggcgatgcgctctctgctccagacctcacccggtgcggtatcgtagagggtggtgatgactccggtcacgcccggaatctgtctgatctgctctaaggtgacggtgtcaaatttggaaccgtaccatcttaaagtcatttccatagtgtgtaacctccgttcttttctgctccgttaaggaagtgtcatattggatgatttcattatataaaatccgcttcaaaagcaaattgaaagacttgttgcatacattgcaaaagttgctatcttccgctataatcagggaagaacttaaaaaaatataagacgaaaaaggaaagcaacggaacgatggcggcatgaagggagtgccggaaggggaaatagcacatgcagaaaaatttacagaccagattcagcaccagacagtacatgctgtcacgcgattttgaattatattattacaacgaacattacacgtcaaaagtggatacgcacacgcacgactattatgagttctatttttttatggagggggacgtctcgattgagattgaggggcagagatacccgctccgctatggggatatggtggtaattcctccgcaccgcaggcaccgtgccgttgtgcacaaccatgcgcaggcataccgccggttcgtgttctgggtcagccgggaatatgccagccggctgatggaactttctccggcatacggctacctgatgcagcgcgcggaagtgtccgggaaaaatgtgtttcacagtgatgtaattacatttaacgccacgcagtttaaaatctttcagctgattgaggagatgcagatggagcgttttgggagggaggcgcggataccgctgctggtcaacgatctgatcctgcacttgaaccggatggtgtacgaggaagaaaatcccgccaaggtaaaggagcaggatctctatcagaatctgatctattatatagaggagcatctggaggaggaactgtcgttggaaaaactggcaggagcctttttcgtgagccgctattatgtggcgcacgtctttaaggagcaggcgggaatctcggttcaccagtatattttaaagaaaaggatgcaggcgtcccgggaggcgattttaggcggtgagaacatcagccaggtgtatgagcggttcgggttccgggactattccagcttttaccgcgcgttccgccgggaatatggcatgtcgccgaaggagtaccgcgaggagcgcctgcggtagccgctgaccggaaaatagggcatgccccgggcggttttcacggagccagccggggagaagtgatctttacggggatttataacagacaatcacattccggagcgaagcagcggggcggagtctgatcacaaaatacggactttctaacccagccgctttcgacaactgcgatgatccgcgtctttccaggcttggagcactccgcgaatgtgtccgcaagccgcagacaattttaggacttacgtgcagcactttgcacaccgatgagcaaaacataaccgcgcgagaccgatgtttgagctgctttctgccttgtttttaatagcagaaagcaacgagtttcggctcgcgcggttttatcatgtctgtgaagaggtgtgcttagtgctgctaggaagtccgctcattgtctgcgggtttgtcggacacattcgcggattgttcaagcgtggcaaagacacggaatgaattgccgaaagcggcagggaagaaactcttgcattttgtttcaaagactccgtcccgctgcttcgctccggaatgatatttcctattataaagcctatttctcccgggcaccggctccgcggaaatcccccggggtcacgccgtattttttccggaattcccggtagaagtaggacaggttgtggaagccggcggacagggaggcgtccagcgggggaagcccgtcctgcccgagcagctcggcagccttctccagacgcaggttcttgatgtaatttaagcaggaggtacccatgaagcgcttgaaaaaacgcatgaaatgatactcactgaaatagcacagggaagccagagcggagatggaaagctcctccgcataatgggcgtcaatatactccagaactgtttttaatttggcggtatattccatgtggagccgtgtgtcctcatccgctgcgctgcagcaggggagaagcagggcaatcaggcgcagaaaatcagccttcagcagcagttcatagcccggtgcggcggcgtcgtgcagggcatccatatcgtcgaacagatcgtctaaggcagtgtgcagcggatgaagggcatcaaagaaaaaaggtgggatcagctttgccgtcgcaagcggcgtcagatactgcacggagcagatatctgcggtgcttgcgccgaggaaatgcatgtgaaaaacataagtctcggtgcaaagcgtctctctgggtgtcacggtgattgcgtgcagcagcgtcggagggataaagatgagatcgcccgcggcaacgtcatagtgctgcagctggatctgataggtgcagctcccggagagaatgcgcgtaaattccgcttcctcgtgccagtgtgcgctgacggacgggtgcatatcgtcgagtgtggtgatatatttttgcagtggaaaaaactgttcaccgtgccgggcgtgttccttttgctccggcgccggaagggatgtcctgttcatgtgcgttctcctgatattaaatagcagtattgtgcaataaaaatgaaaatatagtgcaagatattacggatttctcttattataataacagtatcatacaaaaaggaaaagaaaaactgtattgggaaaaaggagaatgtgcaatgaagaaaaaatggtggcacgataaagtggcatatcagatttatccgaagagctttctggatacgaacggggacggaatcggggatctgcggggaatcatctcgaagctggactatttgaaagagcttggcattgacatcatctggctctctccgatttataaatctccctttgtggatcaggggtatgacatttccgactactacgcgatcgcgcaggaattcggaacgatggaggagtttgacgagctgcttgccgaggcaaaaaagagaggcatgtacattgtgatggatctggtggtgaaccactgttccgaccagcatgaatggttcaaaaaggcgctggcagatccggatggggaatatgcggattacttctactttgtgaaggaaaaagacggcagggagccgagcaattaccgctcgtattttggcggaaatgcgtgggagccggtgccgggaacggacaaatattacctgcacatgttcgcaaaagagcagccggatttaaactgggaaaatcctgtccttcgtcagaagatctacgatatggtgaactggtggctggcgaagggacttgccggattccgcatcgatgcaatcatcaacatcaaaaaagacacggcattcccgtcattcccgccggatggagacgacggacttgcctcctgtgtgaagatggttgaggaagtgcagggagtcggcgtgcttttagaggacttaaaacatgcaacctttgaaaaatgggatgcatttaccgtggcggaagtttttaacatgaaggaggacgaactgccggagttcatcggggatgacgggcatttttccaccatgtttgatttttccgcacatgagctgacctacggagaacacggctggtatgacagcaaaccaatcgaattcaaaaaatggcgcgatacgctgtttgcatcccagttaaaattgcagaaggcgggattcgcggcgaacattatcgagaatcacgacgagccgcgcggagcgagccgctatctgccggagcatgcaagaaatgaagccgggaaaaagatgctgggaaccacatccattctgctccgcggcatcccgtttatctatcagggacaggagatcggcatgacaaattgcatccggaacgacatttcggagtatgacgacatcagcacgaaggatcagtatcaggttgccattgacgcgggctgcagcagggaggaggcactgcgctgctgctacgagaacagcagggacaatgccagaacgccgatgcagtggacggatgatgagaatgccggatttacggacggaacgccgtggctggcaatgaatccgaattaccggcagattaatgtcagggagcaggaggtgcggacggactcagtgcttgcctattaccggagactggtgcatctgcgcaaggcggacgcctacagggaaacattcacctacggtatcttcgagccggcttaccaggaaatggcggatgtatttgcgtattaccgtgtgtccggggagagcggacagcgtatactggtcgcagcaaactttggaacggatgcggtttccctgccgcttgcctatccgtgcaggcaggtattgctgtcgaatctgagagcagagagtgcggtggagacggcatgtgaaaaagcgaacgcgctgacactcgaaagctgtgaagtggcggtaatcgagctgggataggaatccggcgttagtaaccggatcgggatggaagtcagccggcggaagaagtgagccggaataagcgtctgccggcggaagaaatgagccggaaaatgcgtgtggagcggtgcaggaaatttttgcatcgctccattttttatgttatgataagtgcagaaaaacggcggaaacaggcagttttccgtaaaatgaaatgtcgcagcgggcagacagaagcccacacgcaggatgggagattgagatgaaagagagcatagattgtccgaagctcgttgagcagtcgaaaaaggtacagaaggggcagcactggctggtggaattgctggtgtttgtgacggtgtacatcattgcggcatttggagagatgctgattctgctaccgggagagcttgtgctgctgaatacgaacacggcatatcaggatgcagctgcctccggggatatggaacagctgtcggaggtgtcgacgcagattgcgggttcggatgcctacgcggtgttaaagcttttttccggaattgccatgcttctggtggtcgtcttattctgcaggaagttccagaagcgcagctttgagatgatcggttttgtgaaggagcacgcgctgcgggaatatgccattggactgggacttggggtggtatttgcggtagtcacggggggtatcgcggtggcagcgggaaaagcgaagctgtttaccggaacggcgccggggatgctggtgctgtttctcctgggatatctgatccaggggatggcggaggagcttttgtaccgcagttacctgatggtaacgatcgcgcggcgctattcgatgacggtggcggtgcttatcagtgcggtgatcggtgcgcttccgtacgcggcgggagccgtggaggcgccgcttgcatttttaaacggtatgctgttcggtattttcgcggcgctttatctgatccggcgcggaaatatatggggaatcggagcgtttcacgcggcgtggagttttgtgcgtgacattgtttttgggacaccggatcaggtggcgacagtggtggtgctgcttgtcggaatgatacttgttggaggaaaaagaccatgggggaaagcggaatcctgctgctgattttcctgctgcttctcggagcgatactggcggtcagcatcgttttgatccggaaggcagaacgtgagagggatgaggcgctgcagcatgtcgcggatgcaaggacggattttctctcccgcatcagcaatgacatcaagacgccgatgaacgtgatcatgggaatgacggcggtcggacttgaagagtcggatcacccggagaagatggtggaatgtcttggaaaaattgatacggcgagccggtttctgatggggcttttgaatgatctcgtggatgtttccatgattgaactgggaagattccggctgcatccgaagccgtatgcgctcgaggattttatggaagccatccgggacatgacagagccggagtgcgccaaaaaggggatcacattttacatgtccggaggcgagaacaatctgaatgtcatggtggatccgatccggctggagcagctcttttttaatctgctggggaacgcggtcaagttcacgccggaggggggagagatctactttcgggtatgcaattatgcggttcacagcggtactttttctgcggattatgttgtcgcggacaccggaatcggcatgagcagggagtttcagaaactgctgtttgagccgtttacgcaggaaagacgggatgaggcggaacggcggcacggcagcggactggggctggcaattacacagaatattgtgcagcagttgggcggaagtattgcagtcacgagcgcgatcggcgagggcacgaaggtgaaggtgcatctggatcttccgctcgcggatattcagccgcagaaggaagtggcaagaggcgggggttccagacaggcgtttgccgcgctcgaggggaagcgggtgcttctcgcggaggatcatccgctcaatgttgagattacgcggaagcttttggagcgccggggcgtggaagtcgtctgtgcggaagatggacggcaggcgctggagctttttatggagagggaagtgcattatttcgatgcgatcctgatggatattgtgatgccgaagatggacggctttgaggcggcaaggcagatcagacgggtgccgcacaaggatgcgcagatgattccgattatcgcaatgagcgcgaaggacgcgcgcgaggatatggatgcctgtaaggaagccggaatgaacgactatcttgcaaagccggtggagccgcagagactgtaccaggtgcttgcggaatatcttgagaatccgatgtgagtttttggacagattgccgaaacggtcagatgtaaaataaaaataaatgacgtgtattgacttttaaaaagaagttgatatattagtgtattagtactaaggatatactaaaaataaacgaaaggaataataatcccatgatatcacaagagagtatgatgaagaagaaattggaaaacatgcatttaaaggaaagaatagactacggatatagaaaagccattacaatgatgttgatctctggtctgctttctgttgtaattataggtatattgtttgccaatatgatgcattatgttgagaatgttaatgtagcagaccaggcagtaaaaatctgcaggattaacgttaatgctgcagcaagaaatatcagagagatggcattaaatgaagatacctcctcttacgataactatgaacaaacagtaaaaagactgctttcagaagttgattctgaactgcagattttaaagaaaacagaagtcctttccgatgaaaattacgaggaatatgcaacggctctttctgactggggagaaattggttattccattatagaagaaataaaaaacggaaacgatgagaatgccacagatgcaattcttaataattgtaccccggctttaaataaagtagtagaaattgcgataaaattagatgaactgacagatgaggcaagtagcgagacagtcagaaatatggtagtctgtacggttgcaggatttgtagtgattattgtctgcctggtttttgcatttactttgacgcggaaaacaagtaagagagtacttgaaacaattctggagccattacatgcgattgaggacgttgcaatggaattaacagaagggaatctgcacagtacgctggaatatcattccgatgatgagatcggaaaactggcacacagtatgcggaaatcaattcgtatactgggaacctatgtagatgatattgaccgctccatgaagctcttttcagaaggaaattttgatgttcatcctgaggtggagtggagaggtgattttgtcggtattttaaattcgtttatggcatttcaggcaagtatggcaggtacgatcaaaggaatccagaatgtttccaatgaagtttccggcgcagcagagcaggtggcatcaagctccaatgatcttgcagatggagctacaaatcaggctgcggtagtagaggagcttaccgcaactgttacaggtgtttcagaacaggtggaaaaaaattcacagtctgccaaagaaatcagtgtaaaagtggatgaacttggaaatgccatttcagaaagtaatggcaagatgcatgaaatggttgattccatgcatgagatcagcgaggcatcaaaggagattgataagattatcacgacaatcaacgaaattgcatcccagacaaatctgctggcactgaatgcttccattgaggctgcaagagcgggagaggctggaaagggatttgcagttgtggcaaatcaggtaaacgtattggcagatcagagcgcccaggcggcaaaggaatctgcgactctgattgaaacctctgtgaaagctgtggaaaagggaatggtgattgcgggacagactgcggcacaattagaagaggttgctgagaactccaaagtaattacgaccgaagttacaaatattgcagagacgttggagacacagacgacagaaattaagcagattaatgagggaattgagcagatcaatgatgtcgtacagacaaattctgcaacatcagaggaatgcgcggctgccagccaggagatgagcagtgaggcggaaagtctgcgtgaaatgatccgcaaattcaaagttgcagaagataaaaaaacggtgtaacaggtactgttttaaaaaacatatagaaacaaaaagcgcacccctgcttcttcgtaatggaagaggcaggggtgctggcatgtggaagacatctgctgtcagccagaggacgtgggaatcagtccgttccagaagaacacaggattttctacggtactcatatgtaagaatcatccggttccgtaagtgttatcgcgttatttgtaagtgatatatgtgcaatatttacaaaaaacgtggaaagattgcaaaataattaacatctatagacaaaaaaatgaaaaagtaggataataaaagaaataactatcaggaaggagtcggatgggtatgaaaaatgtgagcgtgcgttggaagatgattattcttgcgctgattacgctgattggaacactggcgatcggagttctggcagtgaaccggatgctggttatggagaagggatcagagagcgttctccgtacaagtattgaagaggattatgatgagaatatcaagaatcaggtggataatgcaatttccatgctggatgcggtgtatgcgggctatgaaaacggcgactattcctatgaggaggccgaaacgcgcggagcggatcttttaagggaactccggtatggagacggtggttatttctgggcggatacctatgacggagacaatgttgttctgctcggaagcgagaccgagggaacaaaccgtatggagacaaaggatgcggacggttaccagatggtaaaagagattatacgtgtcggacaggagccggacggcggttatacagattatgtattcccgaaggaaggggagacggagtcctctccgaagcgctcctacagcagggcatttgagccgtttggatgggttgttggaacgggcaattatatcgattatattgatgagactgttgccaaagagacacaggcaatgaaggagaatgtaaaaagtgcactgcttgcgattatcggaatgggaagttttctggttgtgattgttatggcggtctgtctttatatggcgttttcactgagcaaatcatttcaggttgcactcacgtacatcggttatattacaaagggtgatttttcgcagccgctgccggtacagcttgagaaccgcagggacgactttggtattctcggcgagcgccttgagaatatgaagtgccagatcagagatcttatcagagaagtgaaaaatgagagttatgtaatcggggaggtcgtcgatacggtcaagacgaatgtgattacgctgaacggcaatatcgaggacgtttccgcaacgacagaggaacttgctgcaagcatggaggagaccgcggcatcctcggatacgattaagagcatgtctcttgagattgaagaggcagcaaaaaatattgcaaatcgttcgcaggatggggcacagcaggcagcagatatacacgagcgggcatcaaaggcacagaacgataccagagaacagcgtgagcatgcgagccggatccacaatgagatacgggagagccttacaaaggcacttgaggctgcaaaggtagttcagcagatcgaagtgttatcatcggcgatcatggagattacaaaccagacaaacctgcttgcgttaaatgcttcgattgaagcagcacgcgccggggaggcaggcaaaggatttgccgttgtggcaacagaaattggcggacttgcagatcagtccaagcagactgttacccagatacagaaggtgacggaggaagttacgacttctgtcgcacagctttcttccgatgcggagcagctgcttgcatttgtgggaaatgatgtcgtggcaagctatgacatgttcgatgcggtggctgatgcatacaaccaggatgcaggaaagattgatgcactgatcagcgatttcagcgcgacatcggaggaactgctggcatcaatcgatggagtgctggatgcgatggagggaattgcaacggcaaccaacgaaggtgcaaaaggaacgacagatattgcacaaaagaccgtggaagtcaaatccgaggcggatacggtcacagatgaagttggcagatgcgatcagacggcacagcgtctgacacaggatatctcagtctttgttgtggattagaaaacagttcattttatgggaaagatatgatataattcattttagcgacatcggagcataggaaaggatacttataagatggacgagaaaatgacaatggagatcaccaacgatagattagaggaagcgattaagcagtatgcggcggagcgcaccaaggagaaccttaccacggtgttaaacctgcttcgtccgaccaagctgtatgtgccggcaatgcttaaggcgccggatcagccgaccccgtgtttcctcaagaacaacaagggcgagcagttttttgtggcatatacttccaaggagcagatgccggaggagccgaagagccaggcacttcttttcatgccgttcccggcgtgcaacaacatcgtcgtgaagccggaactggagctgaccgggctggtcatcaatccgttctcggataaccttgtattaaagaccgaacttgtacggaagctgcatgaggcagatcagaaggcggcacagatgcggcaggtgaagatgacaccgcagcagtttaacgtgtttgtgaaaaagcaggtggagtttggagttctgccgaagcgcctgtatgcagagggagagacgtttgtccagaagctctgtgaggagcgcgaggcgttcgtgaaccagatttttgccgagacgtataaggagccgaagctctatccgtacacagaggcagactattcggttatggcgcttgacattgcggaggatctgacactgatccgcgtggatctgccggagaaagcactggcagccccgctttgctatcgtatctatattacgtttaatccgcagacgaagaaagcgggttactacacgattgagatgacggcggagaaggaagtgcgcgcattgggacagatcctgccggatggcaggcatgagagtctgggcgaggcgccggttgagggagcggagcttcagaagatcatggatctggcacgttatgatggcacagagatgacaagctaaggcataccgaagcgaaggcatatatgtcatatcgaaacgaaggcatacataaagatacaataagagacgcatgtccggcgggaatcggggtgcgtctttttatggagaaggaagcgcattatttcgatgcgatcctgatggatattgtgatgccgaagatggacggctttgaggcggcaaggcagatccgacgggtgtcgcacaaggatgcgtagatgattccgattattgcgatgagtgcaaaagatgcacgcgaggatatggatgcctgtaaggaagccggaatgaacgactatcttgcaaagccggtagagctgcagcggttatatcaggtgctggcggaataccttgagaatccgatgtgagttttttgacaaaacgctgaaattgtcaaatgcaaaatctgaaattcggttgcgtttcctttttgacatagttataataatgtcagaaagaaattacacggtattttgcatacaattctatagtgtgagccaagagtgaaagagcaggccgggaataacagaaatgttactctgtcggtgtgctttttttcataggaaattacgccctatgaagaaataaagaatgtgcagcttgcgggattttttgacttccgctatgggaaatatcattatggaaatgatgcgccaggaatgccatgatgcggcaggggagaatggggggagtgcagacaaaagatgaagcagcaattttatgacgcgattgtggacggaccgattatcgcggcggtgaaggacgagacgggggtggaggtctgtatacagaatgatatccgcgtggtattcattttgtatggagagttgattaccatcccggatatcgtgcagcggttaaaagatgccggaaagtttgtcattgtacatctggatctgatcggggggcttgcggtcagggaggaagcggtgcgttttatacggtatgggacggcggcggacggtattatttccacaaagccggaaatgatccgttatgcgaaggagctggatctctgtacggtatttcgcatatttgcgattgattccaaggcgattggaggactggaacaccacggtatggagtttgcagatctaatcgaggtgctgccgggcattatgcctaaaatcataaagcatatagcagggcaggcagcagtaccggtgatcgcaggaggtctgatctcggagaaggaggacgtcatgcgggcactggatgcgggagcgattgcgatttcaacgacaaaccaggcagtgtggaaaatgtaacggatacagtgtatcaggagaagggggtacgggtatgtgttattcaactaagaaaaaaattgcggattgtgtcaggcagctgatgaagcgcaaggagatatccaaaattacgatcggggacatcatggaggcaacggggatgagccgccagagtttttattatcattttaaggatatttatgatgtgctggagtggatcggctgtaatgactttaaggatcagctgcagggacagtatgacagtatggaaaagtgggcatgcgatctgatggaggtgctgcagagggagcgcagcttttatgagaagctggcgaacgagctcgcgtggccgatgatcgtgcgtggtgtacgcatggcgttggatgcgcaggtgcgccgtctgctgcttggcgagaatccgggcatgtttgaaaagcatcccgaggaactggaggcggtgacgagctttctttccacatccatctgctactatatgattgattttgtatattacagaaaaacgttatcgggggaacaggtaaagcgggatgtgcagtttatgatgcgggcgattgcaaaaccggacgcggggcttgccgtattgctcccgcgcaccgcagtattgtaatgctattctgacaaaattaaaaagtaccggtaagctggtctggcttaccggcacttttttacttttgcagctgcatctgcggttctaagagagaacttctttggtggcgatcaggtcgacgccggttcctgcaatatctttcagcaggatatctccgatgtgtaccggagccgtcaccgtcagcgcgttgatatatttcatgatctcgaagatcttttctttgggaatatcctgtgcggtcttgacggataccatcgggatggagccgccgcggacacagacggtgcttgtgacgatgcgcgtcggatgtgtgacttcctttgcggcatagtcagagccgcgcttgcaggtatttccggtgatggagacaacatttccgccatccatggtaactgtgatggcacagcccagcgggcagccgatgcatgtaagatttcttgtttccatgtgttacgcctcctcttctattttgatggtaatgtgatccaggtcactcattgcttccagaacggacttctgcagttttacctgctccatctcgccgggagccatgacaggacgcttgcggcagatgatccgctggtcgtttaagtaggtggaaatataacagttcttgtatacaccgccgacgcggaaacgcacggtcagctcgtcgtccatattggcgacatgcagcgtttttggaacggtatagcggacgccgtcggttgcgacgatggggatctctttgccggaatcagcatgatcgcccccgcacttgatatattttgcggcgttctttccggcaacgccggcttcctcggatacatagtccacgagatcatgaacgtgaagaacattaccgcaggcgaaaacgcccggaatatttgtctcaaggctttcgttgacagaaggaccggaggtgaccggatttagctcgacgcccatagagcgggaaatctcattttccggaatcagaccgcaggagagcagcagtgtgtcgcattcgtagtcttcctccgtgccgggaatcggcttgttgtgttcatccacctgtgccagtgtgattccctccacgcgctctttgccgcggatgtcaacgacagtatggctcagctttaacggaataccgaaatcgtccagacactgtacaatgtttcgtttcagaccgccggaataaggcatcagctcggcgacgactttgacttcggcgccctctaaggtcatacggcgtgccatgatgaggccgatgtctccggagccgaggatcacaaccttgcgtcccggcataaagccctcgatgttcaccaggcgctgcgcggttccggcagagtagatgcctgcaggacggtagcccgggatatttaaagctccgcgggaacgctcgcggcagcccatggcaagaatcacggtctttgcgttaatgtggaacagcccgtcggtgcggttcatagccgtcacgatcttatcggaagagccttctgccagagaaatatccatcaccatcgtgttcagacggtattcgatgttcagatcgagagcctgattgataaagcgtctggcatattccgggccggtcagctcctccttaaaggtgtgaaggccgaaaccgttgtggatgcactgatttaagatgccgccgagttcgcggtcgcgctcgagaatcaggatccggtcgatgccgttatttttggcggaaacggctgccgcaagaccggcgggacctccgccgacgatcacaatatcatatgaagtcataataatcctcctttttccttcaggttctgtctttgctcagaccgacgaccatgttggatgagccgccgtttttcgtgatttcaagctgggagataccaagctcacgcgccaggatttccatggtgcgcggcgagcagaaacctgcctggcagcgtcccatgcctgcacgggtacggcgcttgacgccgtctaatgaccgtgcgccaagcggacggtgaatggcgtctaagatttctccctcggtaatcatctcacagcggcagataatatttccgtaagctggattttcgcggataagcgccgcataatcttcctcggagagtgttttcggattgagaacgcccttccggctgccgttccatgctgggtttttctgtgcgtgaagcagtccggatacaatctgcgctacgcgctcgccgatcgccggggaactggtgagtcccggagattcgatgccggagcagtcgacaaagtgtggagcatccgccaactcttcaataatgaattcatggttgtcctcatgggcgcggtttccggcgaaggacgtgattacctgacggaccggaacggaaggcacggagcgtcttgctgcgctgcagacatggtcaagtccctggcgggtggtgttggttgcctccttatcgtcgtgatcgtctgcggtagggccgatcagcgtattgccgtgaaccgtcggtgttacaagaatgcccttgccgtatttgcccggaagctggaagatggtcttgtcgaccagaccgccggttgttttgtcgagcaggcagtattcgccgcggcgcggggtaatgtggatcttcttgctgctgaccatgttgtgaaaaacatctgcatacacaccggcagcgtttaccacgcagcgggtcaggatgtaaccgcggttggtggagagttgatagccgtcgtccttgcggcagatgtctgtcacttctgtgttaaaatggaattcgacgccgtttgtggcagcattttctgcgagtgcaatgttcaaaccgaacgggcagacaatgccgccggtcggacagtagatggcagcgacgacttcctcggagaggttcggctccatctcatgaacttcgtgtgcatctaagatccggatatccgggattttgttggcaatgccctgctcgtagagggcttccagcttcgggcggtcctcctcggagaagcagacgatcagggaaccgtttctgcggaattcaaaatccagctctttggagagcggttccatcagttcatttccccggacgttcatctctgccatcagggttccgggtttacagtcgataccggagtggacgatggcgctgttggctttggaagtgccgcagcagacgtcctcctctttttccacaacacaaatggagagattgtatctggaaagttcacgtgcacaggcgcttccagagacgccggcaccaatgatcactacatcatacatagtttttcctccttaaaagagccatgcagatcagacatcatttctgatgtgctttctgcctggctctcttctctgacattcaatctatagttttaaaaaataagtccatataccagtacggcagccaatgcgccgaggatcggtccgacgatcggaacaacgagtccgtatccgaaatcagaggaaccttttccctgaatcggaagcactgcatgtgcaagacgaggacccagatctcttgccggattgattgcatatccggtcagaccgcccagagacataccgacagatacgataatagcgaatacgagaaattttccggtgccgtccgccagatccggaacctgtgccagacccttgatggcaaatacgagtacaaaagtgccgacagcctcgcttaagatattgcgcgggatgttgcgcactgcaggtgccgtacagaacacgccgcgcttggttgccgcgtcttccgttgcgtcaaactgatctttgaacagcagatatacaaggcatgcgccgcagaaagcaccagccagctgtgccacaatatatcccggtaccatgctccatgcaaaactgccgtcagcagcaagcgcgatggtcaatgcagggttaaagcttgcgccggatgccgcgccgaagataaaggcgggaaccagtacggcaagaccccaggcaagtgtgatctggactgcaccggcacctttcatgccggatttgttcaggttgacattggcaacaacaccgtcacctaacaggatgaggatcatggtgccgacaaactctgcaatatatggtgtcataataaataccccctcttagatatgaaattgtgtgttagtcttccttcgcccagttgaacgaataagtaacggctttcttccacatgcggactttcttgttacgctcctcgtcggtaatctccggtgtgaaggtgcggtcgattgcccagttctgaagaacatcctctttgcttgcccagtagccgactgccagtccggcgagataggcagcacccatggctgtggtctccacgcacatcggacggttgaccggagcattgctgatgtccgcctgcatctgcatgagcagattgtttgcgcttgctccgccgtctacctttaatgctgcaagatcaataccggaatctgctttcattgcagccaatacatcattaacctggtaagcgagagactctaaggttgcacggataatatggtatttattcacaccgcgggtaatgcctacgatagttccacgtgcgtattgatcccagtacggggcaccaagaccggtgaaagcaggcacgacgtagcagccgttggtgtctttgacttttcttgccatgtattcggaatccggagaggaatcgatgaagcgcatctcatcgcgaagccactggatggaggcacctgcaacgaagatggaaccctcgagtgcgtagtttacttttccgtcgagaccccatgcgatcgtggtaaccagtccgttcttggagaatacaggtttttcgccggtgttcataagtaagaaacagccggttccgtaagtattttttgcctcaccggcggtgaaacaggtctgaccgaacagagcggcctgttggtcaccggcagcaccggcaatcggaatcgggcctccgaagaataccgggtttgcttcgccgtacacgcagctggatggcttcggttccggcagcatacattttggaatattcagttcttttaaaatatcttcatcccactccagggtattgatgttgaacatcaaggttctggaagcgttggagtaatcagttacgtgaacctgaccctgtgtcagtttccagatcagccatgtctccacggttccgaagagcagctcgcctctctcggctctctctctggcgccttcaacgttgtcgagcagccattttaatttcgttccggagaagtaggcgtcgattaccagtcctgtcttctggcggaaggtatcaaccagtcccttggcttttaaggaatcgcagtattcggaagtacggcggcactgccatacgatcgcgtgatgaatcggttcgccggtgttcttatcccatacgatggtggtctcgcgctgattggtaattccgattgccccgatatcggctgcagtcgcgcccacatttgccattgcctccttggcaacttcaagctgtgtggaccagatctcctccgcgtcgtgctctacccagcccggcttcgggaaatactgtgtaaattctttctgggcaacgctgcacatttcacccttctcattgaaaagtatgcagcggttgctggtggttccggcatcgagtgccatgatgtactttgccatgtaaagtccctccattttcttagtgtggaaaccggccccacccggttcccctctggttgtatgagtggcggtctgatgtgccgctcaccgtttgtggctttagtgtaactgcgttgcgggtgaatgtctttagacagaattctgtgattgtaaaagaggagtcctgcgtttttacatatatgcaatattgacaaaaaacatgaatagattgctaaattattaacaaatatagacaattagtggggaatatacgataataaaagaagtaagcacaggaaggagtcggataggtatgaaaaatgtgagtgtacgttagaagatgattattctggcactgatcacactgatcggaacactggcgatcggaattctgtcagtaaaccggattctgattatggagaggggttcagagagtgttctccgcgcaagtatcgaagaagattacgatgagaatattaagaatcaggtagataatgcgatttccatgctggatgcggtgtatgcaggctatgagaatggtgattattcctatgaggaagcggaaacacaacgaaggcatacataaagatacaataagagacgcatgtccggcgggaaccgggggtgcgtctttttatttcataggaaatactgtgacacattcatgtgtaaaagtagaaccttcctatgaaataaaaaacgctccgcgaggatgcgcagctcgcggtaaggaaaatatcgctttgcgaaccgctcgcgcgcgtagaatctcgcaagcgagattctttttcatgtaacttgagccgcaatacaacgcagcattgatttacagaggagaaggcgcctgttacaataaatgcatcagacgatcgttgataataaagagatgaggagataagagagtatgtatcaggaattttcagagacgatcagccgggcaagacaggatcgggggatgacacaggaagcgtttgcgacacggcttggcgtgatgccgcaggcggtcagcagatgggagcggggaaacggactgccggatgtcacaatgctgcagggaatctgcgaggtgctgcacatcaatgccaatgaactgctgggacttgccggctgggaaatggtggaaaatcacgattcttccatggcgcaggagatccgggagaatctgatcgcggaaccgctctgcatcgagttcgggagcggatggattccatgtttttccgagggattgcagacggactatgtaaacttgtgccggaaaaatcttgcacgacggaccgggatgctgatgccggtgataaggatccgggacaatatcagcctgccggaacttggaatgcgaatcaaagtatatgatgagattgtctttgagcgggaatacgatgaaattgcagagaatgcttatgagaaaatcatcgatcaggcgacggcggtatgcgaagcgcactatgccagaatcctcaacaaacagttggtaaaagtgcttgtcgagaatgtcagggaacagtatccgggggcggcggacgacctgattccggagaaaatctcctattatcaggtcttaaaacgcctcagatctgtcgtcacacagcaggggcagatacgtgatctgctgcacatcttagaggagatggaagaagaacttactcatgccggatgacgtcggcatactggccgcgcaccacggtaagcagggaatccggattgaccgtgatggaggtgccgatgcgtccgccgctgatgtagatcttgtcaaaagccgcagcgctctcgtgcacgatggtcgggaactgctttttcatgcccagaggagagcagccgccgcggacataacccgtgatggcagtgatgtctttgacgtgaatcatctccacggatttttcgccgacggctctggcggcggcttttaagtccacctcgtccgcaatggggatggcgaacacatagtattgcctgctttttccctgcatcaccagagtcttgaaggactgttccaccggggcgccggtcgcctcggcggtgtgcagtccgtcgataaattctccacactcataatttaaaatttcgtacggaatcttatttttatcaagaatgcgcatagcattcgtctttacttcttttcccataaaatattcactcctttgtttctttccggaaaatatgtcctgtgaaggaaaacgctccgcgtggattgcactgcggcgggacatatgattcattgtgcccatagtctagtggaattgtgaaaaaaagtcaagcgggacagatcgggctgaatgggaatagacaaagccgccgcattgtttcttgaaactgtggtttgaatagagtataatgcagaaaaagtgacagagaggtatgtaatatgaaagaaacattaaagcggatcaaggcagacatcatagtctcggcgctgctttgtattgcacttggcattgtgcttctggtatggccggcggagacgattgatgttttctgtaaaatccttgccgttggcttgatcattatgggaggcgtcgacatcgcatcctattttatgaaccgcagtattcatccgtttgcgggagcattgggactgattgtattgttaatcggaatctggattttcctgcgcccggagagcattgtgagcctgatcccgattgtgatcggcgtgatcctctgcgtacatggaatccaggatctgaagcttgcgatagaaacgaagcgcaacggttatgagaaatggtggagcatgttaatcattgcagcggtcagcctggtgttcggtgtgctctgtatcgtgaatgcgttcggcatggtaaagctggcactgcagtttatcggaattgccctgatctatgacggtatctcggatctgtgggtggcaaaccgcgccgtgcatgcggcaaagatgatgaagcaggaagcggaagccgtggatgtagactataaagagatataagatagcgtctcttccacgtttggacaatccaacgggtgcatgtccggcacaccggagacaatgggcggactttttagatttgttaagagatgtcaacacaatttttaattttttttgcataagaaataggcctgattattcaggcttttttcttatgcaactatgctatattcttatatatttccatcactcttgcataatagatttgcaaaaacttatttaaaccggctattttggcttgtttcctactttttccttcattctcttttttaattataaaactcaaacttcgcacataaattttagctatgcaccttgaaaattcaatatctggcagttattcagttgtcagtgttcagcctttatgcagcctgcagtcgtattttcatcatagtaggaagtgcatccataaatgcattcgccaattcattgattttttcgtctgaaagttcagtgttatctgaaagcattgttctgaacatttgaagcagcatttgaaaagcctgtatccatgtgatatcagacatttcgtcagaaaagtataaaaagagctccccaagtgaccggttatcattggattcccggctttccagtgacagcatcatatatcgggtgaaaacaactgcggtatgcacagtcattgcatcataggacagagaattacattctctgctcaagttaaggtagcttttgcaaaattaggtgtgttttttcctgtaagcagactcatatacatacttctgttggagaaaatcagcagaaacatgtattgaaaaatctccgttaccggagtgcctttccttttataggcattggcagctttcaaggctgaggaaatatgaaaccttgtaaaaaatcgtttgatagatttagaaatctgcttatcattttgaggcgcttgtgttatacttttattcatagcatgaatctccggtttgtaattgtttttttggcaactcaattataccaaaaccattggtttcatgctatttttatgccagttattattgaattttcaaggtgcataggcacattttaatgtgcgaagtttgagtaatttaatactttagtaatagatttttccaataaagtatgctatcttagtactatatatggatagatatacgtgataaaaagaacaataatttacaaaggaagggaaaactatcatggaaaagatcaaaaagcgtataactaacttaaaggttgcaggaaaattaaaagtatatcgaatgacagtgcttgttatgacattatttttagtattggtggcactgatctcgacattagtgatccgtttaaatatagagaagatcacggaggtctggtctccgtcattggaatatctgcaggatttagagacaatgactgcgaaatacagaatcaaacagtatcagcatctagtagaatcagatgcagcagtcatgaactcctgcgaagaagaaatcacgaagctggagagtcagatcgaggataccggtgcgaagctggatgcaataatttctgcagacagcaaagctcaaaaaggacgggatgattatgatgtagcaaacgctgcatgggaaaaatacagggctgcttcagatgaaattctgcagttgagccgtgaaggtaaacagcaggaagcatcgaagctgatgaccggagaggtgtatgaagaatataaggcttttgctgagaaattaactacattatgtgaaaagttccaggtagaattagatcaggcaaagaccatggctaatgtatgcactgtaatcatatttattgtgatcgtggcagcgggtcttgcgattgctgtagtgacgacactgatcggaaggatcattaccaattccattacagagccggtagaacagatagaggcagcagttgccagcctgcgtaagggcgaactgtctaatgtagaaatgcttacctatgagtctgaggatgagtttggcgataccatcaggaatctgaaagaagccatgggtattctggcagattatgtcagcgagatctctgtggaggtaaaggcaatagcgcagggtgacctgaccagaaatggtgat

SEQ ID NO: 11481 - DNA, 35784 bp, Unknown
  gut microbiota DNA sequence
ggatctgcctgatatgaataaggaaatcagacggtgaggagcactatgaagaatctattagagttgagagatgagattgatgtcattgacaagcagattgttgcgctgtatcagcagcggatgcagattgcgggcgaggtggcggaatataagatagagacgggcaaaaaagtttttgacaaagaccgtgaaatggaaaagcttgcgacgctttcggcgcttggcgacagcgcgttcaaccggcatggaatccgggagctgtttgagcagatcatgtcgatcagcagaaagcgtcagtatcagctgatgacggagcacggcatatatgaaaagccggattttgaagagctggatgcgctggattataaaaatgcgcgtattgtctttcaggggacggagggcgcctacacgcagctcgcgttaaagcagtatttcggtgaggatgcggggaacagctatcatgtggagacctggagggacgccatggaggcgatcgccagtggggacgcggattatgcggtgctgccgattgagaattcatctgcagggattgtctctgagaattatgatctcatggtggagtatggacactgcatcgtgggcgagcagattatcaagatcgaacatgccctgctcggtgtgccgggagcgaagctttccgatatcacggatgtatactcgcatccgcaggcactgatgcagtgtgcgagatacttagaagggcatcgggagtgggagaagcacagcttaaaaaataccgcgatggcggcacagaaagtcagggaggacggtatgcggcacaaagctgccattgcaagccgtcttacggcggagatctacggtcttgatgtactggaggaaggcattcaggacaacaagcagaatgcaaccagattcatcatcgtgacgggaaagcatgtgtttaccagaaaggcgaataagatcagtatctgctttgagggagcgcatgagaccggttctctctaccacatgctgtcccatctgatctataacgggatcaacatggatcacatcgagtccagaccgctgccggagcgcaactgggaataccggttctttgtagactttgaggggaatctgaacgatccggcggtgcagaatgcactgcggggattgtcggaagagacgaccagactgcagattctggggaattacgaagcgtaaagtgaggaatgtgggaagatgaagacaacgaagaatctgatcctctacagggattttgaaaacgagcagttattctatgactttacctgggtcatggagaactatcagaatgaatactataataaagaagatgttgagggattattctatgaatgcctcaaaaaactgatggagcttgcggtcagccacggattttccggcaatctctggcacaattttctggcttttttgcttgtgaataacgagaatgcatacagcagggcgtgcgagatccgcggggaggtaaaaggctccatcaacgaggtggcgcggcacgattttgccatcatgaaagagttgtttgactttgacctttcggtgctcggcaactatttttccgtggactgcatggacgcattgctgcactatgaggagaccgcggacgcgggaaaattgttcaacaagcggatcagagaccggatcgcagagctctgccgtcatctggaggcagcggcggatgcagaagaatttaaacaggcggtcacggcattttacggggaattcggagtcggaaaactgggtctgcacaaggcattccgcgtcagacacacagatgacggggcacagattattccgatcaccaatatcgcgcatgtaaagctggatgatctggtcggctacgagcttgcaaagcagaagctggtcgacaatacggaggcgtttgtgagcgggaaggaagccaacaactgtctgctgtacggtgatgcgggaaccggaaagtccacaagcatcaaggcgatcgccaaccagtattacgacagaggcctccgcctgattgaggtttacaagcatcagttctgtgacctgaatgatgtgattgaacagatcaagaaccgcaactacaagtttatcatctatatggacgatctttcgttcgaggaatttgagattgaatataagtatctgaaggcagtcattgagggcggtctggagaaaaagccggacaatgtgttaatttatgcgacctctaaccgcagacatctgatccgtgagaagttctcggacaaggaagaggtgcgggaggatatgcacacttccgacacggtgcaggaaaagctttcactttatgcgcggttcggcgtgacgatctattacggcgcgccggataagaaggagttccagaagattgtcacgacgctcgcggagaaatatggcgtgcggatggagcaggaggcgctgcttcttgaggcaaacaagtgggagcttgcccacggaggactttcgggaagaacggcacagcagtttatcaattatctgcttggaaaacaataaagaggagggcggatttatggcaatccatacgtttgcggcaatttatatcggttcgtatgaagtgagcctcaagatatttgaattgtctgccaagaaaaaaatacgcgatatcgactatgtgcgtagcagaatcgagctgggggcggatgcgtactccaagggcagcatcggatacgagctggtggaggcactctgtgataccctgcgggaatttgcgcagatcatgaaagagtaccgggtggatgcgtacgaggcgtatgcgtcggcggtgctccgcgacgtggacaatgaactttttatcctggatcagatcaggctgcgcaccggtctgaccgtacgtgtgttgagcaactcggagcaccgttttatcagctacaagtcggtggcgatgcgtgaggagtttgagcatttcatcggcagaagcgcagcggtggtggacgtcagtggatcgggacttcagattaccgtgttctcaaagggaaaggtgctgaccacccagcatctgggactcggcaccatgcgcatgcgggaacagcttgccaaaaagagccggaacctggcgcagtatgaactacagatcgaggagatggtggtaaaggagatggaagtcttcaaggcaatgtatctggaaaatcaggagattgaatacctgattgtgatcggcgattatatcgcggaactggtatgccgcctcgagaagaaccgcaacaagaataccgtgtcgattgagaagttcgtccagtacatggagcagctcggcaggaagagcctggaggagatcgcggaggaactgggactctccaacgagaacgacccgctgatcgtgccctatatcatcatctgcaagtgcatggcgagggggctgggcgcaaaggaactgtgggcgccgggcgtgattgtcagcgacggaatcgcctgcgactacgcgcagaaaaaccgtatctataagcctacgcatgattttgatgaggatattatctcggccgcggaaagtctctcgagacgttacatgagctattcaccgcacattgaagcgctgacccagatggcgatgcttctgtttgacacgatgaaaaaacagcacggtctcggaaagagagagcggctgttgctgcaggtcgcggcgattttgcatgactgcggaaaatatatcagctttgccaatgccccgcagtgcgcatacgacatcatcatgtcctcggaaattatgggattgtcgcatctggagcgtgagatcgttgcggggacagtgctctacaacagctatccgcttgccgattatgaagatgtagcggaccggctcgaccagcagagttttcttacggtggcaaagttatccgccattctgcgcgtttccaatgcgatggatcgcagccacaaacagaagtttaaaaacgtaaaagcacagcttcgtgacaaagaactgatcattacgatcgagacggatgaggacattgcgctggagaaggcgctgtttgcttccaagacggcttattttgagcgcattttcagcatcaagccggtcgtgaaggaaaaacgtgtctattcgtaaggacgtggagggatgatacatggaaaaagaaaagaaaaacgaattccatttgccggaatattacgagaacagagagctaagctggctgaagtttgacgcccgcgtgctcaacgaggcaaaggataagagtattccgctgttagagcggctcaaattcgtgagcatcacgtcgtcgaacctggacgaattcttcatggtccgggtcgcgtcgttaaaggatatggtacatgcggactaccgcaagcgggatattgcgggcatgacggcatcggagcagctcgaccggatcaacacggcgaccagaaaactcgtcgagagccagtacaacacgtataaccgctccctcgttccgctgatggcagccaacggaatacacattattgaaaaatacgaggaactgacggctgagcaggcggcgtacgtggaccgctactttgaggaggacgtctatccggtattgacgccgatggcggtggacgcatcgcgcccgttcccgctgatccgcaataagacgctcaacatcgcggcgctgctttccagcaagaaggatgaaaagcataaggacgcggtggaatttgcaacggtgcaagtgccgggggtactgcctcgcctggtgccgatcccggcagatacgtcggaggattccggggaggtggagggacgcacctttattctcctggagcagattatcgagaaaaatattgataagctgtttttaaactaccatgtgctctgcgcacatccgtaccgcgtcatgcgtaacgcggatctgccgatcgatgaggacgaggcggcagaccttttaaaagagatccagaaacagttaaaaaagagacagtggggagaagtcatccgtctggaagtggaagcttccgtggacaagaagctgctgcgctttttaaaggatgaactgaaagtggcggaggaggatatttttcagatatccggaccgattgacctgacatttctgatgaagatgtacgggctctccgggtgcgattccctgcgctacgaaccgtataagccgcagcgcgtgccggagattgagccgggggaggatatctttgaggcaatccggggcggcgacattctgctgcatcatccgtatgagacgtttgatcctgtggtcgattttatccggcaggcggcgtcggacccggatgttcttgccatcaagcagacgctctaccgtgtcagcggcaattcaccgatcatcgcatctctcgcgcaggcggcggagaacggaaaacaggtgtcggtgctcgtggagctgaaagcacggtttgacgaggaaaataacattgtgtgggcgaagaagttagagcaggcgggctgccatgtcatctacggtctggtcggtcttaagacgcacagcaagattgcgcttgtcgtgcgccgcgaggaagatggcatcaggcgctatgtgcatcttggaaccggcaattacaatgattccacggcaaagctctacacggactgcggaatctttacctgcaatgaggcgatcggggaggatgcgaccgcggtgtttaatatgctttccggatattccgaaccgctttcctggaacgaactggtgctggcgccgatctggctgcgcacccgttttatgcgcctgattgcacgtgagacaaagcatgcgcgcgagggaaagccggcgagaatcgttgccaagatgaattctctgtgcgacgagggcattattgccgcgctctacgaggcgtcggcggccggtgtaaagatcgaactgatcgtccgcggaatctgctgcttaaaggtcggaatcccgggaatcagcgagaatatccatgtgcgttccattgtcgggaatttcctggagcacagccgtattttcttcttcttaaatgacggggaggaggaactctatatgggaagcgcggactggatgccgcgaaatctggaccgtcgtgtggaaattttgttcccggtgctggacgatacgttaaaagaaaaggtaaagcatattctggatgtggagcttgcggacaacacaaaagcacacgtgttaaagccggacggggaatatgagaaaatagacagaagagggaaagtgcttgtcaattcccagaagcagttctgcgaggaggcggttgcggcggtgccaaagacggatcatgtctaccgcgagcgtgtatttgtcccggcagaaccggcagagtaggaacgccgcaggacatatgatgggttaaaagcaggatgggaggaatgagtatgaatcacaagattttgtttgttgatctggatgcgacgctgctctctgacgacaaaacagtatccgaagaaaaccgggccgccatccagaaaatgcttcttgccgggcacgacattgtactctccaccggacgtccggtggagagcggcagggcggttgcaagagaactggagctgacgcagccgggctgttatatgatcgcttttaacggggcggtactctacgattgtgccgcggatcgtgtgctgttaaagcgctcgctcccgattgaagtgacgcaggaactttttgagagagcctccaaggcgggaatttatgcgcagacctacaataacaccgagattattaccacaagacatacggcagagcttgagtattaccggaaaaaaacaggactttcctacaagctttcggcgaatgtgctggatctgctggaggaggagccgcagaaggttctcatgattgatttaaaaaatacggggcgtctcgcgcggttccgcgagaagaatctggaatgggaaaagggaaaatgtaccagctttttctcctgcagagagtatctggaatactgtccgcttgataccagcaagggaaccggtgtgtcctgtcttacgaagatgctgaatcttccgctagactgtacggtagcggtgggagatgaggagaatgatattgcaatgcttaatgcggcgcatatcggggtagcggtaaaaaatgccacgccggaggtgaaagctgcagcggattacgtgacggagcacgacaacaatcacaatgcgatcgccgaggtgatcgagcgatttatcctgtaaaaggagggactgctgcatcgggcgggcagctgccttgagtcgataaggaatattataagaagcacaccacgcagatttcagctggaaatgcagatggaacattcgtttgagaaaaatgtgagcatttcttcctgctggatgtttgcatcggattccgtgtctcttccacgtttggacacttccggagtgtgtccgacaagtcacagacaatgagcggacttcctggtgtccctaatgatgccgcttcacagacaatataaaaccgcgcgaaccgaaactcgttggcatctgctattgaaaatacggcagatgccaattcaaacatcggcttcgcgcggttatgttttgttcagcggcatccataagggacacacacgaaagtcctaaaattgtctgctgacttgcggacacagtccgtagagtgttccaaacttgggaagacacggattatcgcggatgcaagcatccggcgggttagaaatgccactttttttgaacagaatttccatttgcattttcaactgaaatccccaagtgtgcctcttgtaatattccttatcgcttcaaggcaaactggctattcccgatgcgacagtcctttcttctgcctttatgcgcggaggtgttctttgatggtttcaagaatggaatagggaatgtagagatgcccgcgtccggtcccgatctggattgtgggtttgttggtgccgtggaagtcggagcctccactgatgagaagactgttctcttttgcaagccgcttgacgtactgttcctcgccggtggtgtaggtcgagtagatcgcctcgatgccgtcaaggtggacttcttttaactcgtcgatcagatgctgcaaggtcgtctggctcatgtggtagagcagcggatgggctaatacagcgatgccccctgcggcgtggatcagttcgactgcctccatcggggagactttaaagcggccgacatagcatttgcagccgtcgccgatatatttttcaaacgcctccgagacgctcctgatctgatggctgtcgtagagaaaacgtgcgatatttgcgcgcgtgatgacactgtcgggattggcagcaaggagtgcttccgtggtaatggaaaagccttcgcgctgcagggcagccactattttttcattgcgcgcatcacggcagcggcggaactcgtttgttttctcgataaggagcgggtgctccggatcaatgtagagaccgacgatatggacttcttttccgccgccggctctggtgggcagctcatattccgtggaaagctcgatgccagggattaattcaataccacaggcggcagcggcgggagcagctttagagacgcctgccgcggtgtcgtgatctgtgagcgcaaaggcggacagaccggcagcctttgcggcagatacgacctcggtgggagtaagggtgccgtccgactcggtggagtggacatgaagatctatgatgcggtgttccatggtaaaatcctctcttcagataatctaattcagactaatcatagagaaaaaaatcacatttgtcaaaaaaatatggaaaccagttgaacacgtagtaaaatagaactataatataaaggtactaaaaaatatacacggatgtagagaatacagcacacaggaggagcgaaattgtttgaaaatgtacgaatcaaagagagactgacaaaagcatttgttatggtggcggcaatcactgccataggagcggtagtcgggctggcagcgatgcttgtgatgtcgaaccgttattccagcgcacttgtgaattatggtttttcacagggagatatcggcaaggcgatgatcacatttgccaacacgagatcagcgaccagaggaatcatcggatttgatgagcagggactggtggatgatgccatgacagaacatgacgaacagaaagcaaagttcgagaattacttcgcaaccgttggggatgtagtaacgacgagcgaggaaaaggcactctaccagcagatttcagataaactgcagcaatactgggcagcggaggaaccgatcatcgagcagggtgcaaccaccgatgctacacagtccacagcggcacagcagcagatgaaggaaagtctggatccgatctacgaagatatctatgcagatatgatagaactgatgaatacgaaagtgacggagggagaccgcttgtcctccactctgacggcagtcagcgtgattcttgcgattgtgattgtggcagtgtcagctctggcaatggttatggccaacaagcttggcaatcaggtggcaaagggaatctccggaccgcttgaggcacttggcgagcggtttaaaacgtttgcacagggagatctttctactccgttcccagaggtttccacgcaggatgaggtcgcagacatggcgcgtgaggcggcagacatggcagataagctgaatcttatcatcaatgatgcgggaagaattctcggattgatgtcacagggcaattacgcagtgcagtcggagcacaaggacggttatacgcttgattttgaaaaattgattgtggcgatgcgcgttctgcgcgatcagatgatagagacgctgacatcaatcgaagatgcggcaaaccaggtttctgccggttccggcaaccttgcagaggcatctcagagtctggcggagggcgcaacggatcaggcaggagctgtggaagaactgcaggcgaccatcacaagcattacagagaatatccagaagaccgcggagcaggcagaggaatcttaccagcaggcaaagcagtatgcaggtgaagcggatcagagcaagaatcagatgcagtccatgattgataccatgagccgcatcaacgaatcttccaacaagattggaaacattattacagatatagagaatattgcgtcacagacgaacctgctgtccttaaacgcttccattgaggcggcgcgtgccggcgaggcaggaagaggattcgctgtcgttgcagagcagatccggcagctggcagagcagagtacacagtctgcggtggacaccagagagttgattgaggcttccctcaaagaaattgaagagggcaatcaggcagtagagcgtgtgtccacgtctcttgaagaggtaattgacggaatcaagcagattgcggagacttccaagcgcttgagcgataattccaaggatcaggcagaagccatgaaacaggcggaggagggagtcaaccagatttccgaggtcgtacagtccaattccgcaacggcacaggaatcctctgcaacgagtgaggagttgtctgcgcaggcgattgcactggatgagctgattggaaagtttgtattaaaaaattaaaaattgacagattctgcggttgccgaaccggaagaaaagagatataatagcaggaagaaaagattcagaacagggggaagtcacatgcagctgctgacatttacattaacgggaatggattatggaatatcacttgagaacgtggaatccattgagagtaagatgaatgtcgtggttgtaccgacttctcctgccaatatcagaggcatcatccgccttcacggagagatcctgccggtgttctcccttgcatccagatttggactggggaacattgcggtggacaaccttgtggttgtcaatgtgggcggcatgaagctggcgcttgaggtggaaaaggtaaaggaaattgtggacgtggaagattccagagtgcttccgatgccgacactgatgagcggacagcagtgctgttttaatgatgtggcttcctgtcagaaggagctgattgtgatgcttgatgtcaagagtctggtatcacaggaggagcaggcggcgatccgcaagatgatcagcgacaacaccagtgaaaaataataaaaaacacttgacacggatacgtgtgtgtgataagtttaaatagttgttagaaaacaaagtagagtatccactctcaccggagcacaaatacgtgactcatggttcatatttcaaagtattgcgaacatatcatgttccgggtttgaatgtttagtggatagtctgcctatccacttttttatttggaggtacgataccattagcgagttaatgattaacgaacagatcagagacaaggagattcgtctgatcggagagaacggagaacagcttggcattatgtcagcacgcgaagcaatgaagctggcggaagaggcagagcttgatctggtgaagattgctccaaccgcaaagccacctgtatgcaagattatcgactacggcaagtacagatatgaactggcacgcaaggaaaaggaagccagaaagaagcagaaagtggttgagatcaaagagattcgcttgtcgccaaatatcgattcaaacgatttgaacaccaaaatgaacgctgcgaaaaagttccttagcaagggagacaaggtgaagatcacattgcgcttccgcggacgtgagatggctcacatgaatgcgagcaagcacattttggatgattttgccgcaagcctcggcgaaatagcagtagtggaaaaagcaccaaaagttgaaggtagaagcatcagcatggtgttggcagagaaaaaatcataattaaggaggaacatatcatgccaaaaatgaaaaccagcagagcagctgcaaaacgtttcaaagtaacaggaacaggaaagttaaaaagaaataaagcttacaagagacatatcttaaccaagaagacaaccaagaacaagagaaatcttcgtaagccggcaatgaccgatgcaacaaacgttaagaacatgaagaagattttaccatatttataggaataagttaaggaggaatgcaaaatggcaagagtaaaaggcggattaggcgctaagaaaaagcataatagaacattaaaattagcaaagggttacagaggcgcacgttccaagcagtatcgtgtagcaaagcagtctgtcatgagagccttaacaagttcttatgcaggcagaaaagagaagaagagacagttccgtcagttatggatcgcacgtatcaacgcagctgcaagaatgaatggtatttcttacagccagatgatgcacggattaaaggtagctggtgtggacatcaaccgcaagatgttagcagagatggctgtaaacgacgcacagggatttgcagcactggcagagctggctaagagcaaggtagcttaaggaacagcagacagaacctatctcgtatgtgggacaacccatatgagataggtttttttatgtaacaggaaagcaggattttttggtatcggtattatacagcatctgaattttgtatgttccaatttacagcaatatacggtataatattagcgatttttgaacgcaaagggaactacgaaagggaaacgggaatatttatatgaagaatatatggcgtatttttgcaaaagacattaagggactggtgaagaatccattcgcaatgattattgcgctgggactctgtgtcattccatcgctgtatgcatggtttaacatctattcaaactgggatccttatgcgaatacttccaatatcaagattgcggtcgtgtcggaggataaaggatacaccctttcggatggaacgacagagaacatgggcaatgaagttgtggaggaactgaaggagaataccaagatcggatgggtgttccttgaggattcggatgccgcacttgaaggtgtcaggaacggagattactacgcggctgtcatcatcagcgatagctttacatacagtatgtataatgtgttcaaggagaactttaagaatccgacgatcacatattatgagaatgaaaaacggaatgcggttgcaaccaagattacggataccgctgtatcgacggtaaagcagagcatcaacgagaagtttatcgaggtggttgcaagtaccatttttacacagacgaacgaactgtcctctgagatggagaatcaggatgtgttcagcgaatttgagggcaaactgaccaacctgaacaacaatctgatcggttacagtgatatgattgatgagtttatttcggcgaatgcagtgctggaggcagagatcaaaaccgcagacggagaactgccgaagctcagcagccagattcagaatggcgagaagagtttccagaattcgcagagcaatctgaattccacgaaaacttcactggagaatttcagcagcaatgtgcagacgacactggatggcatcaatcattcgatcaattccatcacaacggatatcaacaacgcgaacctggcgcagaatgcgcagtctacggcagacaatctgaacaagacggcaaccgatacggcggaactgatccgacagttaaaccagttgaagaagagtctggcagatcaggcggcaaattcatcgggaaccacaggctccacggagggcacaggctccacggaaggaacaggctccacggaggatacaggttccacagaaggaacaggctccacagaaggaacaggctccacggaggggagcggttccatagattcgatcgtgtccgatgaggtgaatcagcagattcaggagatcttaaataccttaaacagcatgaacaatggtgctgaggatattcagaatgcattaaatgctttgctccagcagggcggtggtacagacggctccggtcagattgttgcggatatggtgaacagatctgtggcaagcgtgacacaggtgttaaacaactgcagcgagtcgatcaccaatctgaagaatatgtataccaacagtcttgttccgcagatggacggagtgttaaacagtgtatcgcagatgctcggcaatgtgacaaagcttctggataacttaaataccgcagtaaatgatatgggcgtggtgtttgacggaattcagacaacggtcagtgacacgacggagagccttgagcagatccagaccgtgattgacaatgtgagcacaaagctgacggaactgatcaaacggttggagagtgcggaagatgatgaaaaagtagatgcactgctgaagtttttgcagggtgatccggaggattacggcgccttctttgcagaaccggtacaggtgacgacacaggagatctacgcgattgcaaattacggatcggcgatgacgccgttctattccgtgcttgccctctgggtaggaggaacgattctggtggcactgatcaaagtgaagccggataccgcagggctttccaacccgaagtcctatcagttgttcttcggaagatatctgctgttctttgtgtgtgggcagatccaggcggcgattattgttctgggagatatttatctgctccactgccagatcctctatccgggcttattctggctgacggcagcactggcaagctttacctttacgctgtttatctatgcgatggcgctggctttcggcgacgtcggcaaggcggcggcggtcgtagtcatggttatccagattgcaggttccggcggaacgtacccgattgagacgcttccggagatttatcagaagatttatatcttcttcccgttcccgtatgccatcaacgcaatgcgtgagacgattggcggtatgtacggaagcgattatatgaagtatctgggagaactgctgctttttgcggtggcggcgcttctgattggtcttgtgatccggcttccgtttgtgaagatcaatcattttgtagaaaagcgtatggaagatacggaaatgatgtaggaaatgggagattttatggaaaagaaagaaaaatacgaacagatgtatgagatgctcgtgacgtatgagcgcaagattcacgagaagaatcaaaagagaatcagtatcggtttaaagtgtattattattattccgttgatcttcctgttccttctgttctggacagagagcaataaggttgtgtttctgattctgtggattgtatcgctgtttttgctggcagcctatctgattctggtggagtatatggactataaccttcaggaaaagttaagcgagatcaacgacgaggggacacgcgtggattccctcatcggactggagattgataatgttccgggaaatctcagaaatgtgattcagaggattgacgacggattaaactcagaggcggagacccggctgattgagactaaggcatccggggaagaaacgcagactgtggaaaaggcacagactgcggaagagacagagaaacaaaaggatgcggatgcacaggctgtagaagatgcagatgcacagaaagatgcggatgcacaggctgtggaagatgcagatgcacagaaagatgcggacacggaggtgaaggagaatgcgtaatatatttaagatttttttcgccgatgtcaagcgcatcagcaccaacgtggtggctgtcgttgtgatcctgggactctgtattctgccgtctttgtatgcatggtttaatattttgtcaaactgggatccgtacggaccgtccgcaaccagaaatcttaagatcgcggtggcgtcggacgacgagggagtcacaattttagggaacagtgtaaatgttggaagcagtgtcatctctgcgcttgagtcgaacacgacgatgggctgggtgtttacggatacgaccgatgaggcgatcgacggcgtctatgatggaagttattatgcggcgctcatcatcccggagaattttacggaagatatgatcagtttcctcggcggagaggtggatcatccggatattatctattatgagaatgccaagaaaaacgccattgcctccaagatcacacagaaggccaagacggctgtgcaggagcaggtaaacagcacggtggtgagtacccttgcagagaccacgatgaaggtgacgaacgccctctcagatgtggatgcggaagattccgatccggcggagagtgttctggtaagactcaataatttaagcagcgacctacagagttacatcaatatattgaactcgtttgtcagcattatgaattccgcccagagtattgtggaggcgagtcagaccatgcttccgaatgtgaacaacatggtttccaacggtcaggcatccatcaacagcatggagagtctgctggttgcgggcaacagcacggtgagttcgacggcggatatggtgtcgtacagctttgacatgatgaacgattcgttaaataatgtgtcgtccgtcattaccaatgcgttaaaccgtctctcggagtattcccagggcacttctgtcacggtacagggcttatcggcgatgatgccatacgtgaggcagctgtttgatacttcggtatccgggtgggaggatacggcgccggaggatatgcaggcgcagattaatgcaatccgcacgcagttggatatcatcactgcggacctgacagcgctggagaacaatgccgatacatcgatggagacggtaaggaatctcagtaataaaattgtgacggagattgcaaactgccagaaagcggtcgatggactgcgcaatgattttgcttacaatgtcaagccgaagttagagaacacaatgagctccatgcagcaatccatgattgccgcagcgggtattttagacggcgtagatgccgattttaacggtgtggagaatgcactttccgattatcaaagcacgcttgagcgtggaagcaacagccttggcggatcactgtccatggcgcaggagcttctcgccaagctaaacagcgtcacggcggatctggtaagcttacagcagaatgaccagtatcaggagctgcttgaaatcgtaaagagtaatccggaggagctgggagcctttatttcttccccggtaaatctggagacggtcggtatctatgagattgaaaactacggctcggcgatgtctccgttctacacgatcctcgctctctgggtaggagcgctgattctggttgcgatcatccacgtgaaggtgcatccggttgagggcgtcgaaaatgtgaagccgtaccaggagtatttcggaagatacatgatctttttcctggtggggcagacacagacgcttttaacggttctgggcaacctgttttatattaaaatccagtgccatcacccggtattattctggctggcaggcgctgtggcgagcctggtatttaccctgtttatttactcactgaccgtggcattcggcaatgtcggtgaggcgctagcgattgtggtcatggtaatccaggtagccggtgccggcgggacgttcccgattgagacgctgccgaaggtataccagatgctctataagtatctgccgttcccgtacggcatgaatgccatgagggagacgatcggcggactttataagatggattactggaaggatctcggagcgctcggtatctatgtattgatttcactgtttatcggacttgtagtggcaattccgttccgcaaactcaatcatattatcgagaagaacaaagagggatccggagttatgatatagcaacagggagcagattatgatgcgtttgatacaaatggttcttttactcacggggctgctcatggtggcagctcccggggcatgtacaagaaaagatgaccggggtaagccggagaccgagaagcgcacccgcacgattgggggatggctgactgcggcagcggttatctggatgattacggaagtattgagaagtttttaagttattttgggtattcctaataggtatacccattttttgttcggatattgacaaaaaaaatgtacattgttattatcaatggtaagtgtgatgtgtaatttcagatagtaaggaaggttttcttaaatgagaagacaggtattatcgcttctggtcgagaataatccgggtgtgacgagtcatatttcggggctgttcagccgcagaggctacaacattgacagtttttcctcgggagtgacagcggatccgcgctatacgcggattacgattgtggcgagcggggatgaacagattttagagcagattgaaaagcagcttgccaagcttgaggatgtggttgacattaagaagctggagccgggctcgtctgtgacgcgcgagctgattatggtcaagatacgcgccagagatacggaacgccagccgattttaaatgtgacggagattttccacggcaagattgtcgatgtgacacacgattccatggtgattgagcttaccgggcatcaggataagctggatgcatttctggatctgctgcaggggtatgagatcctggagctggcaagaacgggaattaccggtctgtccagaggaactgccgatgtgaagatgatcgacgaaaacggacatctgcagagtttgtaatacatactaattgtgaacgagcggcagacatcacagatgctgttgctatgtataaaaaatggaggaaaaagatatgtcagcaaaaatattttatcaggaagactgtaacctttcactgttggatggtaagaccattgccatcattggatacggaagccagggacatgcacatgcattgaacttaagagattccggatgcaaggtcattatcggtctctacaagggcagcaagtcctggaagaaggcagaggagcagggatttgaagtatatacagctgcagaggcagcaaagaaagccgacatcatcatgatcctgatcaatgatgagaagcaggcggatctttacaaaaacgacatcgagccgaaccttgaggaaggcaatatgttaatgttcgcacatggattcaacattcattttggatgtatcgtaccgccgaagaatgtcgatgttaccatgatcgctccgaaggctccgggacataccgttcgttccgagtaccaggcaggaaagggtactccgtgtctgatcgctgtagagcaggatgcgaccggcaaggcacaggatctggcgcttgcctatgcacttggcatcggcggagcaagagctggcgtgcttgagacaaccttccgcaccgagaccgagaccgatcttttcggtgagcaggcagttctctgtggtggtgtgtgtgcactcatgcaggcaggctttgagacactctgcgaggcaggatatgatccgagaaatgcatacttcgagtgtatccatgagatgaagctgatcgtagatctgatctaccagtcaggtttcgagggaatgagatattctatctccaacacggctgagtacggcgattacatcaccggaccgaagatcatcacagaggacaccaagaaggcaatgaagaagatcctctccgacattcaggacggaacctttgcaaaagagttcttactggatatgtctccggcaggaagacaggttcactttaaggcgatgagaaagcttgcttccgagcatccgtcagagcaggtcggcaaggagatccgtaagctttacagctggaacaacgaggctgacaagctgatcaacaactaagagctaagagcggagaatgaatccgcaaaaagaatagagaatctgccgcatggagtgcgaagtgcttccggcggcagattttttatttcataggaaataccgtgatacattcatgtgtgaaagtggaactttcctatgaaataaaaaacgctccgcgaggatgcgcagctcgcggtaaggaaaatatcgctttgcgaaacgcgagcgcgcggagaatctcgcaagcgagattcttttttatgtggatgccaaaatccggttgacaaatacatccagtatgttaaaataaatcatgttcatgcataaaatgaatcaaagtatgtgaccgtgagaaggagcattaagaacggaagaatgacagagagccgccgggtggtgtgagacggtatttggaagttcccaactcgcctttgagtcctttgccggaagccagtggcagcgccagcggtgtgtaaggcagagcgtgtgattcgcgttaagaatgataagtgcgtacctgcgcatagcgcggtgcgaagcagagtggtaccacggagtagcgttacttcgtctcttacggcagatgtcgggagacggagtttttttgttatttcaagcgttaatgaaagatgaggagagagaagatgtcagaactttacaatcacaaagttgtcgagaaaaaatggcagaaagtctgggatgacaacaaggcttttgcggcgacagacgattacagcaagccgaaatattatgcactggtggagttcccgtatccgtccggacagggactgcacgtaggacatccgagaccgtacacggcactcgatattgtggcaagaaagcgccgtatgcagggatacaatgtgctttatccgatgggatgggatgcatttggtctgccgaccgagaactatgcgatcaagaataagattcatccgaagatcgttaccgagaataacgtgaagcgttttaaggagcagttacattcactcggatattcctttgactgggacagagagatcaatacgacagatccgtcctattacaagtggacgcagtggattttcttaaagctgtttaaggcaggcctcgcttacaaaaaagagatgccgatcaactggtgtacttcctgcaaggtcggtcttgcaaacgaggaggttgtcaacggtgtctgcgagcgctgtggagctccggttgtccgcaaggtaaagagcgagtggatgttaaagattaccgattatgccgagaagctgatcgagggactggatcacgtggattacattgagcgcgtcaaggtatcccagaagaactggatcggcaaatcccagggcgccgaggtggatttctccatcaagggcaaggaggataagcttcgtgtatacacgacccgctgcgatacattgtttggtgttacttacatggttgtatccccggagcatccgatcatcgacaaatacaaggatgaactgaaaaactgggatgcgattgcggcataccgcgacgaggcagcgaagaagtctgattttgagcgtgcagagcttgccaaggagaagacaggcgtgcagatcgaaggtctgaccgcgatcaatccggtcaacggcaaggagattccgatctggatttccgattatgttctgatgtcctacggaaccggagcgatcatggcagtgccggcgcacgatgagcgtgactgggaatttgccaagaaattcaacctgccgttaattcaggtcgttgcaaagaacggcgaggaagtagacatcaatgcggctgcatttacagatgtggcaaccggtgttctgatcaattcggatttcttaaatggacttgaggtcaaggacgccaaggcaaagatgatcgcgttcttagaggagaagaagatcggtaccgcgaagaccaactacaagctgagagactgggtattctcccgccagcgttactggggcgagccgattccgatcgtacactgcgataagtgcggttacgttccgatcgatgagagcgaacttccgctgatgcttccggaggtggagagttatatgccgaccgacaacggagaatcgccgttagctgcaatgacggactgggtgaacaccacctgcccgtgctgcggcggtccggcaaagcgtgagacagataccatgccacagtgggcgggatcttcctggtatttcttaagatataccgatccgcacaacgacgaggcactcgcaagcaaagaggcgttaaaatactggatgccggttgactggtacaacggcggtatggagcacacgacacttcatctgctctactccagattctggcataagttcctctacgatcagggggttgttccgtgtccggagccttaccagaagcgtacttcccacggcatgattctgggtgagaacggcgagaagatgagtaagtccagaggaaacgtcgtaaacccggacgatatcgtaagagagtacggtgccgatacgttaagaacctatgagatgttcatcggtgcgtttgatttgagcgcttcctggtcggaagatggcgtcaagggatgccgccgcttcctggagcgtatctggaaactgcaggatatcatgaccaacgaggagggatactcttcggatcttgagacaaagatgcatcagacgatcaagaaggtaagcagtgattatgagaatctgaagtacaacacggcgatcgcagcaatgatggcgctgctcaatgattttacaaagaagggctccatcacaaagggcgagtacaagaccctgctcattctcttaaatccggtagcaccgcatatcacagaggaactctggcagattatcggcggcagcggctatgtatatgagcagacctggccggagtacgaggaagcgaagaccgtagaaaataccgttgagattgcagtgcagatcaacggaaagacgaaaggaacgctggcaatcggaagagatgacgcgaaggaggatgtcattgccaaggcaaaggaatccatcgcagataagctcaccggcaacatcgtaaaagaaatctatgttccgggaagaattgtcaacattgtaatgaaataagatatggaaaaaggaacgaagcttttagaaggttccatctggaaaggggttgtagcatttgcaatccctctcttcttgggaaatttatttcagcagttatataataccgtcgattccctgatcgtcggcaatttcctgggcagcgatgcgcttgccgctgtcagttcatccggaagtcttatttttcttctggtaggattttttaacggaattgccgttggcgcaggcgttgtgatctccaaatacttcggggcgagagactatgagaatctgaaaaaagcggtgcatacggatgtggcattcggacttgtctcaggacttttgctcaccgtgatcggcatgtttttggcaccgcagattctggtgctcatggggacgccggagtcggtactgccgaattcaatcctgtatttccgcatttattttgcgggatcgcttgcatttgtcatgtataacattgtgatgggcattctgcaggcggtgggagacagcaggcatccgctgtattatctgattttttcttcgatcgtgaacattgtgctggatctgctgtttgtcggtgtccttagaatgggcgtcggatcggcggcgcttgccacggcaatctcacaggcggcgagtgcgctgctctgttttatccggctggtgcgcacgaacgatatttatcaggtaaaaatacgggagatccggtttcatccggcgcagcttcggcagattatcagctttggtctgccctccggtctgcagaactcgattatttcgattgccaacatcgtggtgcagtccaatattaacaagtttggcgtgatggcagtcgcaggctgcggtgtgtattccaagatcgaaggttttgccttcctgccgattacctgttttgcgatggcactcacaacgtttatcgggcagaatctgggcgcaaggcagtatgaccgggcaaaaaaaggcgcggcgttcgggattgtctgttccatgacacttgcggaactggtcggcgtgatcgtgtatatgctgatcccgtacctggcggcagcctttgacagcagtgccgaggttgtgggatttgcaacgcggcaggcacacgtggaggcgctgttttactgtttcctggcgttctcacactgtattgccggaatcatgcgcggtgcgggaaaatccgcggtgccgatgttcgtgatgctggtttcatggtgtatcatccggatcacatacattacgataaccgtgcattttattccgaagatccaggtgatcttctgggcgtatccgctgacgtggtcgatcagctcgattattttccttgtgtatttcctgaaagcggactggattcacaattttgaacgggcagaacagagataagaaaatgtagaacatggggaaaaagcgatgaaaaaatgggcagaatggctgctggtggcaggggctttatgtatgggtatggcaggctgcggaagtgaagaaaaaaacacgtcgaacgcagatgcagaacagaaaagtgagactgcatcagagacaagagaagaaggacaggcaccggagcagacggatacagaaggaagcgaagaggcagaattacagacaacagagtcagaacatgcagagacgggactcactttcgcagatcttgcagcgctgcagtttgaattttgcagtggtgcaggtggatggtcaacggattttaccattgagaaggatggctctttttccggcgtatatcacgattcagatatggtggataccggggatggctatccgaatggaaccatgtattactgcaatttttcaggacatttcacgaacttaacgaaggtagacgacgatacttatgagatgtcacttgcggatatttcctatcagaatacggtcggagatacagagattctggatgatatgctttatgtttacacggatgtctatggtctggagggaacggataccttccggatctatctgccgggtacgccgagagaaaagctgacggaagacgaatggttctggattgcagcgggaaatgagagcgaaacggaactgacgatgacggtgatcgtcaatgagccgaatgaatatggaatttattcctatgagaggtcaaccccgtcagaggaagcgcagggaatatataatagtctgttgaactacaacgacgaactggaacagcaattacagagtgcctcaacgcagcaggaaatgaatgagattacggcgcagatgtaccagaatagtgatgatagcttaaaccagatctggcacatcgtgaaatataattcagatgagacagaatttgctcagattctggaagaacaaaaaagctggatcacggaaaaagaggcggaggcggaacagatcagagcagcaaataatggttcttcggcagagatggatgtcaacataaagctaaatgatctcaccgaagaacgctgcagggaattgttggagtatttgaaaaattaaataaaaagatgatataaaaaaacaggaatcgttctctttctggcatacagggcggaatattcctgttttttgttattctacttggagtagagtgaaaaaatgtggcagatgtagtagaatagaaacagaaaggagagaggatgaatgattgataatgtgacgtttggaggatttgtccggacacttagaaaagaaaaacagatgacacagcttgaacttgcaaagatcctgaatctgtcggacaaaacgatatccaaatgggagcagggaaaggcatttccagacattgcagtctgggaagcgctcgcagaagcacttgatgtgacggtggcagagttgtttgcaggagaaaaactgccaaaggaagagggaaaagtcagtacagctatatttgaggatggcattgcagtggcagcaaatgaagtccggcaaaaaaagaaaagataccggggactgttgatgattatggcggcgctgttagtggtggttgcaggtctgggtatcggcaaaagcctgaaagagaaatttgcagtatatatggtcagcatggatgcaactattcttgaggttcatgaagattattgggaagttagaggaaaggtaacggatgccaaaggacgcagcggagtttatgacatcagtctgacagaaccatggtatctggagcacccggtggatggtaaggaaggagatgagatccgctttttttaccgggaggattggaaaaatagaactttgaaagaaaacgaatatatacaagggattttttctatggagaaagtggaggatgagtagaatcgctagttgggctataaaagaaaaaatctccgctgtttatttgcaaatagcggagagtttcctttaaaaattctgatagaactgaatgaactcattgagcgatttggaaggtttgctgttggtgcggtaggcgaaaccaacctcgcgcttgtgaatcggaatgccgagtggaatctccacgagggcaccggaggcgagatcgtcctgcacgaagcttttgatgacgcaggcgacgccgacgccgatcctggcgaaatcaatcagcagatccatgctggagatatcgatggaatcgtgaacaacgatatgattctcctgcagataatcgtcgatgtactggcgtgtcatgttgttctggtctaagagcatcagtgtggaggatgtgaggatctcgtctttgcggacgccacgggcatgcagattgcgcagatagtctttggtcgccacaaaaatatcctcgatctcttccagatagtcaaaatgtatattctttacattgtccggcttcccgatcagaccgatatcgattttgtcatcctcgagcagctttaaagtgtcgttcgtggattgacagtggatggagatcgtgatatgcggattctgccggatgaattcctttaagtagggaagcagcatgtatttgcaaagggttgcggagacaccgatcttcaagtgaccgaccccaagctcaatcgagcgctttaacttttcttccccgagtgtgagcgtctcaaaggcagtcttgacatgctcgtagagcagctgtccctcgtcggttaataccacgccgcgggaactgcgggaaaagagacggcagccgacgctttcctcgagcttctggatggatttgctgatggcgggctggctgatgtaaagctccttggcagccttggagatattgcctgtgttggctaccgtataaaaaatccgataggatgaaagattctggttcataatagttcctttccttgggggtgttgatttcatagatatttgtatctgttctgacaaaagtatatcatgaattaatgttatggtaaatatatttattatgtatttttattatagtatgtgctatgataaaatagtcaggaatcagatgaatattacacacacacgaaaatagagtttgatagtaggaggggatagaatatgggtatgacaatgacacagaagattcttgcggcgcatgccggacttccgtctgtctgtgcaggacagctcattgaggcagatctggatctggttctcggaaatgatatcacatcgccggtggcgattcacgagatggataagatgaaggtggacggcgtttttgacaaggacaagatcgcgctcgtgctggatcatttcgtgccgaataaggacattaagtctgcgcagcactgcaaatgtgtccgtgaatttgcctgccgccatgacattacgaattattttgatgtgggagagatgggaatcgagcacgcgctgcttccggagaaaggactcacggtggcgggagatgtcatcatcggagcggattcacatacctgtacctacggggcgctcggcgcattttccacaggcgtcggcagcacggatatggctgccggtatggcaaccggaaaagcgtggtttaaggtgcctgctgccatcaagtttaacctgaccggaaagccggcaaagtggatcagcggtaaggacatcatcttacatatcatcggcatgatcggtgtggatggtgctctgtacaaatccatggaatttgtcggggatggcatacagtatctttccatggacgaccgttttaccattgcaaatatggcgattgaggcgggcggcaagaacggcattttccctgtcgacgatctgacgaagcagtatatggagaagcattctaagcgcccgtatgttatctatgaggcggatgaggatgccgagtatgagcaggaatttacgattgatcttagcacgttaaagccgacggttgcatttccgcatctgccggagaacacgcacacgatcgacgaggtgggagagatcaagattgaccaggtggtcattggctcctgcaccaacggcagaatggacgatctgcgcgtggcggcatcgatcctgaaaggacacagggtggcaaagggactgcgcgtgatcgtgatcccggcaacacagcagatttatctggatgcgatggaagagggcttgttaaagacctttattgaggcgggggcagtcgtttcgacgcctacctgcggaccgtgtctgggcggttatatgggtatccttgcggaacatgagagatgtgtctccacgacaaaccggaactttgtcggcagaatgggacacgtggagtctgagatctatctggcaagtccggctgtggcggcggcaagcgccatcaccggaaagttatccggaccggatgagattgcataggcgaggaaaggagacagagcatgaaagcagcaaagggtcatgtatttaaatacggagacaatgtcgatacggatgtcatcattcctgcacgttatctgaattcttctgatccgaaggaactggcgacacactgcatggaggacattgacaaggattttgtgaaaaaggtaaaagcgggcgatattatcgtagcaaataagaactttgggtgtggttcgtcgagagagcatgcaccgatcgccatcaaggcttccggcgtgagctgtgtcatcgcagagacatttgcgagaatcttctaccgcaacgcgatcaatatcggactgccgatcatcgagtgtccggaggcggcaaaagcgatcgaggcaggagatgaggttgaggttgattttgactccggcatcatcacggacaagacgaagaacacttcctatcaggggcaggcgtttcctccgtttatgcagaagattatcgactgcgaagggctggttaattatatcaatcagaaatagaattaaccttttgggcaatctgttccagataattcagatagcgcctggagattttaagaccggtgtagatatctgcgtattccttcggagagagcgtatcgacataattttctggaaaatttttgtgaatgcctgccgcgcgggcgagatcaacggccttgttgtaggcaatggcggctttttcctcggaggagtagctgccgatctggtaattgccattgatgtggatgacggcgcggtaccgcgggagtccgttctttaaaaactggagcaccccgtggtaacggttgacgatcacaatattggaatagcggaagtcactgttatctccgttgacaaactgatagtctcttccggcaacagcgtaagggcggatgccgtagcgggagaggatggaatactgcatgccatagtcgctgacgaacagatgcccctgccgtttctggatcttgcggctggaatagtagaacaggtcgtcaacgtcaaactttaactcctcgatgcgcgagagatagtagctgaaatagccgttgcgcaggtagatcggattcttaaagtaaatgccgttgttgcggaagttcaaaagcacgatgattttttcaaaggagagggttgtgggctgctcaatataatcttccggcagctgatccaaagagcccagaatggcaagtgcttccagataggcattgcctgcggtggtctcacccgcatagcttccgagactgatatgtttatttttgtaatagagaccggcacggtagtagaccgtgccgtctttttttgtggcgatggatacaccctgcgtcatagaccgctccttgtttaccgtaaaaatattatgtaaataagcattaggatacacttttgtgatgagtatagaataacagaaggaaagacgggatgcaatagcggaaacccgattgacgaaaatatacaactttgctatactaagaagagttagatgtgtgcaggatgtcatatattttggaaggggccattttcaaatgaaaaaaatatcaacaaaagtattgatcccggtagtgctgcttgcagtgattgcagtcatttcggcggtaaccggattaaaaaatgccaatgagctgcataccagcagcaaggagatcagtgacacaacggtggatcagctgatgctgctaaatgacatttcgtcgaattttaagagcattgatgcaatcacataccggatgtgcgtatccacgtccaaggacgagcgcgatcagctgatggagcaggtggatcagtaccgcacggacattcagacgtcgattgattcctatgaggcgctgacacagacgcaggaggaagctgcggcaatggagacgcttcgggaaaagtttgccgattacaccgaggtctatgaccggattgcagactttatttcccgcgggaataaggacaaggcgagacagatctgcaacacggtgctggcgccgaccagtgagaatgtggacggggtgctcacggagctggaagggtatatggaagcaaatgtgaatgccggcgtggcggagcaggaatctgtatacaataattcacgggcagtcagcggtgtcacatttgtacttgtgctgttgttctttgtcgttgcggtgctcggatcggtacgcaacgttgtaaatccggtcaagagtgcgacgacacagctgaatgatattttaaaagagatcgagtccggcaacggggatctgacacgcagaatctctttgaagagtaaggatgagatcggacagcttgccggcggcatcaacgtgttcttagagaccctgcagcagattatgagccgcattgtgattgactccagggagatgggagagatcgtatcgcgcgtttcgggcagtgtcggcaccgccaattccaatgcctgcgatatttctgccgtgatggaggaactctcggctaccatgcaggaagtggcgtctgccgtcaacacggtcaataccaatgtgacgcagatcgggcaggatgtgaatgagattacaaaagaatcacaggatatgaactcctatgcgaccgagatgcagagccgcgcggaggatatgaaggagaaagcggttgccaacaaggagacgaccagccggatgattacggatatcatcgagactttaaaggctgccattgaggagagcaagagtgtggatcgcgtcaacgagctgacggaggagatcttaagcgtatccagccagacgaacctccttgcactgaatgcttccattgaggcggcgagagcaggcgaagccggaaaaggatttgcagttgtcgcggatgagatacgaaagctggcggattccaccagagagaccgcgaacaatattcagtccatcaacgcgctggtaacgcaggcagtgaataagctcgccaacaattccaacgcgatcgtcgaatacatcgacgggacgatcatgccggattatgaccgatttgtagaaaacggtgtacagtaccgggatgatgcggcgtatgtgaataccacgatggatcattttgaggagaaggcgcgcaacctgcagcagatcatggagaagacggtggattccatccgcgacatttccacggcgattgaggagagtgcaaacagtgtcggaaatgcggcgagcagcacgacggttctggtgtccaatatcgacaccgttcattcggagatggagacgaatcagagcatcagcgaccgcttaaagggagaagccggacgatttaaaaatgtataatattttagtacgttagtgcattgacatgaatgtacagtttcttatataatgtgagttaagtatataagagactgtacattttttttgtacatcgcatgttacaagaagaaagagataagaggattatgaagatggaattagtgtatgcaagtacgagagacgcacaggaaagagtaacggcatcgcaggcgattctgcgtggtctggcaaatgacggaggactgtttgtaccgacacagattccggcgctggatgtgccgatggaagagcttggcaaaatgtcctatcaggagacagcatatgaagtgatgaagcgttttctgacggattttaccgaggaggagttaaagcactgtatcaattccgcgtatgacagcaagttcgacacagaggagatcgcaccgcttgtggaggcggacggcgcatattacctagaactgttccatggttccacgatcgcttttaaggatatggcactgtccattctgccgtatctgctgacgaccgctgcgaagaagaatcatgtaaagaatgagatcgtgattctgactgccacctcgggagataccggaaaggcagcgctggcaggattttccgatgttccgggaacgaaaatcattgtattctatccgaagaacggtgtaagcccgatccaggagaagcagatggtgacccagaaaggtgacaatacgtttgttgtcggcattcacgggaactttgaccaggcgcagactggcgtgaagaagatgttctcggatgcggcgctggcaaaagagatggacgctgccggatatcagttttcctccgcgaattccatcaatatcggaagactggtaccgcagattgtatattatgtctacgcctacgcgaagctctatgcgaatggcgtgatcgcaaaggatgagccggtgaatgtcgttgttcctaccggcaacttcggcaatattctggctgcattttatgcgaaaaatatgggaataccgattgccaagctgatttgtgcgtccaacgagaacaaagttttatatgatttcttctccacaggcacatatgacaagaaccgtgagtttatgctgacaagttcaccgtcgatggacattctgatttccagcaatctggagcgtctgatttaccgcattgcgggaaacgacgccgagaagaatgccgcgctgatgagagaactgacgaccaccggaaaatacgagatcacgccggagatgagagcacagcttaaggatttctatggcaattacacaagcgaggcggagacggcagaggtcatccgtacactttatgagaagaccggctatgtgattgatacacatacagcggttgctgccggtgtatatggaaaatacaaaaaagataccggcgatgtagacaccaagaccgtgattgcgtccacggcaagcccgtttaagtttacaagaagtgtgatggatgccattgaccacaagtacgacagcatgtccgattttgaactggtggatgagctgagccggattgcgaacgtagccgttccgcaggcgattgaggagatccgcaatgcgaaggtgcttcatgataccgtgtgtgaagtggatgagatgccgcaggtagtaaagaatttcctgaaaatctaagaataaaaatgtgaaagacataaaaaagctgcacgccccgcgcgtgcagcttttttttgataaatcttttttgataaactatttttcggaacagatttcaaagatgaagtgaagcgttccaaacgggaataaaaccggcagaagataagtctcatgctcaaaggtaagcagatctttttcttctacaaccggagcctccagtgacagattcatggagaactcgtttgacatattgacacagaacagaccgttgtgcagattgataaaatcttctacagaagaacgcacatactcatcaaattctgtaaagttttcgttgacgtacttggatgcaaaagcaatacatgtattctctggaatatcgagataagtccggatggaaaacgatccgcttactttctgtgatacgcagtagttggtcgggtattccttgcaactgctcggagaaaccagtgtgaaatcatctccgataaaccgatagagattattgaacaaaagctggaaaaaagagatttcatactttgagagcggacgctcagcgagaatgaaaaagttctcgatcatatggcggatggcatcctgatcttcctcggagtaactgtaatcgtccagttcgttctctgactgataatcaatgatcaactcctgcagctgctgattattgatgagtccttcgtccacaagtgcctgtccgagaagaagaaaatccggcttctgctctgcgagaagcttagtcacttcctcttctgtgagatatccctcatgaatggcgagttcaccaaaacgcttgtcctcgtgtgtctgaagaatgacgatacggtctacctcgtttgcggtcatatatccggcatgaatggcaagagtgccaagtttgatcttggttgaggacttccgatgcatggtctctaacagctgctccctggtaacgacaccgtgtgataataagtaatttccgaaaaactgagcgtacatagcttatctcccttcaaatcttgaagaaataatgtgatgaatctgttctgcattcagcggcttctggataaaatcgttagccccggcctcaatggcagcttttaactgtgtctgtgtaccgacggatgaaacgacaataatatcagcatccttatcatatgccttgatctcggtaatggcagcaatgccgtcctttacaggcatgacaatatcaaggaaaaccaattcaggtgactcttttttgtagaggtcgatggcgtcctgtccattggaagcttccagaaacactggagtaccatatgtggaaacaatatcctttaactgctttcttgcaagtatggagtcgtcgccaatgagaatcttaatgccatttaacatcataatgcatctcctctgtcatcataattatattcgcttctattttacactaacaagaaaaatagttcaatgaatatattgaattttgtaagaagaagatagataatgtaaaaaaatatgtcgaatcagtcgactggaatgagaggatacaagaatggacgtaatgctgatatttgatgtggtcatcgccattttcggggtatatatgatcggagcagcacttaagatgaaaaagaccgggaagatcagctcggcggtcatcacggcggaggagattgccagatgcagaaaaacgaaagagttcatagcgtttatttactggaaagaggcagtattcggcgcattgattatcgctgtgggtgtccttggaattatcaatgataaagtggtatcgctcggtgcatttaacgtggttgaacttttaatcttcctggcggcatttctgtggttccagtcccagctgcgcaaggcaagggaacagtttttataaaagattctccgaatcatcagatggcattcacaggaacgtcacattgcgacgatatgatgtcaaaaacagggaggtatctgcgttatgagaagaatattggtagtagatgacgaagaaaaaatcagggcgattataagaaaatacggagagttcgaggggtacgacattaccgaggcaaaagacggcatggaggcggtaaagctctgcagagagcaggattttgacgtgattattctcgatattatgatgccggagctggacggcttttcaacctgccgggagatccgcaagaccaaaaacattccggtgatcatgctgtcggcacgcggagaagagtatgataagattcacggatttgaacttggaattgacgattatgtggtgaagccgttttctccgaaggagcttatgatgcgtgtaaaagtggtcattgaccgcaacggcggaagagattctgcaagcacgaacgggcatgagattttccaggcggaggggcttgtcattgattttaccggaaggactgtgacggtggatggaaagcgcgccgaactttctccgaaagaatacgacttgctgttttatctggtgcggaaccggaatattgcactggagcgtgaaaagctgattaccgaggtgtggggatatgattattacggggacgaccgtacgctggatacccatatcaagctgctgcgcagcagccttggggactaccgcaagttccttgtcacgttaagaggggtggggtaccggtttgaagcatgaaaaaatcagtatcaaatggaaaatctttttctatcttctggtgtttaccggaatccttttgacggtgctgtggcttgtgcagatctgttatctggacaagttctataagaagatcaag

SEQ ID NO: 11482 - DNA, 1726 bp, Unknown
  gut microbiota DNA sequence
attgaggacggtgtctatatcggcaatatttatgtgggcggcatgacggaggaagaagcggtcagcgcggtagaagcgtacgtggagagcgcagattcggcggagatgacattgaagaccggcgataagagcgtttccgtgacggcagctgatcttggaatatccttttccaacttaaacgtggtggacgaggcgatagatgtcggcagaagcggcaacctcatcaagcggtacaaggacaagaaggatctgcagcagggggacaaagtgattgcactctcactggatgtggattccgatgcggtggcatccatcctttccgagaaagcggcgcagctgaaccaggaggctgtggataatggtctggttcgtgagaacggtgcgtttaagatcattaagggcgagcagggcatcgaggtcaacgtggaggattccattgcggcgatcgagaactatatcagcagtgagtgggacggtggcaacgccgagatcgagctcgtggcggaagtggtggagccgcgcggcagcgaggaagatctggagcagatcacggatatgatgggaagctatacgacgaattacaaggattccggtcagaaccgttgcgacaacatctccaatgcaaccagcaagatcaatggtacactgctttatccgggcgaggaattttccgtctatgaagcgatcggaccgctggatgcggcaaacggatacgaactggcaggtgcctacgagaatggtcagacggttgagtcctacggcggcggtgtgtgccaggtatctacgactttgtacaacgcagtcattctggcggagcttgagatcacgcagcgctcgaatcattccatgatcgtaagctatgtgaagccatccatggatgcggcgattgcaggcgattacaaggatctgcgttttgtcaataatcaggacattccgatttatattgaggggtacaccgagggaaagaatgttacctttaagatctacggacacgacacgagaccatcgaaccgcgttgtgacttatgagagtgaagtggtatccgagcaggatccgggcacgcagtatgtggcgaccggagatccggcgggttatatgaagactgcgcagggcaagcatatcggctatgtggcaagactgtggaaagttgtcacggtagacggtgtggaggagagccgggagatttttaataagagtacctacaaggcgtctccgaagattgtaaacgtgggaacggcatcagcagacccgaatgtgtctgcggtgattggcgcggcgcttgcgaccggggatgaggcaaccatcaatgcggcggttgcaccttatgcggcgagtgcggcagcaatcttaaatccggcaccggtagaacagccgtcgcaggaagaacaggcgattactggaacggtggatgagagccagatcacaggcggagaataaaagtataagagattgtttaaggctgcctcagaagagacagccttaagctgtaaataaacgggagaacacagatgaagatcggaaaactgccggagagcgtactgaagcgctccgtattcaaacaaatacataccagacgccccgaggttgtcttaggagccggcgtcggagaggactgcgccgcgatcaagctggcagaggatgagacgcttgtgatgtccacagatccgattaccggaacggcgaaggacatcgggacacttgcgattcagattacagtgaatgatct

SEQ ID NO: 11483 - DNA, 6229 bp, Unknown
  gut microbiota DNA sequence
catcttgaggaaaggcagagagtgctctgcataccgcatcaggcagtcagccaatgtcggcgcaagtgtgcggcaaatgcacacatgattcttgaaaaagcagccgatgcacgaaaggaatcccgtcccgcacctagatcaatccggcagcaccggacgaaaaggagcgtacaatatggaatatgtaacaggagtgagcaaaaaagaaacggtggaaatcagtgaaatcctttccggggatttcgagggaaaacaggtaaaagtgaatggcgccgtccacaccatccgcgatatgggcgaggtcgcatttgtgatcctgcgcaagagagagggattactgcagtgcgtatttgaagagggaaaaacaaagttcgatttaaaagaactgaaggaagcgtcgaccatcgaggtggagggaaccgtgcgggcggagcaccgcgcgccaaatggatttgaggtacgtctggatacgatccgcgtgttgtcggaaccggcggcgcagcttccgtttgcgatttccaagtggaaactgccgacgacgttggagacgaatctggatcaccgtgcgatcgcgttgcgcaacgtcagagagcgggcgaagttccgcatccaggagggcgtggtcagaggattccgtgattttctgtacagcgaagggtttgcggagattcacacaccgaagatcggagcgaaaagtgccgagggcggtgcgaacctgttccggctggagtattttcacagaccggcagtgctgcagcagagcccgcagttttacaagcagatgatggtgggcgtgttcgaccgggtctttgagaccgcgccggtgttccgtgcggaaaagcacaataccaagcgtcatctgaacgaatataccagccttgactttgagatgggatacatcgacggattcgaggacatcatggcgatggaaaccggatttttacaatataccatgaagcttttggagcgggattacgccagggaattaaagatgttaggcgtgacgcttccgaatgtggagcagatcccggcggtccgctttgatgaggcgaaacagaaagtggcggaaaaatatcaccgccagatcagaaacccttacgatcttgagccggaggaggaagcgctgatcggacaatattataaggaagaatgtggtgcggattttgtgtttgtgacacattacccgtcaaaaaaacgtccgttttatgcgatggacgatccgacagatccgacatacacgttgagctttgacctgttgtatcacggactggagatcacgacaggcggtcagagaattcacgattatcagatgctgctggataagatcgagaagcgcggcatgacgaccgagggcatggaacagtatctggcggtattcaaatacggcatgccgccgcacggcggactgggaatcggacttgagcgcctgaccatgaagctggtcggcgaggacaatgtccgcgagacaaccctgttcccaagagatttaagccgcttggaaccgtagccaggacgaaaaagaacgttgcggctgaaatctcttttggattctaagctgcctggaaccgtagaaaaatacaaagcaacaacgaggcttaaattccatttggattctaagccgcctggagccgcagacaagacccaaagaacaaagcggcttaaaataacagcaggaaaaggaaacacacatgaacatagaagaacagattgcagactacaagccgtacaatgagcaggaagcacacgatcaggcagtgatgcggcagcttttcgccacacagccggatttatttacaagggagaatcaggtggcgcatatgacagcgtcatcgtggctgttaaatgccacacatgacaaggtgctgatgatctaccacaacatttatcactcgtgggcgtggacgggcggtcatgcggacggagacagagaccttctggcggttgcgaagcgcgaggcgatggaggagaccggcgtgacagaaatccgggtgatttcggaagacatcttttcgcttgagatcctgacggtcgatgggcatgagaagcgtggagtctacgtgccgtcgcatctgcatctgaatgtgacgtatcttctggaggcggatgaagccgaagtgcttcgcatcaagccggacgagaacagcggtgtgcggtggttttcactggaggaggcgctcgcggcgtgcagtgagccgtggatgattgagagagtatacaaaaagctgaatgcaaaagtgcgggagcgtttcggcgggacgcacgggatgcagagaggagaatgacagtgaaagatttgggaacaaaacggcttgagacagcgcggctgattttgagacgttttacattagaagatgcgcaaaaaatgtatgaaaactgggcgggtgatcccgaggtcacaaagtttctgacctggtcgacgcacgagagcgcagagaccagcagacagattttaaaagagtgggtggctgcctatgacaatccggaggtataccagtggtgtatcgaggagaaggagagcggagagccggtcggcagtatcggtgttgtgagccgcaatgaaaaagcacagtcctgcgagatcggatattgcatcagcaggagccgctggcacaaaggcattaccacggaggcacttgccgaggtcatgcgttatctgtttgaggaggtcggcgtattgcgcctggagtccagacatgatccgaagaacccgtattccggcgaggtcatgaaaaactgcggcatgcgctacgaaggcaccagaatccgtgcagactggaacaataccggtatctgcgactgcgctttgtatggcatggtgacatatgtgggcgatggaaatgcggtacagctgatagtggacgcgcagacagagggtgcggcacaaaaagcagtagatagtgcgcagacagagggaaaacagcagggagaacagaccggacacacaccgaagaacgtgatttccgatgagacgatcgagtatgtcggaatccttgcgaagctggagttaagtgaagaagaaaaagagcaggcgaaaaaggatatgggtgagatgctcgattacattgacaaactcaacgaacttgacacggagggcgtggaaccgatgtcgcatgtattcccggtgaataatgtattccgggaggacgtggtgacaaacggcgacggaagtgcagacacacttgcgaacgctccggtgaaaaaagacggcggctttaaggttccgaagacgatttcatagggcagggcatgggagagcgtgcatgcacatgaaagagggaaagtgaggaaaacagatgagtttgatgagtttgactgccgtggaactcggcagaaagataaaagaaaaagaagtgaccgtcgaggaggcagtgacggcggcgttagatgcgattgagaagcgtgaggcagaggtgcacagctttgtgacggtggacagagagggcgccttaaagcgtgcaaaggaagtgcaggcgaagattgatgcgggagaactgaccggaccgcttgcgggtgtgccggtagcgatcaaggataacatgtgcacgaagggattgcttacgacctgttcttccaaaattttatacaattttgtcccgacgtacacagcggaggcggttctgaatctggaaaaggcaggagcggtcatcctcggcaagacgaacatggatgagttcgccatgggaagcacgaccgagacctcggcgtacggtgtgacaaaaaatccgtggaacaccgggcatgtgccgggcggttcgtcgggcggttcctgcgcggcggttgcagcggaagagtgcagctatgcgctcggttccgacaccggcggctcgatccgtcagccgagctccttctgtggcgtgaccggcatcaagccgacttacggaacggtatcccggtacggactgattgcctacggttcctccctggatcagatcggaccgattgccaaggatgtgaccgactgcgcgacgatcttagaggcgatcgcatcacatgacgtcaaagattccacatcggtgcagcgcgaggactatgattttacagcggcgcttgtggatgatgtgcgtgggatgaagatcggtatcccgagagactatttcggcgacggactggacccggaggtaaaggcggcggttcttggcgcggcaaagaagctggaggagaaaggtgcgatcgtggaggagtttgatttaagtctggtcgagtatgcaatcccggcttactatgtcatcgcctgcgcggaggcgagctccaacctggcacgttttgacggtgtcaaatacggttatcgcacagagcagtatgacgggcttcacaatatgtacaaaaagacccgctccgaaggattcggcgcggaagcgaagcgacgtatcatgctgggttccttcgtgctgagcagcggttactatgatgcctactatttaaaggcactccgcacgaaggcgctgatcaagcaggcgtttgacaaggcatttgaaaaatatgatgtgatcctgggaccggcggcaccgacgacggcaccgaagcttggcgagtccttgagcgatccgctgaaaatgtatctgggcgacatctatacgatttccgtgaaccttgcgggactcccgggaattacgcttccctgcggaacggatcagagcggactcccgatcggtttgcagctcatcggtaattgctttgcggagaaaaaaatcatccgcgcggcatatacttacgagcagaccagaagctacgaacacagtccgttggcacgatgacagtgggaggatgagatagatgagcaaaacatacgaaaccgtaatcggactggaagtccatgtagaattagcgacaaagacaaaaattttctgcggctgctcgacagcctttggcggagcgcccaacagccacacctgcccggtgtgcaccggtatgccgggatcccttccggtattgaacaagcaggtggtggaatatgcgatggcggtcggacttgcgacgaactgcacaatcacccagtattgcaaattcgaccgcaagaactatttttacccggataacccgcagaactatcagatttcccagctgtatctgccgatctgtcgcaacggcggcgtggagatcgagacggctgccggcaaaaagacgatcggcatccacgagatccatatggaggaagatgcgggaaaactggtgcacgacgagtgggaggacgtgtccatcgtggattacaaccgttccggcgttccgctgatcgagatcgtgtcggaaccggatatgcgctccgcggaggaggtcattgcctatctggaaaaattgaggctgatcatccagtatcttggcgcatcggactgcaaattaaacgaaggttccatgcgtgccgacgtcaacctgtccgtcagggaggcgggagccgctgagtttggaacacgtaccgagatgaagaacctgaactctttcaaggcgattgcgagagccatcgaaggcgagcgcgcccgccagatcgaactgatcgaggaggggaaaaaggtcgtccaggaaacccgccgctgggatgacaacaaggagtcttcccacgcgatgcgatccaaggaggacgcacaggactaccgttacttcccggagccggatctggtgccggtggtcatcagtgacgagtggatcgagcgcgtgaaggcacgccagccggagatgagggatgagaagctgatccgctatcaggaggagttcggtctgccgaaatacgatgcggagatcctgaccggagacaaatcatttgcagatctgtttgaggcagcggtcgcgatctgcggaaagccgaaaaaagtctccaactggatcatgacggagacgatccgcctgttaaaagaaaatgaaatggatccggatcagatccgcttttcaccggaacatcttgcaaagctggtggatcttgcggatgccggttccgtcaccaacaccgtggcaaaggaggtcttcgagaaagtctttaaagaggacattgatccggaagcctatgtgaaggaaaaggggcttttgacagtcaatgacgagggagcactccgtgagacggtggcgaaagtcgttgcggagaatccacagtcggtggaggattaccacaatggaaaagaaaaagcgatcggctttctggtcggacagacgatgaaagcgatgaagggaaaagcaaatcctgcactggtgaaccagatcttaaaggaattgctgtaagcggtcagtgtcttttgtagtgata

SEQ ID NO: 11484 - DNA, 26662 bp, Unknown
  gut microbiota DNA sequence
ctattccattacagttgtagtaattactttaaaatttacttgcgtagtttttggcaccgttttggcaccgctgactacactttcactgttacacagacgtaaaaaggctcccgaggaaaacctcggaagccttttaaatactagttttgtgaacaatcactcgaaattactcaatgatggtagctacacggccagaaccaacggttctaccaccctcacggatagcaaatgtaagaccctgctccatagctaccgggtgaattaactcgatagtcatctcgatgttatcaccaggcatgcacatctctgtaccagccggaaggttgcaaacacctgttacgtctgttgttctgaagtagaactgcggacgatagttgttgaagaacggagtatgacgaccaccctcgtcctttgtcagaacgtaaacctgagctgtgaacttgtgatggcaggtaacagtacctggcttagcaagaacctgtccacgaacgatctggtcacggttgataccacgaagtaatgcaccgatgttatcaccagcctgagcctcgtctaactgcttacggaacatctcgataccggttacaacggttgtctgaacatcatctctaacaccaagaatctcaaggttatcattcagatgtaatgtacctctctcaacacgtccggtagcaactgtaccacgacctgtgattgtgaatacatcctcgaccggcataaggaatggcttatctgtgtcacgctgcggatccggaatgtactcatcaactgtatccatgagttccatgatcttgtcgccccactcgcccattggatcctcaagagccttaagagcagaaccctggatgatcgggcatccctcgaagccgtactcctcaagctgctcggtaacttccatctctactaactcgatgagctccggatcgtctaccatatcgcacttgtttaagaaaacaacgatgtaaggtacacctacctgacgggaaagtaagatgtgctcttttgtctgagccataacaccatcggtagcagctactacgaggatagcaccatccatctgagcagcaccagtgatcatgttctttacatagtcagcatggcctgggcagtcaacgtgtgcgtaatgtctcttctctgtctcgtactcgatgtgagcggtagaaattgtgataccacgctctctctcttccggagccttatcgatgttctcgaaatctgtagctgtgttaccagcaactcttgcagctaatactttggagatagctgctgttaaagttgttttaccatggtcaacgtgtccaatggtaccaatattacaatgtggttttgttctttcaaacttagcttttgccattttgaatatcctccttaaaatgatgccccttgcgggctatagttattatataagaataactcggctaactctgattatataaaataatcagcggtttttcaagctatttcttaccggatttcccctgtttatgggaaaatccgggatttttacaaactgcatacggaaagcttatttggacttgtcagccaataccttctcctgtacactcttcggtacctgctcgtacttctcgaagaacatcgagtagttaccacgtccctgtgtcttagaacgcaggtctgtagaataaccgaacatctctgcaagcggtacatatgcctttacaagcttaccgccgccgatatcatccataccctcgatacgtccacgacgggagttgatatcaccgataacatcacccatgtactcctcaggcattgtaacctcaaccttcatgatcggctcgagtaataccgggtttgccttgtgcatagcttccttgaatgccatagatccggcaatgtggaatgccatctcggaggaatcgacctcatggtaagatccatcgtatacgttcgcatgaacaccgagtaccgggaatccaccaaggatacctgcctgagcagcttcctcgataccttcgccgattgccgggatgtactccttcggaatcgcaccgccgactacggtagactcaaacttgaatgtctcttcaccgttcggatccatcgggtcaaacttcactttacagtgtccgtactgaccacgtccaccggactgctttgcatatttgtattcaacatcaaccggctttgtaaatgtctctttgtaagcaacctgaggtgcaccaacgttcgcctcaaccttgaactcacgaagcagacggtctacgatgatctccaggtggagctcacccataccggcgatgattgtctgaccagtttcctgatctgtatgagcacggaatgtaggatcctcttctgcaagttttgcaagagcctcacccatcttaccctgtccagccttggtcttcggctcgattgcgagctcgataaccggctccgggaactccatggactctaagattaccggatgctgctcatcacagatggtatcacctgtcgttgtgaacttgaatccaacggctgcagcgatatctccggagtatactttctccagctcctgacgcttgttggcatgcatctgtaagatacgtccaacacgctcttttttgtcttttgttgcgttcagtacataagaaccggagttcattgtaccggaatatacacggaagaatgcaagctttcctacaaacgggtcagccatgatcttaaatgcaagtgcggagaacggctcttcatcggaagagtgtcttactacctcattgccatctaagtcaacacccttgataggcgggatgtcggtcggagccggcatgtactcgatgattgcatcgatcagcttctgcactcccttgtttctgtaagcagatccgcagcatacaggtactgcagtacactcacaggtagcttttcttaagaccttcttcatctcctcaacggatggctcttcaccctcgaggtacatcatcataaggtcatcgtccagctcgcagatcttctctaccagctcgctgcggtaaagctctgcgtcgtccttcatatctccaagatcatcggtaacggtgatatcatcacccttatcgtcgttgtagatatatgccttcatctcgaacaggtcgatgattcccttgaaatcatcttccttgccgatcggcagctgaagaacgattgcgttcttacctaatcttgtacggatctgatcaacagcgccgtagaagttcgcacctaagatatccatcttgttgatgaatgccatacgcggtacgttgtaggtatcagcctgacgccatacattctctgactgaggctcaacaccaccctttgcacagaagacgccgacagcgccgtccagtacacggagtgaacgctctacctcaaccgtaaagtcaacgtgtcctggggtatcaatgatgttgatacgatgctccagagcacccggcttcggctttgtgaactcttccagagtccaatggcaggtcgtagcggctgatgtaatggtgatacctctctcctgctcctgctccatccagtccatggtagcagtaccctcgtgagtatcaccaatcttatagttaacaccggtatagtacagaatacgctcggtcaatgtggtcttacccgcatcgatatgagccataataccaatgtttctggttctctctaatggatattctcttccagccaaggtatttcctccctaaattagaaacggtagtgagcaaacgctttgtttgcctctgccattttgtgcatatcttctttcttcttaacggatgcacctgtgttgttagctgcatctaagatctcattagcaagtctctcttccatggtcttctcaccgcggttacgggagtatgttgtcaaccagcgaagtgctaaagcctgacgacggtctggtctgacctcgatcggcacctgataagtagcaccaccgatacgtcttgcctttacctcaagaactggcataacattgttcatggcctcttcaaatacctcgagagccggcttctcagccttctcctctactctcttgaaagctccgtatacaatcttctgtgctacacccttcttaccgtctaacatgatgttattgacaagcttggtaaccactttgttattgtacattggatctgctaatacgtctcttttctgagtatgtcctttacgtggcacggttcttccctccttaatcataatttactatacagaactctgtctgcattgcccggtctccagtctctggatccggaggacttcatttcgattaattcaacggtactcacaatgtagtggcaggtatctgccccttcgtgttcgtgcggaaatatatctctgtgtgaaacaattccaacacttaccatgtgatactattggttcgctgaattacagtaactctacgctactattttgcagcctttggtctcttagcgccgtacttggaacgagcctgctttctgttagcgacaccggcagtatcaagtgtaccacggataatgtgatatcttgtacctggtaaatccttaacacgaccaccacggatcagaacaacgctgtgctcctgtaagttatgtccctcacccgggatatagcttgtaacctcgattccgttggaaagacgtactctggcgatctttctaagagctgagttaggtttcttaggagtagctgtcttaacagcagtacatacacctctcttctgcggggaagaagtattggttggcttcttctgtaaagagttgtaacctctctgaagtgcaggtgctgtagacttcttaacagatgtctgacgtccttttcttactaactggttaaatgttggcattattttcacctcctgttttatttgtatgagatcataaattgatctcggcgtacgtatgcacgctaaatcattatattaaccctatctttttttgtcaagttcttttccaaaatttccttgaatttcgcggaatacgcgggtaaaaaagagttctgcatgcaaaaagaaaagatggaaaactcccaacggatatcttccatctattcttccacatttttacatgtttataccaaacggtcagccatttgcccgttttctctgcttctcctgtctctcactggtcagaatcatatagattcccagcagcatcacaccgatgcacagaacatatttcggatttaacgactgtccggtcttcggcgtctcatctttcgcctgcgagtcatccgccgcctgcgcattatcagccggctgctccgtctccgccgcttccgtcgtctctgccggctggctttccgcctggcttccgcctgctggtgtaatcacaaacccggaggttgcctgcgccgttgaatccgagtgacgctcatccactacgatgacataatcacacgcatgcacaaaggaaaatgacacattgccgtccgcatctgtatcagactgtcccatatactccaggatctgattatctacattataatagaacaaagtgcccagcttattggcgttcgccgcaccgacatttacggtcagctgcgccgtcaggccaaacaggttgtcgtgcgccagatgcatctgcgttgaccatccgcttccggttactgtgctctgcaggttcgccggcacattgcttgttcccagttccacgccaaaatccgtatctgctacaacgcttgtgtcaatgctgcttccgtcaatcgtccatgagattccatttcccatatccagaaccagcgtcagctgcttatctgccgccagtgtcagaatatccttcggcacaaccgtggtgccgttcatggtaatatagatcgttgaacctggatccgccaccgtcatctgcgtgtaaatcgcatcccagcccttcagttcctcatttccggtgatatatgcggttccctgctctgcaaatctggtcgtcgcaggcacttccgccgctgtcggctgcacatctccctgtgtctccgccgtcgtcgctgccgccgatccggtaccgctgctctgtgcgcctgccgctccggcactgccctttaccgcaccgctgcctcttccactgccgttgccgcttctgctgcctcttccagatgatgtgccgttactctttccgctgctgccgcttccgctgcccgtactgctgctgttattaccactgctcgtgttgctgctgttattgctgctattgttattactgctgttattgttattgctgttgtcgccgctgttattgttgttaccgctgttattattgtcgttgttattgttgttattgttgttattgttgttattgtcatctgccggtttttccgtgtcctcggtcggcttctccgtatcctccgtcggcttttctgtatcctcggtcggtttctccgtgtcttccgtcggcttttccgtgtcctcggtcggtttctccgtatcctcggtgtcgtccggcttataatccgtcaccacaatcgcaccgtacgtctccaccagcttcggtgcagccggagcgcttcccggcacttcaatcgagtggatcttgaaagaagtattctgctcgccaaacgtttctaaggctttgccaaggcagagcgtctgaatctcactgccgtcaaatgcgccgtcttccacggttgtcacgctctccggaagtgtcacttttccaagcttgcagccgtaaaatgcattttcaccgatcatcttggtgccgtcatatacctcgatggttctcgcaccctgcgggcaacggtataacgtaaccccgttcgccgtgtagagcgcattgtcgtatgacataaagtatgtatttccctcttccacatcaatagactgcatgttgacacatccgtcaaatgcgtccgacgcaatggttttggttgcctcggggatcacgatgctctcgagggactcgcaatttttaaatgcttcttttccgatcgatggaagttccctggaaatacttaagtccgtcagtcccgcacactctgcaaatgtgccgtcgccgattccttccttgctctcccatgttgcgctttccagactggtacagccgtagaacacattgtctccgatctttgtcacgctgtccggaaccgtgacctcggtcagatattcacatcctgcaaatgcgttatctccgatggttgtcacactgtccgggatctccaccgatgtgatcgtcgtattgaggaatacatcatcatcaatctttgtaatattgtccggaatgacaaccgcgttctccgctccgacatacccctgcagggttgtcccttttatgacaaatccgtcctcctgaccggacgctgcactgagctctccgggatagatcattaccacaagcatggcaacgaccagcacataacctatttttcgttttatccggtatttcattagcactctctcccatcatcctttatttcgccgcagccccgcccgtgaacctcacgcgcgatcccacgcttttactctgcttccctgcatttcttcgccaccagaaacagtcttccgtcttctgtaaaattgttacaggtcgacagggtcagtagctcgtccccgtagaccggcagatctgttccggtaaacaccgagagttgtatgatatgatcgaggtagtcgttaaacgcctcctcggaatctgcctgtataaaatcgtaataacgaaattcctgcgaattccggtactgcacctttgccagacagacggcaaacacttcataggtgcctttctcataaattgtatcaaatctgatctgcgcgtgctctctccagtaatcttcatccagatacttcttgagacttccgaacatcgcaccgcttttcatgttgtgtccgtagataataatattggtgctgcgctgcaccagatccgttctcggatccataaacagggttccgttgatatcgtcctccccgtttacattgcgcttcagataataatccccgtcattcggggtaagcatgaccggatagtcaatcttcgtcccgtcaatggtgatccatccggcaaaatcgctgtgtttcgccacaatggcttcatattccggcagaaccggaggaggcggttcgttctcccgctccgtctggtctaaacccgccgcaagttccggtgcgtcctccgaaaaaaaggtgtcattgtccaccatctctgcagcttctgtcggattttcttttaacatcttcaaatactcattcgcctgactgccgcggtgattcgtgtaatctgaccagaaataccagccaaaacatagaaatgcggccgtcacacacaccgcaccgagaatctttctgctgcggtcctgcgccccctgccggggttcctcccccgcctgttgttccggtgcctgtgcctgcgttatattttttgccgcggattttgccacggcatctgcaatatccagaaaaaatttcttgccgactttgctgccgaacttgatcttccctgttcggatcagccaatagaggcgtagagcggtttccggttcattgagatcgacggtgctctgaatcttttcgattttcttcgcatcttcgagtcctctggcatattcctcttctgtgtcaaatgtaaaattccctatcttatatgccgccatgatcggaaccgctctccctcctctctgtctttattttgtggttgttccggtaactgctccggtaaactcaccgtagtaagtctcgccgtccgccaccaggtagcttcttactttataagagtatgttgtctctgccgcaagctttttatcggtatagaaagcgtctctggtacgcgttacctgctgccactttccatctgcgccggcacggtatacttcgtatcccgtcacggcaccgtcgcccgtccagctgatggacagactgtctgcggatgcgcctgtcacaaccgccgcgcccgcatcgcacggtctgatgtcaaacgtcaggttctttgtcgcggtgtaattgccctttcctgcaactgccgccacaccggtacctgctttgcggttgttggaatacatcagtgtgtagtcgcttaaaagttccagggctttgccgtcatcttccaccgtcacggtcggcttgatgtcagatccggtatatacctgtgtctgaatcgaaccaatgtcgcacagatgtatgctcttgcgcagaatctggaaactcagttccttagtacctgcataatgggttccgcttgctgtgattaccagcttcgctacacccgcgttgatgttgtcttcataggataccgtgtaatccttatctttttccagctgcacaccgtctgcccatacttccggctccggtgtgattgcttttccggtatatgtgtaagtagaagaaatacccttcacttccagtccgtcgatcggtgtctggtctacggtaaactgctttgtaacggttcctgtatagttgccggttccggcagcctccatctcgtaggttcctgccactcctgccggtctgcatgtcactgtataatcggtgtctcttacgagtgcgatctcaccccactggaatgttacattctgtgtaatctgctctgagtaggagaccgtgtcctcaaatccgctcatcaccacatcttcatcggtgatgtccttcggtgtaatctcgatggtgcatttcctggttccgccgtagcttccctgaccgatcagaagaagggtctgcgttccggcgctcatgccatcgctgttgttgtcaaatgcaaagctgtaggagtctgttgtaaggaccttttcgccgatgcgtacctctgtaatgcccagatcatccggcgtataagcgcttcccgtgaacgggtaactgtcacgcagtcctacaatctccgccggactgatgtcgctcgcaatatgaaatgtggtctggcggtaattcgtaaatccgccggttccgttgatccgcatcagcacagtgccgatctctgtgttgtccgtgtcaaagctcagtgtatagtcctcaccctgctttaaggtgtaatcgccgcaggtcactttgacttccggaatcaccggctgacctgtgtatgcctgattcggaatcggatccaccgtaacatccgccgctgcaatatcgtggcttacgatggtaaacggtgccgttacgcttcccgcataacttccttttcctgtcacggtcacagttgcggtaccgcacgccttgttgttctgataagatacctcataatccgcacccgctgtgagtacattgccgtccagtgttacctgcacttccggttccaccccgttgtcgcttcccatatacggataggaagttccgttcgggaacgtgacaatcgctccgtcaaagctcttctccgtaattgtgtattccacggtgcgggatcccgtataatttccgataccggaaatcaccgctgtcgctgttcctgcattgatattgttgctgtatgcaacggtaaaatcgcttccctctgtcagctgacgtacctcaacctctgttccgtactgatatgtcacaagaacagtcggcttcttttccgttccgtcataagaaaagctgtccggaatcacttctaccgcaatcaggtcggtgccggatgacggttttgccaatgatttcgccacgatctggaaggatacttcacggcttccgattacgttgcttccatcaccggtaatcacgactgtaccggttcctacattcgtattatccgcgtctgccttctttgcaatggtatagcttcttgccggcagaatgtaatccgttgatccgatggttgtcttcaatgagaactccggcacaatctccttaccggtgtactctctgcttccgatcgcgttctgcgttccgtcaagcaccttcaggtcgtccatctgaagtgggttaatatcaaaggttaccagcttgatcagaccagcatactcgttcttaccctttaccataatgcttccgccgtctgttcccgccttgatattctctccataggtcacatcataatcggacgtggacagtgtcttgttccctatcttaacggtaacctgcgggcggatctgtgttccgcggtacaggtagctgctctctacaccgcttacctccagaattcccgcatttgcaacaatgctgaaattctctgtgagtgttccggtaaatccgtttttctcatttccgattaccgtcacgctcgcagtcttatcaccgatcttcacgttgttttcgtatgtatgaatcacaaagtgctttccggatgtcagctctgttccgtagtagctgatgctcgggattgcctccaccggatctccggtatactgctgatctccgattgccacctggatgcctgcctccgaaagatccgctttgatcggaaccgtcttctccacgcttcccgcaaagcctcccatacccttgatggtaactactgcgttgccgacccagctgttgtctgcatagaccagcgtatagtcggtatctttctgaagtgttgttccgttcagcacaacactgatctgatcgtcaaacgtgatgttcttatcgccgattgcaatgtccgtctctccggcattcacataatctttaaaccacagttcatccggaacggtaatctcggcgtccgcaatgtttgcgcagatcttaaaggtcttcttcacgcttcctgtgtaattgccgattcccttgagaatgacaaccgcgtcggagccaatgctgtcgttcttctcataagtacaaatataatccgtacccatgacaagttctgttccgttatagtacagcttcggctgcggtgttgccgttccgtccaccagcggctgcggttcgatcgctccgatcttaaagccgtttgccggtgtatatccgccattgccaatacttgcaagtgtgatcgtaaaggttgtgcttctcgatcctgtaaagtccgtaccgtcctttgccgttgccgtcagcgtcacggttccgcggctggtatgatccgccccgtaggataccgtgtaatccgtcgtgctgatcttctgtccgtcataagtaagctccacttcaggctctaccgggcttccggtatactgtgtctgataacttccatcggtcactccgccgacagagagctctacgctgctgtccgtaagatctctcggtgcaatcgcaaaagtcttctgccatacaccgacgtatcctcccagaccttccacgcttaccgttgcggttcccgcgtggatattatccgtatatgtcacggaatagttagaatcttttaccagctttttgttgccctcgatccgtgttaccgtcacctccggctcaaatgcacttccgtcataaacatactgtgtgccgtcggtgagtgccgggcagctgatcgtaaatttgctctcgtttgtgatgagctggccaattctgaattctgccgtcttgcttccggtaaagttgccggttccggtcactgtcaccgttgcggttccggttcctttgttgttcgcgtaagccaccgtgtaatcgttgaccgggcttaacgcataggttccgtctccaaattcatagcttaccgacggtgccggtgtgacagccattccgttgtactcctgcgcgtcgatcggtgcgatctttacctccggctctgccagattcttcggcgcaatcgtataatctttcgtaaaggttccctgatagtttccttttccggtaatcgtcatcgttgcggtcccggcatccacattattctcgtaggaaatcttgtaatcatccttgccaagctttttcttcagatctgtgcactgtaccgtaggtaccggtgtaatctcttccgaagtgtaagtgtagctggactttaatccgccaagcgtgcagttgttgtccaggcttctcggcagaatcgcaaatgtcaatattctgtcatctgttccgtagtaatctcccttgccggaaacggtgatggatgcctcgccggcattcaggttgtccgcgtaggaagactcgtcatacgcgatcactttctcgatctcatcggctgtcgtaagctttgttccatcgctcagcgtcagctcggtgatcttcggatacagacgctcgccggtgtaggtcgtctcgttctcatccaccttccagctgatgatctcgtccagggattttccgctgatggtgaatacaataatcttcgttcctgtgtagttgccgttaccctgtatggtcacatttgccatcggtcccggtttctcgttgttcgcgtagctgccagccacgatcgaatagtcggtcggcgcggtcagtgtcttcttattataagtaagctttatctcactttctgtaagggtcactgcatttccgtcgtacgctttcttgatcgcctcgtaggaaacaccggttgcaatgtccttcggacgaatcgtaaaggttgcactcagttttgtggcgccgtcgctgtacacatagcatccgtttgccgtcggctgatcctccagcgggatctgctctactgtaaccgtcgcctccccggcattgatcgcctgatccgcgttggttccgtcactgtagttgaccgtataatctgttccctgctcaaggacgctcttccagagtccgaatccgccgtccgataccgaaatctcatccgcagcaagcgtaatcggatctcctgtgtataccgggttttctgccggatttaccgatacatcataatcctcatcaagcttggatgcgagcagatacttgatctcctgcttgccgtagaatttgccttttccggtaatcgttaccgaagccgtgcttccttcttttgaaatatccttgatgccgtcatactttaattcgtaatcagttccttttaccagcgtattgccctggttatccgtgagtgaaatctcaagctggttatcgtttttattgctggaataccacagcattgcccagtatggtccgtcatatcctgtcaccatcctgtccgcgctgttggttaccttaaggttcttgtcgttgatcagtgtctggatatctaccgctgtaacctcaaacgtcctggtaacaacgcctgtatagttgccgcttccggtaatcgtcatcgtgtaggttccgatgtcttttaccgttgtcggtgaacatgccaccgtataatcggttccctttttcagtgtatgatctgtctttgatgcggaatgatatacaacactctctgtcggaagcgcaatctctgctcccgtatagtcaaacagctctctgtcaatgctggcagtaatcttcgtgcttgtaagattgcactgggcaatcgtatacgtcagacgtttcgttgtaccggtcttaaaattgctgttggaatcgctcggcgcaatctcaacgctcgccgtacctgcaaatatcttggtatccgcagaataggtcagcttgtagtccgactccggaagtgttaccatgtccgcgccctgcgcaaactttacaaccaccttcggcttcacgtctgctccgtccggagaatattccatcttatagtttgcagtgcttacctcggagccatcggcatccacatagtagcataccgcctttgacatgtccgcctgctcgattgtgaatttaccggtcactgcaccgccgtatgttcccataccctgcagcgtaatggttgctgttcctgcattcgtgttgcttgcgtaagtaacggagtaatccgttccctcaaccagtcccagatcgttgttgccgctcttccaggtaatgtccggttccggtgtctgtgcattgccgttataagttacagccgctgccgtcactttctggatcaggtctgagagatcagcgcctgccgcctgatactccaccgtgtaggttccctgatagtttccgataccggtgatgacacggcggtaggttccgtttccggcattgataatatctgttccgacggtgtaatccgtccccttctccagcgtcatgccgttgtaggttgcagtgatgaccggctccttgtccgctcctcctgccgcagcagccgtcacagacacagccatgccaacttcttcctgatccttgttgccaatatcttttgccttgatctcaaaatttaccgtctttgttccgtaaagagaattctttccggtaatcgtcaatgtggcctgtccgacattgacattgtcagaatataccgcatcgtaatccgcctgagaaatggtctccccgtccaccagaagctggaatgccggcgtccactcacttccggtatatacataggaagtcttgtcaaaaacaacattcgcgtccgccgcatttcgcggtgcaccgcaatatctctctccggtatagttgccggtaccggtcagtgtaattcctcttcctgtcttgctgagggaaatcgtgtaatctgttccttcaaccagattcttcacgccgtctacggcatccgcatctgcacgcgccgtatcctttacctcttggatgcaggaggtaagtgtggcagaagcgttgtccggatctgccgccgcatcagccagcaccttatcccagtcaatattgtcctgcagtgtcacttccactgccgcgtctgatatatccttctgtgcgatcacgtattccttctgaatctttccgctgtaaccgttctgtcctgtaatgtacaagtaataggttcccgcattcacaaacgcggttgtgtccgtggcaggatcaaacgttgctgccgcgccaccaaccatctgtgcataggaaagctggtactgatcgttctcttttaatatggtatctcccacctgtaccgcaacggatggaatctgctgtccgccgttgtataccggattctccgggctgactgtcaccgcatcctctgagagattcggtgtgactgtcaaattacatgtgtagttctctccggcataggctgccgtgatcgtcgtacttcctgcggcaataccctcaatggttgccgggttacctgtactgcttacttttgccaccgcttcattgccggaaacccacgttaccgttcccgtggcattctgcagtgtgagatcctgatccgtccagccctcgccgatggtcatgctgttcttgttcagtgctacagcggcactctgcttcacattgctgctctgcagcgccgcctgatcagccgcattggaagaacttctcccggatgttgcagtcacatcataggtatatgctattaccgccgcacagcttccgttcgctgtatacatatcctgccagccggcattgccgagaatatagctctctccctctgccgtaccgccatatacataaaaggacgccccgctcaaccggacgatcacagaaaacctggaaccattctccattacctgattcgccagccctgcggaataagtattctttccttccttcacgctgacttctttttggaaaatgctcgttcccgcatccggcgccatgccttctacatccttgtaatattccacggtagccgttgccttgctgccgtcatccacatgtgcgtagaagtcaatactgtctaacagttctgctccgtccgcattgcggttcgctgtaaataccgcagctacagcctgggcctcgcacggcgctcccgccagtaccccgtctccgttccgataggtgtttaccgttccctgtcctgcccagacagtcgtcggccattccaccatcgtcacaatcaggcatactgtcagcataaacgccgaaattctcttgcatacatccttgtacatacgcgccatctcctttgatctatccctttagcgttcgtcccattttatgaaactctaaattataccttatctattttatcgacatcttttcacggttctttaacatcttttcaaaaaaaacgaggcagccatacattatctggccgccccattctgtaatgcagatataatctgcgctttattcttctgtatcctcggactcttccggcacattctcctctaatgcgtaattctcatctgccacatcagtgtcatcaaaatcgtcgaaatcatcgaatgcaatctcctcgttctcatcaatatccgagctcagcttgatattgcggtatctcttcataccggtaccagccggaatcagcttaccaatgataacgttctccttcataccaatgagcggatcaaccttacccttgatggcagcttccgtcagaacctttgtggtctcctggaaggatgctgctgacaggaaggagttggttgcaagagaagcctttgtgataccaagcagtacctgcttgccttctgcaagctccttgccctctttctccagaagctcatttgtatcctcgaagtcaagcgtatctactaatgttcccggaagcatgtcggaatctccgtttgtctccacgcggactttctgcagcatctggcgcacgatcacctcgatatgcttatcgttgatctcaacaccctgcagacggtatacacgctgtacttcgcgaagcatgtaatcctgaacggcacgcacacccttgatctttaagatatcatgcgggttgacagaaccttctgtcagctcgtcgccggcctctaagactgcaccgtccataaccttgattctggaaccgtaaggaatcagatatgccttgctctctccagtctcattgttcgtcacaacgatctcacgcttcttcttggtatctttgatattggcaacaccgctgaactcggtaatgatcgcaagtcccttcggctttcttgcctcaaaaatttcctcgacacgcggaagaccctgtgtaatatcggtaccggcaacaccacccgtatggaatgtacgcatggtaagctgtgtaccaggctcaccgatggactgtgccgcgatgataccgattgcctcaccaacctgtaccgcctgaccggttgccatgttggcgccgtagcacttcgcacacacacccatgtgggaacggcaggataatacggtacggatcttcacctttgtaagcggttctccgttctcatccacacccttgctcataacaagtgctgcgcgcttcggtgtaatcatatgatttgccttcacgaggacattgccctcggcatcacagatggtattgcaggagaaacgtcctgtaatacgctcctgaaggctctcgatctcttccttgccatccatgaatgcagttacccacataccagggatctctctgcctgttccctcacagcagtcagactcacgaacgatcatatgctgtgatacatctaccagacgtctggtcaggtatccggaatcggcggtacgaagagcggtatcggacataccttttcgcgctccatgcgcagacatgaagtattccagtacgtcaagaccttcacggaagttggacttgattggcagctcgattgttctaccggttgtatctgccataagtcctcgcataccagcaagctgtttgatctgcttatcggaaccacgggctccggaatccgccatcatgaagatgttgttgtacttatccagtccggagagaagtgcatgtgtcagctgctcatccgtctctttccatgtctctacgacttccttgtaacgctcttcctctgtgataagaccacgcttatactgctttgtaatgcggtctacggtatcctgggcgtccttgatcatctgtggcttttccggcggctcggtcatatcggaaatggatacggtcattgccgccctggtggagtatttgtaacccatcgccttaacagcatccagcacctcggcagttctggttgcgccgtgaatattgatgactttctcaaggatctgcttattctgcttctttgctacgaggaaatcgacctcgagctttaattcattgcccggaatgcttctgtctacaaagcccagatcctgcgggataatctcgttgaagatgaaacgtcccagcgtggactctacgattccggtaatcttttttccatccggcatggtcttgctcatgcggactttgattctggagtgaagtgttaccgcgccattctcataggcgaggattgcttcgttgacactcttgaagaatttgccttctccctttgcgcccggtctctcctgtgtcaggtagtaaataccaagcaccatatcctgtgaaggaacggctaccagcccaccgtcagacggctttaacaggttgttcggagagagcagcatgaaacggcactctgcctgtgcttccacagaaagcggaaggtgaacagccatctggtcaccatcgaaatcggcgttgaacgcggtacacacaagcggatgaagcttgattgccttaccctctacgaggatcggctcgaatgcctgaataccgagacggtgcagtgtaggagcacggttcagcataaccggatgctctttgatgacgtcctcgagcacatcccagacctcagtctgaagtctctcgaccatcttcttcgcactcttgatattatgagcggttccgtttgcaacgagctccttcataacgaacggcttgaacagctcgattgccatttccttcggaagaccacactggtaaatctttaacttcggctctacgcagataacggaacgtccggaatagtcaacacgcttaccaagcaggttctgacggaaacgtccggacttaccttttaacatgtcagacagagacttgagtgctctgttacccggtcctgtaacaggacgtccgcggcggccgttatcgatcagggcatctacagcctcctgaagcatacgcttctcgttgcggacgatgatatccggtgcgccaagctctaagagtcttctcagacggttgttacggttgatgattcttctgtacagatcgtttaagtcggatgttgcaaaacgtccgccatccagctgtaccatcgggcgcagatctggcggaatgaccgggatgaccgtgaggatcatccactccggcttgttgccggactcgcggaatgcttctacaacttccagtctcttgatgatgcgcgcgcgcttctgaccggttgcgtctgcaagctctgcctgaagctctgcggaatccttctcaagatcgatcgcgtgtaacagttcctggattgcctcggcacccattccgacacggaacgcattgccgtactgctctctggcttcctgatattcgctctcggaaagcacctgcttatactgtaatgccgtgttaccggcatccagtacaatgtatgatgcaaaatataataccttctcaagagttctcggtgagaggtcaagaatcagtcccatgcgggacggaattcccttaaagtaccagatatgggaaaccggagctgcaagctcgatatgtcccatacgctctctacgaacgcttgcttttgtaatctcaacgccgcatcggtcacataccacacctttgtagcggatcttcttgtatttaccacagtggcattcccagtccttgctcggtccgaaaatcttttcacagaacagaccatccttctcaggctttaatgttctgtagttgatcgtctcaggcttcttaacctcgcctctggaccactcatgaatcttctccggtgatgccaaaccgatcttaatggcatcgaaagagatagactggcctgttgcctctttattcattgtctctggcatttatgacactcccttctatctattcttcgtcaagaacgtcgtctgatgactcatcaaaaaactcagaatcgtcttcatcctcttcctcatcttctacgtctaccagttcctcgttctctgtatcaaactgcttctgggagaatcccatctttgcaaaggactcgctgtcttcaaatgcaaaatccttatcgccggaaatgatagaatttaaatcggtattaccgtactcactggtctccatgagttctacttcgttgcggttctcatcgagcactttgacatccagtccgagggactgcagctcttttaagagaaccttgaaggactccggaatacccggctcagggatattgtcacccttgatgatcgcctcgtaagtcttcacacgtccgaccacgtcatcggacttcactgtcaagatctcctgtaaggtataagatgcaccgtaagcctcgagtgcccatacctccatctctccgaaacgctgtccaccgaactgtgccttaccacctaacggctgctgcgttactaaggagtaaggaccggtagaacgtgcatggatcttatcgtctaccaggtgatgcagcttcaggtaatgcatgtgtccgattgtaaccggtgaatcaaacggctctccggtacgtccgtcacgaagctgtacctttccgtcacgggaaatcggcacgcccttccacagtgccctgtgtgcgcggttgtcatacaagtacttcatgacttcctcgttcagtgtgtctttatattttgcttcaaagtcttcccactcgaagttgacgtaatcattggcaagctccagcgtatcctggatatcaatctccttcgcaccgtcgaataccggtgtctcaatgttgaagcccagtgcttttgcagcaaggcttaagtgaatctcgaggacctgaccgatgttcatacgggacggcacacccaacgggttcagcacgatgtcaagcgggcggccattcggaaggaacggcatatcctctaccggaagtacacgggaaacgacacccttgttaccgtgacgacctgccatcttatcaccgacggagatctttctcttctgtgcaatgtaaatgcggactgcctgattcacgcccggagacagctcgtcgccgttctctcttgtgaatacctttgcatccacgatgataccgtactcgccgtgcggcaccttcaaggaagtgtcacgcacttctcttgccttctcgccgaagattgcgcggagcagcctctcctcggctgtcagctcagtctctcccttcggagttacctttccgactaagatatcaccggcgcgaacctccgcaccgatacggataatacctctctcatcgagatccttcaacgcgtcgtcgccgacacccggaacatctctcgtgatctcttccggtccgagcttcgtgtcacgcgcttctgcttcatactcctcaatatggatagatgtataaacatcatcctgtaccagacgctcgctcaaaagaacggcatcctcgtagttgtaaccttcccaggtcatgaatccgatcagcgggttcttaccgagtgccaactcaccgtttgcggtggaaggaccgtctgcgatcacttcgccaacctccacgcggtcgcccttaaacacgatcggcttctggttgtagcagttggactggttacttctggagaacttcgtcagcttgtatacatctctgccgccctcgtcattcttgatgatgatctggttggactcagagctctcaacaacaccggcttttttcgccacaacacacacaccggagtctaccgctgccttcgtctccataccggtaccgactaccggcgcctctgtggtcagaagcggcactgcctgacgctgcatgttggatcccatgagtgcacggtttgcatcgtcgttctgcaggaacggaatggatgcggtagcgacggagaacaccatcttcggggagacgtccatgtaatcaaacatggtcttctcatattcctgtgtctcatccagataacggccggatacggagttacggacgaaatgtccttcctcatccagtgcctcattcgcctgtgctacatggtagttatcctcttcgtctgcggtcatgtagacaacttcgtctgtgacacgcggattcttaggatcggatttatcgatcttacggtacggagcctcaataaatccgtactcattgattcttgcatagcttgccagagagttgatcagaccgatgttcggtccctcaggcgtctcgatcgggcacattcttccgtagtgggagtaatgtacatctcgcacctcgaatcctgcacggtctctggacagaccacccggtcccaatgcggaaagacgtctcttgtgtgtcagctctgacagcgggttgttctgatccataaactgggacagctgggaagatccgaagaactcttttacagctgcggttaccggcttaatgttgatcaggctctgcggggaaataccgtccagatccagggtggtcattctctcgcggaccactctctccagtctggaaagaccgatacggtactggttctgtaacagttctccgaccgcacggatacgtctgttacccagatgatcgatatcgtcatcatgaccgatgccgtactccagatgcatgttatagttgatggatgcaaaaatatcatccttggtaatatgcttcggaatcaggtcatgcacattcttgtgaatggcctcctttaaatcctccacgtccggatattcatccatgagctgctttaataccggatagtacacgagctctgtgatgccgagatccttcgggttgcagtccacataatgtctcagatctaccatcatggaagacagcaccttgatatttctggtctcgccctgaatccatacatacggaacagccgcgttctgaatatcatccgccagggatcttgtcacttcggttcctgcctcggcgatgatctcgcctgtggacacatcgacaacatcctctgccagaacatgtccgttgatacggttgcgcagcattaacttcttattaaacttatagcgtccgacctttgcaagatcatatcttctcgggtcaaaaaacatagcagaaataaggctctccgcactctcaactgtcagcggctcgcctggtctgattttcttatataattccagaagtccctcttcgtagttggttgccacgtccttgccgaaacttgcaagaatcttcggctcctcaccgaacaggtctacgatctcctggttgcttccgacgccaagtgcacggatcaataccgtgatcggcacctttctggttctatctacacggacataaaatacgtcattggagtctgtctcatactctaaccacgcaccacggttagggatgacagtacaggaatacagctttttacccactttatcgtgagcgattccatagtagatacccggggaacgcaccagctggctgacgataacacgctctgcgccgttgatcacgaaagtaccggtctctgtcatcaaaggaaggtcgcccatgaaaatctcatgctcattgatctcgtcagtctccttgttgtgaagtctgaccttgaccttcaaaggtgccgcataagttgcatctctttctttgcactccggaattgtgtactttacatcgtcctcacacaatgtaaaatctacaaactccaggctcagatgaccgctgtaatcagcgattggagagatatcatcgaaaacttctttcaggccctcgcttaagaaccactgataggagtctttctggacttctatcagattcggcatttccaatacctctttctgtctcgagtaactcatacgtatgccctttccagctttcactggacgtattctgtttttctccattgacgtttcacctctcgtttttatttacactaagctgccccaaaagtggcagcaactgtctcaatccaccgtaaccacaagatacggtataggcacatccggcggcatacaacgcgaaaagcgcgcaataagcccaatgcaccacaatagtgcaacgtatatgatagcacaatagcaagtgccgcgtcaaggattttttaaaatatttattttttctccgtgagtacgcaaaaaacgacgaaggaaagctctaaagccttcgctccgccgttcgccaccgcttatgagacaagaaaatttgccgccgcgcgggttctctgttccatctgttttttctgcataaaaaatgcatattgctgcagggtctgcttctttttctgttcggataccgcctgtccgtaatccagatcctcgagccggctttttcctgccgttacattcagcctggtgttggtactgtagcggtacgcatactccaatgcattgctctgtgcgcccataccgctgcgccctgcactcactctggcaagcgcatcatccacctgtgtcagatcaaaatctttcgtcacatcaaagtccgcaatcccaagtgcctgtaatgtggcatctgcagtcgtaatcttcattccgttgccggtggcatccgtcatgatattgtacttctgcgacgtgccatccagaagcggcttcgtgttaaagcttgtctgttttgcaatatctgaaatgccctgcttatactgctcgatctgcgtctgaatacttgtccgctccgcatctgtgatcgtcgccgtattggacgcccgaacaccaagttcacggatcttctgaagataatccgcaatcccgctcattgcgccatccgccacattcagcatatcttttgccgcgccaatgttgttctccccgaccttatagcttctggtctgcgtctcctgcttctggatgatcgcaagctccgccgcaccgtccgccgcccggttcacttttttgccgcttgcaaatttcccgtaatctgcataagatgtgctgcttcgctgcatcgaagtaataccgttcataaaagcctcctttctgttctcaagttccgctgctctccctgcccgccttttctattttctttataacacacaataccgctactcttcaagtatctcctgaatgtaataccggctttgttttgcgagatcgacaaaagtgtcccccacctgcacaagcggacatgacagcttatatttgttaatcatgaccactcttcccatcctgccatcattcaggatcacgttgcgctggatcatcgtctcggcaatccgcttcagaaatgtcatcagatagttggcgtccagacggttatacccctcatcctccatcttcttgatcgcttcaaatgccgagatgcccgctttatctccctgacgcatcgtaagggcatcgtaagtatctgccaccgcaagaattctggaaatccagttgatgttatcccccattacctgcagtgggaacccgcttccattcacgcgctcgtggtgcgtcagaaccgcctgtttaatccgctggtctatgttcatcttcttaataaggttgtatccgctcacgacatgtttctcatatcgttccgtctcgtattcttgcagaaattccgtctgttcctgcccgtccttccagagttcaagaaatccaatgtcatgaagcagccccgccgccatgacctcctccatctccgcctcggtgcatccgctccaccgtgcaagaagctgtccaaaaagcgccacgttaatggtatgtgcgtacagacctgactgctgttttttcatatgaagcagcatgtccgcaagatctgtatcatcatctgcttttttcagcagtccgttcagcggctccagcagcatggaaatgttcacatccttactccggtatacaatatctttcagttcttccgaaatcgactgttcggcaaccgagaactctgcctggaactctttcagatgctgttccttcgccggcgcactctgttcctgctgttccgggcgttctttcctgcccgtcggatattccaccatcacactgtccacaaaatgtctggtcagcagcgcgacgacgtccttcgtgacgaccgctccgtccggcacaatcaccgcccctgtctttgaaaacacatcctcttttatcatcattccctcccgcaggcggttgaccgacatcctcaaacacggcatggtatcttctcctctttcccgtactttcatcctctaggaaagtactattttcctataaagtctgttagtactatcatataccaagtattttcttttgggaagtagggaatttattttcccgtagcggctgtcgccgcgcataagcaaaaacggcgcgaccgccgggaataaatt

SEQ ID NO: 11485 - DNA, 3836 bp, Unknown
  gut microbiota DNA sequence
gtagtcacgccgtttccgcttatatgcttctcgtagcttacgcgattattttaaagtaacctttgcgccctcagcctcaagtttagccttgatgtcgtcagcggttgccttgtcagcagcctctttgagaaccttaggagctccatcaacgagatccttagcttcctttaagcctaagccagttgcctcacgaacaaccttgataaccttaaccttgttcgggccaacctctgttaactcaacgtcgaactcagtcttctcttctgctgctgcgccgtcaccagcacctgctgctgcaactacaacgcctgctgctgcagatacgccgaactcttcctcgcaagcctttactaagtcgtttaactctaatacgcttaactctttgatagcatcaataaattctgctgttgtcatctttgccatgattattttcctccatttaatattgagattgtatcacgatgatacgttttctgcctgcagatccctgcggcttttttcactacattcgatccggattattctgccggagtctctgctgcttctgctgcaggagcttcctctgccggagcagcctctactgccgcgtcagctgcaccgcccttttctgcgatctgattaagaacgcgggcaagattggtaatcggagactgtaagcttccaagtaacttggaaagaagaacttctcttgacggaatcgaagagattgccttcatgcctgcctcgtcatagaagttaccctcaactacgcctgcttttacttcaagagccggagctttcttagcgaaatctgctaatactcttgccggagctgttgcgtctgtcgtagaaattgcgaatgcattcggtccctcaagaacgtctcttaagctctcgaactgtgttccctctacggcacggcttactaatgtgttcttatatactttataagtaacaccagcttctcttaatgctttacgtaactgagtatcctctgcaacggtaagtccgcggtaatcaacgactacaacagactgcgcatctttgatgttttcagaaatttcctgtacgataggctgttttaattctacctttgccacgaatcgtgcacctcctttttagattttacgcatataacaaatccgaaaggatataaaaatccctctctgcctggacagagagggatcagaatctcattctcaatgattgctcatgaaagtccctcggcaggctctatgattacgccttgcggcacctgctgtcttcggccattatatgcaatccacagatgtggatctgccactgctgtggcatctgtctcatgtgagacgactgcatccgtacggacgcaccgcgttacaacgcttctgcattataacactgtatattgcggctgtcaacacttttcgccaacaacacaaactagtttgtgatcttggttacgtttaacttaacgccaggtcccatggtagatgtaagagttgcgctctttacatactgaccttttaagctggacggtttcgctttgttgatagcacccataagggtctggaagttgtcgcttaactgctcctcagtgaaagaagcttttcctactggcacgtggataatgttggtcttgtccaatctgtactcaatcttaccagctttgatgtcgttgatagccttggtaacatccattgtaacagttccagccttcgggttcggcattaagcccttcggtccaagtacacgaccgagacgtccaacaacgcccatcatgtcaggtgtagcaacgatcacatcaaagtctaaccaaccctcgttctggatcttcggaactaactcctcgcctccaacgtagtcagcgcctgctgcctgtgcctcatctaactttacgccctttgcgaatactaaaacttttacagtcttacctgttccgtgcggcagtacaactgcgccacggatctgctgctctgcatgacgtccatcacaaccggtcttaatatgaagctcgattgtctcatcaaacttcgctgtagcgttcttttttactaagctgattgcctcagcaacatcgtactgattcgccttgtcaaaagactttacagcgtcctgatatttctttcctcttttcatgaatataaacctcctggtggtagtatcgggagaggaccctcccactatatcgttccataagaacaccgccggtgctctctgatgcattacactctcgtgtcttactgctctacgttaacgcccatacttcttgcagttcctgcgatcatgctcatagctgcctctaaggatgctgcgtttaagtctggcatctttaactctgcgatctcctgtaattttgccttggagagagttgcaaccttatccttgttcggtgtggaagaaccggacttgatgttgcaagccttcttgatcagtaccggagcaggcggagtctttgtaacgaagctgaagcttctgtctgcgtatacagtgattactacagggatgattaaatcgccctgatccgctgttctggcgttgaactgctttgtaaactcaacaatgttcacaccgtgctgtccaagtgcaggtccgactggaggagctggtgtagccttgccagcaggaatctgcaatttgatatatccttctactttctttgccattggaattgcctccttaattcattctttcctgattaggattgctcgcttaatttgcaagctttacatctgcgaaacttatttctaccggcgtttcgcggccgaaaagctcaacattgatggtcacgctctgcttgccaggattcatcgcctgaatcacgccgatggtatctttccagactcctccggtgacaactacggtgtctccctcagcaaaatcaacctcaatgttctctgtcttgatcccaagcggtctcatttccatatcggtaagcggtaccggcttcgatcccggaccaacaaatccggtaacaccacgggtatttctgacaacgtaccaagtgtcatcattcataaccatattgataagcacgtatcccggaaacatcttctttgatacggatttctttgcgccgttcttcagctcaacgacctcctgcatcggtacgcggacctctaagatctggtcttccagatgccggttctcaattgtcttgtcaatgttcgcttttaccttattctcatatcctgagtaggtatgaactacataccagtgtgcctctgccataaatcacctatgcctccattaaaaacttaaaccaacaaggaaatcaacgccatactgaatcacaaaatccagaagcgcgatcacaagacccattactacggaaacagcaacaacggctgctgtctgtcttgcaagtgatttgttgtccggccaaatgatctttttgaattcagccgacaggccgctaaaaaagctctctttctgagcagctttgttctcggtttctcccattttctcactcctttgcccaaaagcctatttggtttccttgtgtaatgtatgagtcttgcagaatctacaatacttcttggtttccattctgtccggatgagctttcttgtcctttgtcgtgttgtaattacgattcttacactcagtacatgccaatgttattttcgtgcgcacaacttccacctccattaaaattctttgtgcttttcttatgtcttttgttccctgcgaccgggcttaggttcccctcaggaaaggagtcctaaaaaaaggcataaaaaaaagacctacttccatcgctagtctaatatatcacaatcaatatggagcgtcaaccacttttttaaactcgtgcaacaaatttattttagcactacatatagtgtgccgcaagtcttttttctgattttacaaat

SEQ ID NO: 11486 - DNA, 2786 bp, Unknown
  gut microbiota DNA sequence
ctttgcaaaaacgtgctatgatagaatcaatacacaagcaatgcatccgcatgtctgccgccagccggaacactccctgcggcagccggaaaggaattcacatggaaatcgaacgcaagtatctcgtcaagatcctgccggaccacttggagcagtacccctgcaggcagattgagcagggctatctaagcacgaacccggtcgtgcgcatccggcgcagcaatgacagctatattctgacttacaagggaaaaggactcatggtccgcgaggaatataatcttcccttgaacgaagagtccttcacgcatttaaaagaaaaaattgacggtcttctgattcagaaacgccgctatctgattccgctcgcggaaaaatataccatcgagctggatgtatttgagggagagcttgccccgctcgtgctcgcggaagtcgagtttgagaccgaggaggaagcgaatacgttcgtcccgcccgagtggttcggcgaggatgtcacgttctccacaaaatatcacaacagcaccttaagccagcgcaccttttcttcctgaaccggggcatcagcccagacgccccgcctcctttaacaggcggtacaaagtcggatccagatggaactcctccatcatgcgctccacctcgccgaggtaccgcttgcggacggcggcaggcacaatcgctctcgccgcatcggatccgccttttttcactgcgcggatcagaaggttcttcggcgtatgggcaaagtctacaaattccagcacctgcgtcttatagccgcagcactcaagcagattcgcgcggattgcgtccgtgacaagtgccgcaaagcgctccttaataattccgtagcgcgtcatcagtcccagatcctctgactggatctgtccgtttaattcatgctggcagcacggcacggaaagtatcatgcgcgcgttccacatgatggcgttgtacagtgcataatccgtcgcagtgtcgcaggcgtgaagcgtcaccaccatatccactggcgcatccgtgcggtatccgttaatgtctcccacctcaaaatgcagattctcatagccgtactttttcgcggcggcgttgcagttcttaatcacatccgctttcaggtcaagccctgcaatctgcacgtttcttttctgaatctccgtaaaatagtaatacagcacgaatgtcaggtaagattttccacagccaaaatcaatgatgtgaagtgtttctgatgtatcgtccccgaccgcatcaccgaccatctccaaaaaacggttgatctgccggaacttgtcatacatcgtgcgcacgacttttccttcgggtgtaaacactcccatatccacaagcggttctatcggcgttccctcctccagaatatactgctttttgcggttgtggctcccgcttgcctttgccgccgtctgcacattctttttcgtcttgtaggttacttttccctttttggaacacagatatatatgctctgcagcatcatcccaggcattgacctgcagatactgccccacggccgttttccccagatattccgccagcttctcgggcggtatgttctcgtgaaatacctgtttttccgtataggctgccgcctggtaataggattccttgcgctcaatgacaatccggcggtaagggatctccccgcccgccggtttgctgataatgattttatatggtttggcctgcgcgatcgcagataatttttccatctgttcttccatgtgctctcctgcccctgtatctgtctagcgcatccgctgcgtctcgtagcgctgctttgtgcggatgcaggcctttaactgctcatagcgatccgccaccggtccctccggaatcacaacatccagcacgaccgccatgctgttgatgagatggtcgtccacctcgtcccgcatcgacaccagaatattatatttttcttccagcgtatcagcatcaaaaaactgcatcagcttcggattcacctcctcggaaagcgactgctccatctggcttacccggatctgatccgtcagctcttccgcctccgtctcctgcacctcatccgcaaacgatgccgtcgtctgtgcctgtttccgcgtctcttcccgctccatacatatactgcccgcgcccgcaagttcgctccggtccacgcgttcaaaacggtaggtctgcgccgcatccggatatttttcacgatcgacctcgctcacaaacatggcgagcggtctcgcatatacctgataatctccgtagagagcctgataaatgaccagtttttctccggtctccgaatgtgttgccactgcgatgacctgataaagtctgtttttaaaatgacgatagatctccccgctctgcggaattctcactctttccattcctgtaaccttccttctgtcccgctttgctgtcctgccgtatctttacgcgcccatatccagctcgtaaccgttcagcattgccactccctccgcgataaaatcgcgctcaaacggcagatttgcctgataacccataatcatcagatcctccacctcatgcatcagttcactggcactgtcaatatcgatcgcgttgacgagctcgtgtgctcccgccatcatctgctgctccagttcatccacatcgttctcgttcacattctctgcggcgcgttttaatatgtcattctccgcctgattgagctgcggtctgcggcagcccgccatggcagccccgcctgcactctgcgtctgccgtcccgccatctgatccggacgcacattctgctgtcc

SEQ ID NO: 11487 - DNA, 8449 bp, Unknown
  gut microbiota DNA sequence
atagggcagaggtggaagcacggtaacgtgtggagctgactgttactaatcgatcgagggcttgaccaaatataacgaataatgtttgcaggtttgatggatggattctgtgtgaagttttgaaggtacaatttaaaaaagtattgcaattataacaattttgttatatagtaaatgacgtactagctacgtcattttgtgtcattttgtatctttcagttagtattcctcgatagctcagtcggtagagcacgcggctgttaaccgcgctgtcgtaggttcgagtcctactcggggagtttttttatcagtaattttgtaaagcgggcatcatttattctgtccgtgcttaaatatggcgacttagccaagtggtaaggcgtgggactgcaactccctgatcgtcggttcaaatccgtcagtcgcctctgtaaagatctcgaagatttcttcgggatctttttttgtgtttgaaaatcactctgcatctggattgtgtggaaaacggatcgcaaattttttagatttgtttataaaaatataatatgacactgtttagaaaccgtgttaaaattatcacaatatataagagaataaacaggaaaggggagtcagtatgaatgaagtaaaaacaccgaaaaaacctctgatcttctattatgttatggtttttctgctgttgatgatgctgaattttatggcgattccgtggatggcagagcgtcaggtcagggaagtggactatggaacgtttatgaccatgacggaagataaaaagattgcaaaagttgagatcgatgagagtgagatcgtctttacggataaggacggaaatatttacaagacgggtccgatgaatgatccggatctggtgcagcggcttcatgattccggggcggagtttgcaagtcagattgtagagcagatgtccccgttcttaagtgcattgctgggctggattgtgccgatcgccattttcatgataatcggccagtttatgtataagcgtctgatggacaaagccggcggcggcgggaacgcgatgatgttcggtatgggcaagtcgaatgccaaagtatatgtaaagtcttcggagggaatcaagttcacagacgtggcaggcgaggatgaagcgaaggagaatctgacagagattgtggattatctgcataatccggacaagtaccgggagattggtgcatccatgccaaaaggtattctgcttgtcggtcctccgggaaccggtaagacgatgctggcgaaggctgtggccggagaggcgaacgtaccgtttttctcgatgtcgggatctgaatttgtggaaatgtttgtcggcatgggcgcttcaaaggtgcgtgacctgttccgccaggcaaaagaaaaagcgccatgtatcgtatttatcgatgagattgacgccatcggcaaaaagcgtgacggaaatatgggtggaaatgatgagcgtgagcagacactcaatcagcttctgacggagatggatggatttgagggcaacactggagtgattatcttagcggcaacgaaccggccggagtctctggacccggcactgacgcgtccgggacgttttgaccggcgtgtaccggtagagctgccggatctaagcggcagagaggcaattcttaaggtacatgcgaagaagatcaaggtatcggataatgtggatttcaacaagattgccagaatggcgtccggagcatccggggcggagctggcgaatattgtaaatgaggctgcgctgcgcgcggtgcgtgacggcagagcctatgcgacacaggcggatctggaagagagcatcgaagttgtcattgccggttatcagaagaagaatgcgattctgacggacaaagagaaatggacggtggcttatcacgagatcggtcatgctctggtagcggcaaagcagaccaattccgctccggtacagaagatcacgattattccgagaacttccggtgcgttgggttatacgatgcaggtagaggaaggtacacattatctcatgaataaggaagagattgagaacaagatcgcaacgctgacaggcggtcgtgccgcggaggaagtggtatttgattgtgttacaacaggtgcttctaacgatattgagcaggcgaccaagctggcaagggcgatgattacccgttatggtatgagtgaagaattcgatatggtggcgcttgagacagtggccaatcagtaccttggcggtgatgcatccctggcatgctcagcggacacgcaggcgcagattgacagaaaagtagtggaactggtaaggaagcagcatgagaaggcggcgaagatccttaaggacaaccgcgcaaagctggatgaacttgcaaaatatctctatgataaggagactatcacaggggaagaatttatgagcatcttaaatgcacaggatgggcagaccgcggaaaattagagaagctgcgggaaagagcagtaaatattgcataataaaagctgtcacaggaatagaaccgataaaacgggattcctgcggcagcttttttcattattgcaagagctgtacaatgataatcacgatccagacgatcatgtagagagccattccaacgtttaacacggttgtggaaaagcgttttccttttggaagcgtgttcattccaggcaggaagcggattttcttcagattgacgataaagagaataataccggcaatcgccacgccgagcaaaaggaaaatgtaaataaagtaaacgatcagttttccaaagtttcctgtcatgtaggacatcatgcctgcaggatcggaagcgatggagagaaaatcatctcccagccatttcaagatcgccacaccgagtacagagccgaggaagttcactagcatgtgtaacccgatcgtgtagcggatgttgccggtcttgacatagataaagccgaagcacagaccgagaacaaaagcatagacgaactgattcagatttccgtgaaacagtccgaacatcaggccggagaaaagcacagctacgccctcgccatactgcgcaaggcggtcaatgagaagcttccggaagatcagctcttcggcaaccggggcgcagagcaccatgataaacagatttacccagagattggagctggtagcgacttcaagcatggtattggttaccgggcttcccttcaggatactgatcaactgtgtcaggataagaccggtataattgctcacatacatggcaccatagcacatgagaaaagcaatcagccactgaccgaaggtcatgtgctttttgggaagagtcacagccggaatcctcttgatcagaagcgccatgatcggcatggcgatcacatacataggaatcataacgattaaaagcgcgtaactcgtgctggaaagcagatccggattgatcgcgtttgcgatcgcgcttgcgccgaactgaactccatagatgagcgcggtcccgaacagaaacatcagaccgatgcgggaaaactgtcgtctggcatccgcacagacagtattgggtgtgccggtcatgtaatccggcgtcatttcttcgttcatataatcctccaattccgcagacgttgtgtgccgaagaaaccgggagccagagcttccgtccgtcggcggttgtggcggctttgtgacatctgcggcacaaagagccatgcatttgacaactttacttgtcaaaataattatatgtttgacaagtaaagttgtcaagtaaaataaataagaaaatctttcgagacaaacaatgcatttatcggttataataaaaaggaagattttatcggaggaaaattcatgagaaaattatggataacaggctgtatcgtgatgatctgcatgggaatgctgacagcctgcggtggaaataaaacggaggttgtaccgatcggggatacggaggaagcagaccgggaagtaccttatgcaatgtatgtcaatcgtgtggaaggcggaaaggcatcggttacgatctcaaattatacggatgaggagattttgtacggaaccgattttcatctgcagaaatatatcgggagcgactgggtggacgtgtcgacgctggttcccaattataagtttaacgagggggtctattccattccggcgcacagcagcgtggtcacggatgtcaaatgggagtggctgtacagcacgctgacggatggggaatatatgctgacgaagacagtgcttgatccgaaggaagacggaacttacgatcaggcaacaatgtatgtgacatttgtttttggaacgccgtaggcggcagatgttgtttattttaaaaatatgacttgacgggagacaatggttttgttaaaatctctgtgtgtctgatgcggcgctttccggcagaagggatctgtcataaatgacgggaatctgcatataatagacatataagagagatagggcgacttagccaagtggtaaggcatgggactgcaactccctgatcgtcggttcaaatccgtcagtcgcctttgggtcagtaatggcgtacgagaaatcgtacgcctttttacatgttatcctgttttacatcagaatcagaaaaagaaatgacgttgcgccggggatgcaatgtttttcggaatacaatatatagtacttaaggtataaggaagaccttgaaaaaaagacttcaaatgtatatgatagaactatggagaaaggtcggttttccggggaggggactgtactatggtgcaaaagataaaggattttatattaaaggacgtgcagagtgagaacgagacaaagaagacggcggttacgctgcggatcagtgcattgatgctgtgtctgtactttttaaccctgtttgctgtattctgcgcgattaaggatatccgctcagcggtgatctgcctggtgtgcataggatgttatctcgtgtccttttacacaacttatctgaatcatacgaagtttgcatcaatattttcgcaggcgctgatggcgttatggattctgatttttatctgggagtacggctggaactgcggtgtacaacattttgtgtttgtgcttctggttctcaattttaccgtgagcgcgggaacgatgggaatgaaaatcggcgctgcagcactggcatgtgcgtaccgtatttttctgtatgcctatacgaacaggtatgatccggtgacaaatatttctgcggacaccggtgttctctttcagattatcaatacgcttgctatttttggggaattgacggcaatcatgatcgtgtttaccaaagattcgcaggagatggaatacaagcttgtaaaatataatgagaagctggaacacatggcgtccattgatccgcttaccggcctgtacaaccgctggagcatgcggtcgtatctggagaaaatcgtcggaaaatatgcgtctggagagatcggatatgtgtccgttgcaatcggcgacattgattttttcaagaagacaaacgatacctacgggcatgatgccggggatatggtgttgaaagaactggcaaaagtctttctggaggtaatgggaaaagaaggaaaagtctgccgctggggcggagaggaatttctgtttgtatttcagaataaaaacggctatcaggcgaatgaggtacttcacgatatattgaagagaattcgcggcatgggcattccttatcagagtgattggattcatgtcaccatgacatttggactggaggagtatagcggagagaaggatatggaagcggtcatccgtgcggcggatcagaagctctatcgcggaaaagaaaacggacggaaccagattgtatattaagaaaacacgggggagaatagacagatgctgacagaaacaatcgcaatacaggtggagggatccctgccgggggcaagactctgtatctacattcaggaaaaaagccgggagcttcggatcaaggagcgaccgctcattctgctgtgtccgggcggaggatacgaatggacctcagaccgggaggcggagccgatggcagtgcagtttctcgcaatgggataccatgttgccgtgctgcgttattcctgcgcgccggcggtgttcccgacagcgcttttagagctggcggaggcgatgaagctgatccatgcacacgctgcggaatggggcgttaaggaggatcagatttatgtagaaggatgctccgcgggaggtcatctcgcggcaagtttaggcgtattctggcatgaatcctggatttctgagagagctggagtgacaaatgagattctgcgtccggcgggactgattctctgctatccggttatcacgtccggcgaatacgcacacaggggatcgtttgaagctctgttaaagggacagaagacggaggagatgctggaaaaagtctcactggagaagcaggtgacagagcacatgccgccggtatttttatggcacacgtttaccgatgactgtgtgccggtcgagaattccctgctgcttatcgcagcgatgcgcaaggtgaatgtgccggtggaatttcacatgtatccggcaggcggacacgggttatccacctgtacggagcagtctatgaatgtggatggatatggtgtacaggagcagtgtcagagctggcttccgctggtgcgcacctggctggcagaaaaagtgcgttgcaaaacagatacaaatgtgttaggatagcaacggattaaaataagaatggaggtggcagcatgactgacgacagttgcggacgaagtaatcatattgtctgtgagggaaaaatgagcggcagtctgcctgccattttttgatcgaagaacgattatagagggtatctttttttcttatgctctgtattcacaggcaatatttccagacaacgtaatcaaatcatgccgaagacaaggagacagccgtgcgctgtctgtatcagaatgccataaatagtgtggcgttcgttatttgcgtgcacattttgccccggcggaatgtgacaacatcggaaaggaaatggtggcttgcatgaaagagcagatgacagaaaaaaagaaactggaagatgtgacggaagttcagatgaaatatcaaaaagagatcgaggcgattgtccgcggaatgtcatccccgaaggtgatgcatgacagacttctggattatcatgagaatgatattgcggcggcgctcgaagacatgaatcccaccgagcggcagcgcctgtaccgcattctaaatgcggaggagatctcggaggttctctcctacatcgatgaggaggagattccgttctatctggaagagatggatatgaagaaaaaggcagcagtcgtctcggagatggacgcagatgaaattgccgatctgctgcgccagatggacaaaaaagaacgcgagacgctgacggagctgctcgatgaggaggtacggcataagatcgatctcatcgattcttttgatgaagagcagattggaaaccggatgtccaccaactatgtggagattccgtctaatgtgaccgtaaagcaggctatgcgcgagttgatccggcaggcggcagacaatgacaacatatccacactttacattgtagatgagaaccgtatcttctgcggtgcgatcagtctgaatgatctcatcatcgcgcgggaggacacgaatctggaggatctgatcgtggtgtcctacccgttcgtctatgccacggaggagatcgcggactgcatcgaatggatcaaggattattccgaagattccattccagttctggacgaggagaaccggatcatcggagtcatcacctcgcaggacattgttgaggtggtcgatgacgagatgggcgaggattatgccatgctcgccggtctgactgcggaggaagatttggaagagccgttaaaagacagtatcaaaaagcgtatgccgtggctgatcgtgctgctcggactgggactggtcgtgtcctccgttgtggggatgttcgagcacgtggtcgcagaactgacaattgtcatgtgctttcagtcgctgattctcgatatggcgggaaatgtgggaacgcagtccctggctgtgacgatccgtgtgttgatggatgaaaatctcactgccgggcagaaagtgcacctggtctttaaggaagcacgcgtcggacttagcaacggtctgatccttggtatgatgtcaattatcctgatcgggtgttacatttactttttcaagtccggctccctgcagttcgcctttgcggtgtccggctgtatcggagcggcgttgatccttgccatgctgatctcaagcctagtgggaacgctgatcccgatgtttttccacaaaattcatattgatcctgccgttgcatccggaccgctcatcacgacggtcaatgatctggtggcggtagtgacatactacgggcttgcgtggctctttttgatcgagatgctgcactattgagggggacgaaccggt

SEQ ID NO: 11488 - DNA, 13525 bp, Unknown
  gut microbiota DNA sequence
ttaagtaaagttatgcttgcctttttgctaaaattatgataaaaatggaaaagatacggaagtatcagaaaaaaagattgaatttgatacgaatatggtttatactataaccgtagaaaggggaatgattttatggatacgaacgatatttcagcatgcgaaaagctcgtgatgaaggtcatttgggattctacagaagaattggcattgcaggaagtcatggatggagtcaatcatgagaacggtaagaactggaagccgcagactgtttccacatttttatcccgtctggtaaagaaaggctttctgaatatgtaccgcaagggcagatactgctattatcagccgcttgtcagcaaggaagacttctggcgcgcgatgatggaagagagtgcaaagttctttacgaagggagatctcggagaactggcatgctgtctgtgtgatgacatgctggatgcaaaggacatcgagaaactaaagaaaaagctgaatgaacatagctaatcagattttatttgcagtggtaattacctctgtcacgggaacggcagcgtacggactctggcggctgcttatgaacagccgcttttgtacgaagccgcaatatgtatatctggcgctttttctggtctgcctgttgtacctgattccattggattatggatggatgcagatgacgattcacggttatctgcagaaggaaggtatctggcagatcaatttttctttaacgggatttttatggattcttgcgttttttgccgcagtctgctggcttgccctcatggcaaagggaattacagagtttgcaggcagccttcgcgggatgaagcggattcagatgcgtgacattccggtggaagaggaagccgtgcgggaagagttcgcacgtgtgaagaaaaagcttggcatccggtcgaatatccgtctgtaccggaatgaccgtatcaccagtccgatgcttgccggtattttccggtgccgggtggtgcttccggatattgcctacgacagaaagcatctgagcgtggtctttcatcacgagctgatgcattacaagagtcatgacccgtttgtcagattatgcggtatgtgtgtgactgcagtgcaccacattaacccgctgacggggaacctgatggcactgctggacgagtggagcgagatttactgcgacgcacgtgcgatagcagccatcagcgatgaaatggatgcagggtgttattttgaaatgattatagagagtgtgaagcactgtcctgtgaccgatgagaattatattttttctatgctttatgagaaccagagaagactggaaaggagaattgagtatatgggaaaatataatggaaaagcagcatcgagactggcaagtgtgtgttttgcggcggcttttgtgctggtgagtgtgacgccgatctatgcggcgggcagcgaggctgcggatgtacacgatgatatctaccagaatgtggaggctctgacggcagatggcagcgaggagaacgtgctcgaggaacagcagatcttaggcgtgatggatcgctcttacgatacgctcgagtatgcgtatccggagcttgaggtgatcagcccactgttgagtgcgaacgagcaggtagcttttaactggagtgtgtctccgggcacgcgcatggtgaccaaccagttctgggtgactaaggggcagaccattcatgtggcggcaacatctacaccagatagcagtaagttctggatcggcatcatggacggactgaacaatgcgcgttatgtagagggatcgggtaatctgtctcatggtttttcgatcacaagcagcggacattaccgcgtcttcgtgcagaacaagagcagcgtgcagatcaatgcggtgggaagttattacttcaactgacagcagcacaccgcggtaagtgcatcggacggtaagtgcatcggaacaataactttcgagtaggagcaccggaacaggtgtatcggaaggtgcgaaagcagtaaagataacaaaagcaataaaaaagaagaggcattccgcctcttgcttttaaaacaaacaaactacatagttagatatgattccacggttgcagtgtatttcacatcaggacgatatcatttcaaggtaacagtattcggggcggtgctaaaatcaagcaccgtctttccttttgcgagcaggtcggatttgagcgtgctcgccggaaagtctgcgttgtcggtgatggaggaaggcgcgtcgataaaatagacggaggcgccggttgcgtcgtagaattcctccgagaaagaccagtttccgtggtggccggtctgcacgtaatcgcaggcgagctggtctttgcatgcggtaagcagggaatcattcatatcgtatttgatgtccgaacaaaagagcatgctgctgtttgcgctgcttacttttaagaggagggaagcattgttctggtaatctttctcatctccgacattctgcagaaccgtgtcgtcataggcatttaggacggagaacgtcagaccgcagatggagaggacgtcgccgcggtgcaggtgcgtcacgttggaggcatcccgggtgagcgtgtggtaggtctccatcactgtaatgtcatcgtacggctctccggccgcttcgataaagtcatagtcaaaaccgttgtcgtagacggcgtcgatcgtgatgccgtctggtgaggcgtagatctgattgaatgcgccggcgtgatcctgatgcggatgtgagagaatccaggcgttgacatggttcccgtgggcggcgatgacctcgcgtacggcggaggcgttgtctgcccagcccccgtcgatgatgatgagtgtggtatcgttcgtgatggtgtaaaaagttccctgcacgccggttgcgtccgcgtattgcgtcaccagatattccgtggcgggatcgggggtgtagccggtggaatcttttttggattccacgagtgtatgatgggagcatgccgcgagaactacggcaaaaagaacgacaatgacagtggaaaaaaggtgtttaaaacgcatcataaggactcctttgagttgatcggtttattctttgcattctacattaacagagaacaaaaggaatgtaaaggcgtggtaacaacttgacgcaaaacgtcggaattgttatagtggaatacgaaatcaaagagattgaccgaggagtcaatggcgagagaggacggaccatggatacacataaattttttgtggaaaagatgcggttccatctgaaggaacaggacacgctggtctttgtcgggtggttttttgatgggagtacgaaggaacattccatcaaggcatatctggacaacagagagcttccgcttacggtacaggtgaatcgcggtgcggaggtccggcagaaatatatccgcagcatcaatgagatcgaggaggaagtggtaggcatcataaagcttccgccggactggcgcaatggccgccgggtgacattgatggctgcttacagggaagaatataagaaatcttatgccatctcaacagcaaagcttggcagactggagaatgaagtcagctactatgtggaaaactgtcacagagaggggagccagattacggtcactggctggtgcatgtcggcgggggatatcaagcttgaacttctcgacggcagcagacagccgatttccgagaaggtggagcactattaccgcaaggatcttctttctgtttttccggaatgtgataaggaggcgaagcccggttttctggtgcagggaaccgcagcgggagggcagagcggaccgttttatctggagatgcgtggcgcgaagaatcattcgagaaccagactcacgaagtgggacgagggcacgaagctgcagtatgtaatcgaaaaagccggggataccgtccgctatctggagcgcaacggaatctctgcaaccgcttataagattaagagcaagctgacgcacaaagagggcaatacctatgagaactggcgggcaaaatatcttccggcgccggaagaactgcagcgccagagagaggatgtgtttgatgcgggaccgttgttttcgctggtcgtgccgctctataagacgaagccgcagtatctgcgggagatgattgattccgtgacggcgcagacttacggaaactgggaactgtgtatggcgcttgccgcatccggggaagaggatgcagcactgatctccattctggaggagtatgccgggcgtgatgcgcggattcactatcaggtgctgccggagaacggaggaatcgcggaaaatacgaacgccgcgcttgtaatggcttccggagactatcttgtaccggtggatcatgacgatctcgtgccggaaaatgcgctatacgaatttgcgtcggcgatccgcagggacgatgcaatcgacatgctctattccgacgaggacaaggtcagcatggacggcagacacttttttgagccgcatttcaaaccggactttgacctggatctgttgtgcagtgtgaattacatctgccacctgctcgcagtgcgaaaagatgtggcggagcgtgcggggagctaccagagcgcgtttgacggcgcgcaggatctggactttatcctaagatgcagcgagcaggccaaaaagatttatcatgtgccgaagattctgtatcactggcgctgtcatatggactcgaccgctttcaatccggagagcaagctctatgcgtttgaggcgggacggcgcgccatcgaggagcattaccgcagactgggaataccggcgcgcgtggaaaatgcatcgttctacggaatgtaccgcacggtctacgagtggaaagaggaacctctggtatccattatcataccaaacaaggatcacgcggaggatttaaagctgtgtctggattccatttttacaaaatccgactaccggaattttgaggttgtgattgtggaaaataacagtaccgagccggagacgtttgcttattataaggaacttgaggcggggcatgaaaatgtcagggtggtgtactacgagggcggctttaactactcaaagatcaataatttcggcgcagcggcatgcaggggagattatttcctgctgctgaacaacgatacggagatgatcgacgggggatgtatccgggagatgctcggatattgtatgagagaggacgtcggaatcgtcggtgccaagcttttatatgcggacgatacgatccagcatgccggtgtgattttaggttttggcggcacggcgggacatgctttcattggaaaatccagatacgatacgggatattttggcagaattctgtgcgcgcaggattattccgcggttaccgcagcgtgcatgatgacgaagcgccaggcgtttgaggcggtcgggggaatgaccgaggaactcgccgtggcgttcaatgatgtggactactgcctgaaagtaagaaagcacggatggctcgtcgtgtacgatccctacgcggaaatgcaccactacgaatcgaagtcgagaggctatgaggattccccggaaaaagtcgagcgctttaacggcgaggtggagattctgctttcgcgttggagagatcagattgagcagggagatccctactacaatccgaatctgacactggacaattctgatttttcgctgcgcagataacgcgggggacggcgaaaacaggtgaataaaacaaaaaggcagctggtacgagacagaaaagaggagattccggttctatgatgaaggtatatatatgtccgtcctgcggctggatgcgcgtagtgtccagacgcaaggatgtggagtgctacaagtgcagtgagccgcagatggttcttgcaaaaatggatttcggtaagtacacggaaatgtcagaagaggaaaggaaagattattccgatggatggctttacatccatcagaagaagcattgagcatatgaagattacagtgcagaaggttatcaaaggggtgcgttatctgaagcattacggagtgaaggagttctttatccggctgcaggagaagatggaatcggaaaatgtgccgtatgagccatggtatgagcatcacaaggcgacggaggagacgctgcgccgtcagcggaagcagtccgccgcgtggaagggagcaccctgcgtcagcatcgtagtgccgctctattgtaccaatgagacattcctgcgggagatgatcgggtcggtgcaggcgcagagttacgaaaactgggaactctgcctggcagacggaagcccgaaggaagaggcggtgcgtcttgagacggtcgtgagagaatgtgccggagaggatgcgcgcatctgttaccgcagactggaaaaaaatcttggaatcgccggcaataccaatgcggcgattgcaatggcacacggggagtggattgcacttctggaccatgacgatctgctggcgccggacgcactgtatgagaccgtgcatctgattctgcggggaccgaaggatgaaaccggagttgccgcaaccggttttcacaaagccggtgcgcagtatgacatgatctacacggatgaggataaggtggacatggatgggaaaacgcatttccagccgcactttaagccggacatcaatatcgatctgctccgatccaacaactatatcacgcactttaccatgatgcggaaaacgcttctggagaaagccggcatgatccgtgagaagtacgacggtgcgcaggattacgacctgtttctgcgctgtgtggagtgtgcagaagccatcggacatgtgccgcgggtgctctaccactggcgctgccacacggagtcgacgtcggaaaacccgttttccaagcagtatgcggtggatgcgggacggcgcgcgatcgaggatcatctgaagcgtcaggggattgcgggggaagtgacggcgacaaaggatatgggcttttacacggtgcgctatccttacagcggcaatccgctggtctcgatcgtgataccgagcagggatgaagtggagacgttaaaaaaatgtcttgcagccattcaaaaaacgcattatgcaaattatgaagtcattgtggtggagaataacagtgctccggagacgtttgatttttaccgctcgatcacatccgaagaagtgaaagagggcgaatcggtgtgctatgagggaactttatccggcggacagcggatctgcgtggcagtctggaaggaagggtttaattattcggcgctcaacaatttcggcgtctcttttgcaaagggcgaatatctggtgctgatgaacaatgacatcgagatgattaccgaagactggctcgaagagatgcttggcacctgccagcgcagggaggtcggcgtcgtgggcgcgaagctgtactatccggatgatactgtgcagcatgcgggaatcgttgtcggaattggcggcaatgcgcgcggcatcgggcagaacatgttcatgggactgcagagagcgcgcagcggatacctgcacaaggcgtcgcttgccatggactattctgcagtcacggcagcatgcctgatggtgaagcggaatatttacgaggcggtgggtggatttgaggaaaagcttgccgtggcgttcaatgatgtggacttctgcctgaaagtccgcaaagagggttatcttgtggtgtaccagccgcgggtggaagcctatcactacgagtcaaaatcgcgcggaagcgaggattccccggaaaaagtggcacgcttcggacgggagatcgaatatatgcggaatcactggatcggcattttaaagaacggtgatccctactacaatccaaacttttcaacggtatatccgaattatgcgctgagagattatcattaagcggaggtattacatggcaagtcagccggaagttacggtgattattccgaattacaacggaaagaagcttttggaaaattgtatacagacactggaaaaacagacctgcacggattttaagcttctggtggtggacaacggctcggacgacggcagtacagaggtgacctccagcctggatcttacgatgcttgcgctaaaggagaatacgggtttctgcggagcggtgaatgagggcatacggcatgccgacacgccgtatgtcatcctgctcaacaacgacacggaggttctgccggaattcgtggaggagctgcttgcggcgatcaaaaagtcggaccgcatcttttccgcgggagcaatgatgatcgattatcatgacagagagcgcatcgataatgccggcgactattacacggcattcggatgggcggtggcgcgcggaaagggaaaaccactggcggattttaacagaccgtgccgcgtgttttcctgctgcggcggcgccgtcatataccgcaccgggctgctgcgcgggatggggccgttcgacgagcgccattttgcatatcttgaggatgtcgatatggggtatcgggcaaaaatccacggatacatcaactgctatgcgcccggagcgcgggtgtatcatgtggggagcgctaccacggggacgcgctataatgagaaaaaggtgttcctcgcggcgcgcaattcgatgtacctgatctacaagaacatgccgtttttacagctgctgatcaacctgccgctgatcctttccgggattcttatcaagagtctgtttttcctgaaaaagggatttgcgggagaatatttaaggggaatcggcgccgggattaccgggtgccgggaatgtaaaaaagtgcgtttctcgtggaaaaatctgggaaattacgcggtcatacagctggccttgtggggcaatgtgatccggattctggcaggaagataaatttgatcgtcaaacaaatctttaagaaatattaagaaaatgttacagaatgtttgcgaaaaaggcgttgtgcttttatggaaattattgtatcattaataatatatggtaattagaatttcgcaaaaggatagcagtatgaaaaatgataaaagataatcagcagtactttaataagctgcatgtactgatcgatgccttggttatcatcgtatcgtatgtgtttgcatggtggctgaagttcctgagcggtattctggatcatgaagtcggcgtactctcatttgagttctatatgagggcgctgctgctcattgttccggtgtatattttgttgtattatgcgttcaatctgtacacgtccaagcgcgtgcaggggagacggctggagttttccaacattgtgatggcgaatacggttggactgctgctgatgtttgcggctctctttaccctgacgtcttacaatccgcagtatcgcaacttttcacgggagatgcttttctatttctacgtgaccaatattgtgatggaagagattgtccgccttttgatccgcagatttctgcgaagtattcgcagaaggggatacaatttaaagcacattctgctcgtcggctattcaagagcggcagagcagtatatcgacagaattcagcagaatccgcagtggggatacaatgtgcgaggggtattggatgacaatattgccagaggcatctcctataagggagtgaaggtcatcggcagtattggtaatctcaactacatcctgccgcagaacagtctcgatgagattgcaatcaccctcggactggaagaatattataagctggaaaaaatagttgcggagtgtgagaagtccggcgtgcacaccaagttcattccggattacggcaacatcatacctacgagaccttacacggaggatcttctgggtctccccgtgatcaatatccgctatgtgccgctgtccaacacgttcaacgcatttgtgaagcgctgtatggatgtggtgggatcgattgtgtgtatcatcctcttttcaccggtgatgctgctgtcggcaatccttgtcaaggcgacatcgaagggaccgctgatctttgcacaggagagagtggggctgcacaataagccgtttcagatgtacaagttccgcaccatgtatgtgcagacggaggaggaagaacagaaaggctggacgaagaagaacgatccgcgtgtcacaggagtcggaaagttcttgcgcaagacaagcctggacgaattcccacagttatttaatgtgctgaagggcgatatgagtctggtgggaccaagacccgagcgtccgcagtatgtagagaaattccgggaagagatcccgagatatatgatcaagcatcaggtgcgtccgggaatgaccggctgggctcaggtcaacggataccgtggagacacgtcgatccgcaagcgcattgagcatgatctgtactacatcgagaactggacactggggctggatgtcaagattctgttcctcacggttttcaagggatttatcaataaaaatgcatattaggagaaaaatttatgagtagtagtggcaacagcagaaatggggcacatagcagcaacggggcgcacagcagcaaccggacacagacaggcggcagcggacatccgcagaagaagccgctgacaaaagcacagaaggcagcgatccgcaagaagaagcgtcagaagaagattattctcgttgtggttgagatcctggtacttctgcttctggcagttgtattgtttgcggtagtgaagctctccaagatccagaaagatacttctttcaatgagagtgatctggaagttaacgagggaatttcctcagaatcccagcagatcatgaaggggtatacgacgatagcgctgttcggactggacaaccgttccaacggcaacttatccaagggtaacagcgacgtgattatgattgcgagcatcaacaacgatacacatgaggtgaagctggtatctgtgtacagagattcctatctcgacatcggcaacagcacctaccggaaatgtaatgcagcctatgcgaacggcggaccggagcaggcgatctccatgttaaatacgaaccttgatttaaatattacggattatgtgaccgtggactttaatgcggtggtagagtgtgtggatcttctcggcggtgttgagatgaccgtaaccgatgaggaagcggtgctgatgcacggctacatggatgagatctccaagctgaccaagaagaaatccaagtatctgccgggagccggcacctacacaatggatggtgtacaggcatgtgcattcgcgcgtatccgttatacggccggtgatgactataagcgtaccgagcgtcagagagcagtgctcacggcgatgatccagaaggcgcagaaggccgatctcaagacgatcaacagcctgattgacgaggtattcggcgatattaagacaagctacagtaacaccgacctgattgcacttgcatcccaggtattcaattacagccttggcgagacgaccggattcccgtttgagaagaatacgatcacgctcggttccaagggaagtgtggtagtaccgtgtgatctgaaatccaacgtcattcagctgcatcagttcctgtatgatgatacggaatatgagccgacagacacggtaaagagcaacagtgaaaagattatcagtgataccggattccaccagggagatggctattgatgcgtgtagatatcataattccgacttacaaaccggatgacactttttgtctgctcctgcaaaaattgcaggagcagacctttgttatacatgaacttattttggttaataccgaggaagcactgtggaatgaggctgtacggaagtatccgatcgaacagattcggaaggagcttccgttttctagccgcatttttcacatgaccagagagaactttgaccacggcggtgccaggaatatgggagcggggtattccgaagcggatattctgatattcatgacacaggatgcggtgccggcagacgaaaggctggtggaacatctggtgcatgcgctcacatccggtgcgcacggttcggggactcctgccaaaggtgcggttgcggtcgcgtatgcaaggcagctcccacgggaggactgcggcatcatcgagcgctataccagacagtttaattatcccgatgagggatgcgtcaagagccgtgaggacataccgcggcttggcattaagacttttttctgctcggacgtgtgcgctgcataccgcagggatctgtttgagcagctcggcggatttgaatcgccggttatttttaacgaggatatgttttttgcggcgcatgcagtgcaggaaggatacaaggttgcgtatgcggcggacgccgaggtggttcattcgcacaactattcggtgaagcagcagtttcaccgcaattttgatctggcggtgtcccagacggcacatccggagatctttgagcaggtcagttcggaggcggagggcatgcgtctggtgaaaaatacgatgggttatctgtgtaagattcacaagccgtatctgatctggaagttagggtggcagtgtgtcggcaggtacgccggctattttctgggaaaacgctatcagaagcttggcagacggcagatcttgaagtgtaccatgagtccgtattactggaagcggatatggtcagaaaagtagggagcagaaaatgagtaacatactatatatcgtagtaccctgctataatgagcaggaggtacttccggagacatccaaaagactgcgggaaaaagtgcagacattacgtcagagcggcaaaatcgacgtggacagccggattctgtttgtgaatgacggatcgaaagacgcgacgtgggagatgattcagaagcttcacgaggagaattccgtattttccggtgtcaatttatccaggaaccgcggacatcagaatgcgcttctggcagggattgcggtggcggcggaacatgcggatatgatcgtctccatggatgcggatctgcaggacgatgtggatgcgatggaccgcatgatcgatgcctatgaagcgggaaatgatattgtctatggcgtgcggtcttccagacagaaggacacgttttttaagcgcaacacggcacagcttttttaccggatgcttcatttcctgggggcggagatcgtgtacaatcacgcggattaccggctgttaagcagacgtgccgcaaaaggactcctgtcttttgaagaggtgaatctgtttctgcgtggaattgttccaatggtgggctatcagagtacgaccgtaacctatgagcgcggggagcgtttcgcgggggagagcaaatatccgcttggaaaaatggtggcatttgcgctggagggagtgacatcgctctcggtcaagccgatccgcatgattacgatgggcggattgtttgtgtgcctcgtcagcctgggaatgctgattaaggcgtttgtggattacgcgaacggcaatgtggaaccggggtggacaagtgtgattatttccatctgggtgctcggcggtctgcagctgtttgcgattggaattatcggagagtatatcgggaagacgtatatggagacgaaacggcgtccgagatatctgattgaatcggtgcttttggatgcag

SEQ ID NO: 11489 - DNA, 1725 bp, Unknown
  gut microbiota DNA sequence
atagaaggatctcattttttcagggattttcgtgtgaaatagagaatacaaaagaggtgccaatgtgaaaatcaggagaaaacatccggtcagagtcaatcatctcgggagcgatcccatcccacagctggtgcgccggcttgcccttccggcaatgctcgcccagtttgtcaatgtactctacagcattatcgaccgcatgtatatcggaaatattgcagacgtcggggacattgcgctcgcgggcgtggggatctgtgggccgatcgtgacgatgatctccgcgtttgccgcctggatcggaaacggcggggcgccgttactctccatcaaatccggcgagcagaataaagaaggcgcgtccgccatcctcgccaactgctttgtgcttctgatcggcatggcagtctgcctgaccatcggcgcgtatctgtgcaaagacgccctgctggtatggttcggcgcgacggaacgcatttttccctacgccgaaacctacatgcgcatttacctgatcggaaccgtcttcgccgtgctctcgctcgggctgaaccagttcatcatctgtcagggattttccaatctgggcatggtctccgtcatcatcggcgccgttttaaatattctgctcgacccgctctttatcttcgccctgcacatgggtgtgcgcggagcagctgtcgccaccgtgctctcacaggctgcttcctgcgcattttcgctgtacattctgttccgcggtcccgtgccggtgaaaatcacgttccgcggttactccctcccggtatgccgcgatgtcctcacgctgggactgacgccgtttttgatcatcctgttcgacaatgtgttgatcatcgtccagaatgtcatgttgaaaaattacggcggcgccgacagcgacatgctcttaacctgcaacacgattgtgcagagcttcatgctgattatcacgatgccgctcggtggaatctccggcgggacacagtcggtgctcggctacaactacggcgccggcgacaccgcccgcatccgccttgccgagaagcatattttaaagacggcactgcttttctgcaccatcatgttcgtttttgcccagtgggatgtcagtgcaggcattttcgtcggattatttacgcaaaatgccgcttacagatctatgacggtgcattttatccacatctacacgctctccgtcataccgcttgccgtacaatatgcgctcgttgacgggctgaccggcatgagcctcgtgtgtgcctcgctgccgctttccttcttccgcaaagggatctacatcgcgctggcagtctttttgccgattcgctttggcgcaccggcgatgttctatgccgagccgctctccgatgtcgttgccgccgtcgtcacgacgatcgtctttgtgaccgtcgtccccggactcctccgcaaaagagaggcgctcctcggcaagcacatagaaaagtaaaaaggaacgcctgtcagaaaatggaactgtcgcaataagcataccgtactttgctctgataagtaatattattagaagaccagagaacaaaaaagttccagaataaacagacggcggcaaattctttgaagcaaaattcacgtatttcttccatgccgtggctggcatcccattccgtgtcttggccacgtttggacactcacggagtgtgtccgacaagccgcagacaatgagcggactttctggtgtccctaatg

SEQ ID NO: 11490 - DNA, 3225 bp, Unknown
  gut microbiota DNA sequence
atccaagttgttccaggtaaccataatagattcctcctatctattcttgcatatattcttattttattgatcgtagtgattatactattaaatgatctcaagttcaagtaaaacggcggagagtcaaccgctctccgccgtataatgatttattttgcggcagccggattcagtttcttcgtgcggatatcctcctgcaacatggcaaggaaatcttccatagataccgtcgtagactgctgctctccgtgaagtctgtagcttaccgtccggtctgccacttcgttcttgccgagaaccagaagatacggaactttttccatctgtgcctctctgatccgatagcccagcttctcgtttctctcatcgatctccacacggattccgttatcctcaaggtatttgtatacctcgtgagaatatgcattcaactcctcatcctcattcttaaccggaaggatctttgcctgtaccggtgcgagccagagcggcaggttgcctttcgtctcctccagaatgtaagccatgaaacgatccagggaaccaaggattgctctgtgaagaacaaccggagtcttcttcgttccgtcactgtcaatgtaggtcaggttgaacttcgccggcaggcagaaatccagctggcaggtagaaagtgtgtactcgttgccgattgccggttttacgttgacatccagcttcgggccgtagaatgccgcctcgccgatctcctctgtatactcgatgccgatatcatttaatacctttcggagtgcattctccgccatatcccacatagcgtcgtcgtcgtgatatttcaccttgtccgccgggtctcttaaggacagtacacagcggtaatcggtgatattgaagtctttgtaggtgtcaaaaatcagagccaccacgctggcgaactcagactcaatctgctccggtgtcacgaacaggtgcgcgtcgttctggcagaaatgtcttcctctctcaataccctttaacgtaccgctcgcctcgaaacggaagtcgtgtgcgatctcaccgatacggatcggcagatctttgtaggaatgcattctgtttgcatagatcatcatgtgatgcggacagttcatcggacgcagaacgaaggactctccctccacctccattgccgggaacatgttctccttatagtgatcccagtgaccggaagtcttgtacagaccaaccgtgccgacacacggcgtcataacgtgcagatagccgagttttctctcttttgccttgatgtaattctcaagctcctgccatacggtatagcccttcggaaggaacatcggcaatccgcgtcctaccagatcgtctgacatgaacagctgcatctccttgccgatctttctatggtcgcgctcctttgcctcctccaaaagcttcagatgtgcctccagttcctcggctgtcgggaaacatacaccgtaaatacgctgcattacgtgattgttcgcatcgcccttccagtatacgccggaatattttaccagtttaaaattcttgcagagctttgtattgtctacgtgcggtccgcggcagagatctgtaaaatcgccctggtcgtagacggagatcgttccatcctccagatcgctgatcagatccagcttgtactcatcgttcttaaaaagctctaatgcctctgcctttgagatctcacgtctgtagatctttttgccctctttgcagatcttcttcatctctttttcgatcgccgcgatcacgtcatcgttgactgcgttctcgccaagatcgatatcataataaaatccttcctttacgaccgggcctacccagaactttgcttccgggtataagtgcttgactgcctgtgccattacatgcgcgcaggaatgattgagtgtgttcagtctctcatctgctttaaaatctaccattttcttcctccttgttctgcgtccgggtgctttttccggacgaaaaaaatcccccatacagacctgtgcctgtatgagggacgaatatactgtatccgcggttccaccctgcttattcccgtaaaaccatgccggactgccggatcctctcggatcacgcatcccgctgtcgggaaatcactcgtttgatgataacggaatcaccggaccggattagggtcgctcagaggtggtcttcccagggctttcttccaagatgcttccaccgtatgcatctctctctgtagggtgccgcactggtactcttctcttcttcgcgctgctttagattctatttcaaaaaatcagaactgtcaaggtgtttgcagcgaatttccgaaaacaatctgctttcccccctgcaaagtggcttaccgtccgctcattgcagcgccgccgcccagatcagcccggtcagctcgtgcaccggttccaccgtcagcacatgctgaatgtgaaatggctcctgattgtatttttctccttttcgccgtgcccctctagccttccacaatctcgtactgcatcagctcgtatttcaatctgcttccttccataatctccgccggaagcagtgcccgcgccacaagcttcaaatcttctgacgggatatccgttcttcttaagttcgcgtagtctccatcgatcgagaccacttcataataccatgtctccattgttctctcctttgtaacctctttctattccgcatcccgcgccgctgttaaaaccgcagaccgcatttcggacagaattcataatcctccgtggtcgtaaaaccgcaatttctgcactgttttgtagtattccagccgtttccacgattccccggatgcaccggacgcaaatgttgtggcagaatctcgacatcctcgccgcgcgcaatccgttttccaatctccgtgtccagctcatagagcgcattgcaacagctcgcctgcacatagtagtgtctgttccattttatgcaggggataaagaaaagcgaaagtacggtgtatgtcatgaacacctgatatctgccgtaagctccgcaggcaccgcaggtcatcatctggtgaaaatcaaaatcttttctcccgtccgtaattcccataataaaaaacatgtgtcctcacgctccgttctcttgccgtttgttatctgttattatagacatatccatcgattgttacaacgataatcttgcaaaaccgtccggatgatataccgcgctcattgcgcctggatttcatgtgggttccacccgggttccgcttgg

SEQ ID NO: 11491 - DNA, 68882 bp, Unknown
  gut microbiota DNA sequence
aaatggggagaacttggtcctgcctggggtatgatcggtaccctgatcggattgatcctgatgctcaaggatatgaatgatgcatcaacgatcggaccgaagatggcagtcgcactggtaacaacactgtacggttcgttgattgccaactggctgtgtaatccgacggcatccaagctttctgtaaacaataataacgagatgatgatgaaggaaattacggtggaaggtattctgtcgattcaggcaggagagaatccacgtgtcatagaagaaaaactgaagtcattcctgtcaccttcagcgagagaggaaactgcggagggcagtgtcggaggtgaggaatagtggcgagaagaaaggaagatccacccaaaggctcacctgcatggatgaataccttcgcggaccttatgaatctcctgctctgtttcttcgtaatgcttttctccatgtccagtgtgaatgaggaaaagtttgagaaggtcattgcctctttccagagtacattcagcatactcccgggaggcggagcatcgatcggcgagggtgaattgatttcttccggaatcagtcagcttgagaattttgattcttattacaaccagcagctgagcagccagtctgacggacagacggaggaagaaaaagacattaccgaagcatatgaacagcaggaactggaagagtctgaggatatggcgcagcagcttgaaaatgcactttcgcaatatgggatacaggacgacgtcgaggttgattttaatgcagagtatgtaacgcttaacatgaacggcgcgctgctgtttgattctgcaagcgcagaactcagagatgaggcgtatccgctggtcaacaagcttggcaagatactggttacttacgataataacatcattgaggtcgagggacacacggacaatgtgccgattcattcttccaagtatgaggacaacaacgtactgtccatgtaccgtgcgcttgcggttgccaactatctgcgggataccacaacactggatcctgcatacataaagtcgtctggccgcggagagtatgtgccgattgcagataatgcaacgccggagggcagggcaaggaaccgccgggttgagattaaaatctataactcatacaactcgaatgtgagcgggacatccacggatgacacaggtacagagacgcctgcggatgcggctttaagcactgagacggtgacagatacgccggaagcagcgacaacaggtgcgactgtggaaccgacagaagttgtgaacgaataggaagggaagcataatgaagaaaaatttattggcagtaattattttggcactggttctcgtgaatctgattctgaccgcggtgctggtattttccattattccgcagaccaaaaagtcaaacgaactgattgatcaggtgtgcgctgcaatcaacatcgaactcgagggcggacagaacaaagacagttccgcagtgccgatcgaagaaattgcagtttataatatcacagataattttaccgtgaatctggcagacaacggcgatggaaagaagcattacgctgtattttctgtaggactttccgtcaacaagacaagcgagtcctatgccacctacgggggagacgagatgacagagcttacggataaggagaccattatccgcagcgacatcaatacggtagtggccaagtataccgaggaggagttcaacgcagatggacagaaggctgtgaaggaggagatcttatccaagatgcaggatctgttcggctccgactatatcgtgggcgtgaatttctcaagcgtggcaacggaagcacactagaataagacagtaggtggtgagagagaatgggtgaagtcttatctcaaaatgagatagacagtttgctgaaagctcttagcagcggtgaactggatgtagatgaaataaaagatgataatgaaaaacaggtcaaaaattacgattttgcccgtcccgcgaagttctcaaaagagcatttgcgaacgcttgagattatttttgaacattatggaagattgctttcaacgaatctgccggtgtacctaagaaaaaatgttcaggtggaagtgatgagttcggaggcggtgacgtattcagagtttgcgaatgcactatcgaatccggtgttgcttggaattgtaaattttgctccgctgaataacaatatcattattgaaattgcagagaatgtcggctttacgatcgtggatcgtatgctcggcggccagggggcgccgcttgacaagacgagggagttctccgaaatcgagcttcttctgattgagcggatctataacgtatgcgtgaatcttctggtggaaccgtgggcgagtgtgtgtgaactgacaccgagactggagcggattgagacgaattcgcagtacgcccagatcatttccccgacggagatgatcgcgttaattacgttgaatattaagattggtgatgtcgagggactgatcaacatctgcctgccgtatatcacattggaaagtgtgatggacaagctgaatacaaaatactggtattccagcctgcaggagaaggatgaacagcaatatacagagaccattgaggcacttattgcacgggcaccgatgccgatcaaggctgtgctgggtaacagcagtatatcagtcaatgatttccttggtctgcaggtgggagacattatccgtctcgacaccaaagtggatgaggatctgtcggtgtatgttggaaatataaaaaaatttactgctctgccgggagcatccggtgataattatgcagtaagagtgacatcagtaatcagagaggagcagtaagtatggatggagtaatgtctcaggaagaaatcaatgcattactgaacgggtctgcggacagcggcgagcagaagccccaggaagaggtactgactgagaaagaaaaagatacaatcggagagattgccaatatcagcatgggaacagcggcaaccacgttgttttccctggtgaaccgtaaagtagagatctcaacgccggtggtatctttcgcaaattggagtgatatctgtgaagcatatgaaaagccgtgcgtgtttatccggatcggatataccgtcggactggatggcagcaatatactggtcttaaaggaacacgatgtaaaggtaatcacggaccttatgatgggtggtgacggaaccaatacggatggagagctcggcgagctgcacttgagtgcgatcagcgaggcgatgaaccagatgatgggttcggcggcgacgtccatgtcatccatgctgaacaaagtgattgatatcagcccgccacaggcggatttgatagatttacaggagacaatcgatgagagcgtcatcgatgagttcctggcaggcgagtttgtaaagatacggttcagactggagatcggtgatctggtcgacagtgatatcatgcagctgtatccgattccttttgcaaaggaaatgtgtgagagtgtgacacagaacatggaggaagatacaaattcgactgcgggcagcaagagtagtgctccggaagcacagccggcaccgcagccgcaggcagcaccacagccacaggcggcaccgcagatgggacagccggcaatgggagcgccgatgatgggaggccagatgatgggacaaccgatgatggcacagcaaatgccacagatgtatggacagcagccggtaaatgtacagccggcacagttccaggcgtttaccggaagcgttccggtgggatacggaccggaaaatattgatctgatcaaggatgtaccgcttgaggtaacggtggaattgggaagaacttcaaaatctattaaagagattcttgattttgcacccggaactattatagaattaaatcgtattgcgggtgaaccgatcgacgttttagtaaacggcaaatacgttgccaagggtgaagtggtaatcatagaggaaagctatggtatccgtattaccgagattgtaaagtgattggaagcaggataagaaaagcaatataagcaaaacaatataagaaaagaaacaaggagagaatgttatggcaaagattatgatttgcgatgatgcagcttttatgagaatgatgattaaggatatcttaaccaagaatggttatgagatcgctgcggaggctgagaatggagcagttgcagttgagaagtacccagatgcaaagccggatctggttctgatggatattaccatgccggatatggatggtattcaggcgctgaagaagatcaaggagatcgatccgaatgcaaatattatcatgtgctctgcaatgggacagcaggccatggttatcgaggcaatccagtctggtgcaaaggactttatcgtaaagccgttccaggcagagcgtgtgctcgaggcagtaaaaaaagtagtaggctaatatgattttactcagttcaagcctgaacagttttatacagctgcttggtgtcctgcttatttttctgtttgttcttgtgattacctatttcacaaccaaatggatcggcggatatcagaaggtccagatgtccggacgcagctttcaggtggtcgataccatacggatcgccaacaacaaactggttcaggtaataaaaatgggagatgtgtatcttgtgatcgcggttgcaaaagataatgtgaccatgctcgcaaagcttaccgaggaagagatgggacttacggaggcagagatctgcaacggaaagactcccggacagaatggagaaaaaggtcagatgaccttccaggagacgcttgagaagttaaaggaacatttcccgaaaaaacaggattaaattatgacaaaatcaaaattaaagaaatcatattgtattatgtcgtttgtctttgcggtggcagtgctgatcatcgcattgacgttgtccatgggacagaccagagtctatgcggcagatacatcttcagatatgattactggcttgagcaataccgatagcagcgatggactgacggatgcgacgagcgatatcaacaacggcctgtccattacatacaacaacgacaccggagccgtatccacgccgatcaaggcacttctggtgctgacgatcatttcactggcaccgtccattctgattatgatgacttcttataccagaatcatcatcgtgctgcatttcctgcgcaccgcgatcggtacacagacagcaccgccgaatcagattctcgtcggtcttgccctgtttttgacattctttattatgtggccgacctttcagcagattaacgaagatgccatacagccgttagacaatggcgacattaccattgaggaggcatacaaggcagcggagacaccgattcgcgactttatgtacggtcagacacaggaaaaggatctgcacctatttatggatattgatggagaagattatccggatcagatgacactggagctttattacgatgttccgatgacaaccgtgattccggcatttatcatcagcgaacttcggtatgcgtttattatgggattcctcatttatatcccgtttattgtaatcgatatggtagtggcatcggtacttatgtccatgggtatgatgatgctgccgccgacaacgatttcactgccgtttaagatactgctgtttattctggcggatggttggaatctggtgattggaagcgttgtaaagacattttactgatgcgtgcatttggaacaggagatgaagtgaaatgacagaaggacaggtattagacattgccagacaggcattgtatacaattattttgtgctcggcgccgttgctgattatttctctggttgtgggactggtcgtcagtatttttcagacggtgacgtccattcaggaacagacgcttaccttcgtgccaaagattatctgtgtatttcttggaatgatgatatttggttcctggatactaaccaatctgacagagtttatcaatacgctctggtcagactttagtatatatctgggttaggttgaggaatgttaaattatacgttttcgttggtggattttgaaatactcattttaatactggttcgcatatcctgctttgtgtacgcggctccgtttttcggcatgaaaaatgttccgtccagagtgaagatcggattatcgtttcttttgtcgatcctgatattcccttcggtcgatcagtcagcggttacctacacgggcatgtttggatatgcggtgattgttctaagagaaggaattacagggttgctcatgggatttgctgcaaacatttgtaattccattattttatttgcgggaaatatcattgacatggatatcggactttccatggcgcaggagttcgatccgatgaccaactcgcaggtcaccatcacgggaaatctgtatcagtacctgctgcttctgatgatggtcgtgacgaacatgcatcattatgtactgcgggcgctcattgattcctatcaggtaatccccgtcaacgggcaggtgtttcaatgggacagcctggcagaggccatgacaacctatatggcggattcttttgtgatcgcgttccgcattgtgctgccggtatttgcctgcatgatgatactaaactgcatcctcggcattatggcgaaggtagcgccgcagatgaatatgtttgcggtcggaatgcagatgaaggtgctcctgggacttacggtattgttcctcacggtaatgctgcttccgggaatttccgattttgtgtttaaagaaatgaaacgaatgattgtatcgatgatagagggaatgtattagcttggaacaggacagaagacagatccttccctatcacctccagtggtttgcgaaggatggaccgggcggagaaaagacggaaccggcaaccgcgaaaaagttaagagaagccagagaggacggtaaggtcgccaaaagcaaggagcttaccgccgcctttgatctgattgtgatgtttctgatgctgaagatttttgtctccacgattggcgacggatttcttcagatattttactatgtatataatctgattccggattttatcggaatcaatgcgatggatgtgtccacctatgcggtaatgtctttcttttcaccggtgaatatacagatgctcaaaatcgtggcaccgttttttattttcggattcgccgtgacgctgcttgtaaatattctgcaggtggggtggaaggtttccacgaaaccgatgcagccaaagctggatcggtttaatccggtgaacggaatgaagcggattatctccaaggattccgtttttgaactgttcaaatctctgattaagattgcactgattctctatatcgcgtatactgcaatcaaggatcatgagaatgacctttttattttatatgatattccgttaaatcaggcgatcacgctgtgcggagatgtgattatcggtgcagggctcaagatcagtctggtgtatctcgttgtcggaattgctgatttcatctatcagaaataccgctttaatgaagagatgaagatgaccaaacaggaggtcaaggacgagtacaaaaatacagagggaaatccggaagtaaaaggcagacagcgccagcgtatgcgcgaggcatcgaggcgccgtatgatgcaggatgtcccgaaagcggatgtggttatcaccaacccgacccatctggcggttgccatcaagtacgaaccggaggtgcataaggcaccggtggttctggcaaagggtgaagattatctggcgcagaagatccgtgaagctgccagggagaatcacattgaaattgtagaaaacaaaccgcttgcaagaatgctctacgccaatgtcgaaatcggcaatgaaattccaccggaattgtatcaggcagtagcggagattcttgcaatggtatataatatgagacagtaaaacgaaggaggaagggatatgaaaaaggctgacataggtgttgcgctttatttgcttgctgcagtcatctttttaattgtgccgattaactctacgttacttgatgtaatgctggcgctgaatatctcgatcgcactgattgttctgttcaacacattgttcgtgaaggaagttctggatatgtcttttttcccgacattgctgttgtttactaccatatttcgtatttctcttaacgtgtcctcgacacgtctgatcttaacgaccggtgctccgggtaacgtcgttgaaacattcggaagcttcgtgggcggcggtgatatgatcgtcggagcggttgtatttatcattttgattatcatacagttcgtcgttatcaataaaggttccgagcgagtggcagaggtatccgcacgatttacactggatgctatgcccggtaagcagatggcaatcgatgctgacttaaacaccggagccattacggagacacaggcgagagagcggcgtaataagattcaggaagaagcaagcttcttcggttcgatggatggtgctacgaagtatgtcaagggagatgccacagccggactgattatcacgtttgtcaatttaatcggtggaaccgcgatggggatgatgcgcggtggacttgatttttcggaggcgattcagcgctatggtcttctcaccatgggtgacggactctgttcccagatcccgtccctgctgatctcactttctaccggtatccttgtcacgaaggcatccaagaatgcagacttctccaacattctggtaaaacagctgttcggtattccgaaggcactttatctggtcggtggatcgttgatcttcctcggtgctgtgacaccgctgaatgtggtactgtttgctgcgctgggcgctgcgtttatcgtagcgggcagaatggtggacaagaacatcggcattgagaatatcgaggaggaagtcagccaggcagagacggaggcggaggagatccgcaagccggagaacgttgtgtcgctgcttcaggtggacccgatcgagctggaattcggctacggtattattccgcttgcggatgtgaaccagggcggagatctcttagaccgcgtggttatgatacgaagacagattgcactggaacttggtacggttgtgccgattatccgactgcgtgataacattcagctgaatccgaaccagtacattatcaagatcaaaggaattcaggtgaccgagggagagatcctgttcgatcactatatggcgatgaatccgggatatgtggaggaggagattacgggaattccgacgtttgaaccgtccttccacctgccggcaatctggatcacggagagccagagagagcgtgcggagagccttggctatacggtggtggatccaccgtcaatcattgcgacgcatctgaccgaggtgatccgttcccatatcgcagagctgcttaccagacaggatgtacagaaccttgtcaataacctcaaggagagcaatccggttctcgtggatgaactggtgccgaagcttcttggacttggcgagatccagaaggttctgcagaatctgctctcggagggaatttccatccgagatctgctcacaatttttgagacgctggcagaccatgcgccggcgaccagggataccgatgtgttgacggagtacgcacgccagagcttaaagcgcgcgatctccagcaaatatttcccggcgaatgagacaaccagcgtgatcacggtagatccgaagatcgagcaggagatcatgggttctgtcaagcagacggagcagggggcatatctgacgctcgatccggagcgcacgaaggcgattatggcatccgttgaggaggaagtggcgaagttggagaacatgggcaagcctgccatcattatgacatcgccgattgtgcgtatgtactttaagaagctgaccgaggattacttcaaggatctgacggtgctgtcttacaatgaggtggaatccaacgtagaattacaatcagtagggatggtgacaatataaatgaccattaacaaatatcagggcaagacaaaggaagaggccgtcgagaaggcaaagcaggagttgggcgcgggggcggtcgtgctgaacgtgaaggagattaagcccaagggcatgtttaagatgtttaagaacacgctgtatgaggtgacggctgcggtggaggaaaaggaagcgttcccggcgcagacgctccgcagcgagacaaagcctgtgcacgatacgatcagtctggctgcagatgaaaagattaccattccgggggtggcaagagagaacaccagaccggcagtggcaccggcaccggcggaacaggaggttgttcctatgaaagaagcaaagcgcgaatctacgaatgagggactggaaaagcggctggagaacctgtcgaatattctggaaaagcagttttccgtggaggagatgcgcaagtctcatccggtagagccgcaggaaaaggagaaccgcacggaagggttccagtttatcaagatgctctaccgcacgctgctggagaatgatgtgaatgagaagtatgtcaatcagatcatggacgaggcggagaaggtgcttcacaacggaagcagtgtggattctattctttccaacgtttatcagaagctgatcttaaagttcgatcagccgcagacgattgagcttacaggcaaaaagccgaaggtgattttcttcatcggaccgaccggcgtgggaaagacaacaacgcttgccaagattgcgtcacgctataaggtagacaaagagaagaaagtggcatttctgactgcggacacctaccggattgccgcgacagagcagctgcgcatctacgcaaatattctggatgctccgatgagcattatctatacgccggaggagatgaacgatgccattgcgcgcgtgagcgaatatgatctggtatttgttgacacggcgggattctcgcaccgcaatgaggcacagtgccaggatatgaaaaagctgatcgacggactggatgaggcttacgagaaagaggtatacctcgtgctcagtgcgacgaccaaatataaggatctgctggagatcgcagatacttacaaggaaatagcaaattataagttgatttttacaaagctggatgagacaattacttatggtaatattttaaatatcaagctgtattcgggggcaaagttatcctatatgacgagcggtcagaatgtaccagatgatattgaagtatttgatacacaaaagattgtgaaacagctgctgggaggcagataacacatggatcaggcagagaagcttagaagtgttgtgaaattaaaaaaacaaaattataagccggatgccagagtcattaccgtcacaagtggaaaaggtggcgttggaaagtcgaatgtggctgtgaaccttgcggtgcagatgcagaagatgggaaaaagggtgcttgtttttgatgcggattttggccttgccaatgtcgaagtaatgtttggcgccattcccaagtacaatctggcagatgtgatatatcatggaaaacagatcacggagatcatatcggaaggtccgatgggaattgggtttgtctcggggggaaccggagttaccggactgggcaatctgaccgatgaacagatctcttatctgcttcactgtttcggggaactggatcagatggcagatgtgattctggtggacaccggcgcggggattgccaatcatgtactggagttcgtgctggcaagcccggaggttcttgtggtcacaacaccggagccgacatcactgacagattcttattctctgttaaagtctctgtaccggaatccgaagtttgacagggagtacaccaagatatcggttctttccaaccgtgtgatatctgctgcggaaggcagaggagtttatgacaaactgaatactgtggtaggtcagtttttagagggggaaattacatatgcggggatgattccccaggatagcgcgcttgaaaaggcgatccggatgcagaaaccagtatcgcttcaggcaccgttgtcaaaatctgcaagagcatttgaagtagtggctgcggaattgctgcagggtgagagcagtgacgcatatcgttcttttggactgtcaagattgttttcgggattttggaaacagaagaatgaaggagtggaatgatgacaatagctgaaattattcaaccgggagataaagttgacatcagtttcgtacagaatgtggaacgggcaaaaaaagaccagtccatgccgaaaatctacaaaagccaggtgctggatttaaaggagaacggcaatcttgagatttccatgccggtggagagaggaaaactggtgctgcttccgctgggcatccggatggagtttatctttttctcgaagggaacgctttaccgcgccgtcggccaggtgcgggagcgctacaaaagagagaatgtatacatgttagagatcgaattaaaatcccagatctccaagtatcagagaagagaattcttccggtttccatgtattatggacatgaattattacaccattgaggaacaggaagccgcattaaagacgggagaagccctatttattgaactgcaggaagcggagggaaagagcagagaccgggaatatgccggaaggatcgtggatctaagcggcggcggtatccggtttcggacggatcagaagcttcgggagaatcagtatgttctctttgagatacatctgcagaatgaaaatttagacaaacaatattatatcattggaacaattatttcctgtatcaagacagaaaaaacgccggaaacgccctacgaggccagagccaaattcctgattaccgacagcagtgtaagggaggaaatcatccggttcatctttgaagaagaacgcaaagcgcgtcaaaggggtagagcataagatatgagtaaaaagattttaattgttgatgactctgcactcatgagaagggtcatgtgtgatataatcaattcagacggaacatttcaggtcacagatacttgctgtgacggtcttgaggcatatgagaagcttaagacgacgcgctatgatggcgttgttctcgatgtcaatatgccccgcatggacggactgcagcttttggaacagttacagaaggacagaatccgtgcaacggtcatcatggtaagtacgacgacaaccaaggatgcggatgtcacgatccgggcgatggagcgcggggcagtcgattttgtcacgaagccaaccaatgttattgaggcaaagggcgaggagttcaaaaaacagcttctcggcgtgctctcggcggtatgcgcgacccagagttacaatcgtgaacggcgcatcacaccgcagaccaaggctgtatcggctcctgcggggaccgcaaagccggttgcaacagccggacatgcgatcaagagtggcagcaagatcgttgcgcttgcatgttcgacgggcggtccgaaggcgctgcagagtgtcattccgtatctgccgaagaatctggacgcaccgatggtactggttcagcatatgcctgccggatttaccaagtcaatggcagacagactggacgaggtcagcccgattcatgtcaaggaggcggaagacggagatgtgctgatgaaaggaacggtgtacatcgcaccgggcggcaagcacatggaagtgaagcgccagccggatggaagtcacaggatccggttgaacgatatgcctgcgatcggcggcttgaagccgtgtgccaacatcacgtacgattccctgcgggactgcggttacgatcaggttgtatgcgtggttctcaccggaatgggtgcggacggcaccaaggggattgtttcccttgccaggaagaagccggtctatgtgatcgcacaggacgccgcatcgtgcgtggtatacggaatgccgaaggcggttgccgaggcgggcgttgtggatgaagtggttcctcttaatgacgtagctaaatcaattattaagaatgtgggggtaaagtaatatggatgtaagccaataccttgagatttttattgatgagacaagtgaacatttacagaatttaagtgactgcatcatggagctggaaaaagatccggagaacatggacacgatcaacgagattttccgtgcagcacactccttaaagggaatggctggaaccatgggctttaagagaatgcagcgcctgacacatgacatggagaatgtgttccaggaggtccgcagtgagaaagtcaaagtgaccagttctatgattgaccttctgttcaagtgcctggatgcgatcgagggctatctcgacaacgtaaaggcaagttcggatgagggaacagaggacaacgaactgatcatcaaggaactgaatgatttcatcgcggcggaggatggcgcagcagctgcacctgcacctgcacaggcggagccgaaaaaagaagaggcaccggcacagaccgcgggcggagatgataaaaagtattttgagttcggtctcagcgagtccgagaaggataaaatcaagcaggcggaagagggcggcgcacacatttacggcatgaccatctatatccagaaggagtgtctgttaaaggcagcgagagcattcctggtattcaaggcagtggaagagtttggagagatccttgtatacaatccgagctcccaggatattgaggatgagaagttcgactgcgatttcagcatttttattgcgtcggacgagccgtatgagaagattgcggaagctgcaaagtcggtatctgagattgataaggttgtcggtgaggaagtaaaatacgagacgctggctgcaaagcaggagaaagcggaagcggacgctgcggcggcagaaaagtcccaggatgcaccggctgaggcggcaccggcacaggagcagccacaggcacaggcagtaaagccggcagcgaagacacagagcagcggcaataaaaagcagacggttgcaaagcctgtcacaaaccgtactgtccgtgtagatattgagaagctggatgcattgatgaaccaggtatccgagcttatcatcgcaaagaacagtctggtgtcgatcagctccaccgattctggagatttccagaaccagtccttccatgagcagattgaatatctggagcgtatcacgaccaatcttcatgagtccgtgatgaaagtccggatggtgccaatcgagagtgtagttgcaaaattcccgcgtatgatccgtgatctttccagaaagctggacaagaagatggaactgtacatgacaggtgaagatacagaacttgaccgtaccgtagtcgatcagatcggtgacccgctgcagcatctgcttcgtaattccgcggatcacggacttgaagacaacgcaacccgtattgcaaagggcaagccggaagtcggaagcattttcctcaacgcatttcaggaaggcaacaatgtcatcatccaggttggcgatgacggtaacggaatcgacgtggaggctgtgcgcaacaaggcaatcgagcgcggtgtcatcactgaggagcaggctgagacaatgagccagaaagagatcatcaatctgctgtttctgccgagcttttccatggcgaagaagattaccgatatttccggacgtggcgtaggacttgacgttgtaaaatccaatatcgaggctctcggcggcgatgtggaagtaaagacagagctcggtgtgggaacgacctttaccgtacgcctgccgctgacacttgcgatcatccaggcactcatggtagagatccgcgatgagaaatacgcaatcgcacttggttccatttccaacatcgaggatattccggtgaaggatatcaagtatgtggaggctcaggaagtgattcacctccgcggcaaggtaattccgctgatccgtatggatcaggttctggatattgagccgaaagaagaagagccggagagcctgacggttgttattgtacagaagggcgagaatctggcaggccttgtggtcgacaacctgatcggacagcaggaaatcgttatcaagtcacttggtaaatacataaacaacaacaagatcatcagcggcgcaacgatccttggcgatggtgaagtggcactgatccttgatgtgaatgtactgatgtaagaggaggcggacaacatggcagaaaagaacgtggaagtaattgacaaagagtcaaaacagtatattgtcgtaatggtcggaagcgagcagtacggaattgatatcagctatattgacaacatcgtgcgtatgcagaagattacccgtgtcccgaagatccagtcctactttaagggcgtgatcaatctgcgcggtgagatcgtatccgtaatgagtatccgcaacaagatggggctggaggatgatgtgttcacgaacgcaagccgtatcatcatcttaaagctggaagaaaagggcgcgatcggtgtgattgtcgacgaggtgaaggaagtcgtcaatttaagtgaggatgaaattgaaaaatcgaccaacaagggtaaattcatcaatggaatcggtaaacacggcgatgatctgatctcacttctcgagattaactcggtggtggatgacaacgcataagcacacagaacatatgcgtgcatagacgtgtgcgcaggttagcggaatggaatacattccgctaacctgcttgttttactacagggaatgcagcgggagagaaccggagacattcctcttagaaaaccatggatatattatgttgagaggagaaaaaacgttcatgggtaatatgacactagagcaagtgaatgacatgtacctggacgtattgcgtgaaatcggcaatatcggagcaggaaatgccacttcagccattgcaaatatgcttggcatgaagatcgatatgaatgtaccgagcatccggctgatggaagtatcacagttgggaatggcggtaggagcggaagatgagacaattgtcggcattttccttgaggtggagacagatattgagggaagcatgatgttccttctggatattccgtctgcacgttatctggtcaacaagctgatgatgacaaacgaaccggatgaccagccgtttggcgagatggaactttccgcattaaaagagatcggcaatatcattgcgggatcttatctgtccgcattgtcctccctgaccaatcttgtcatcactccgtccgttccatacatcgcggtggacatggcagcatcgattttgagcgtgccggcgattgaatttggacagtacggtgacaatgcattgttgatacagacggagatctgtgcggatgtggcgatcaacggatattttatcttgatgccggagcaggattcttacgaaaaaatattaacgtcacttggtatctcaatataaggagaatgcgtatatgagcgaagtcataaaagtaggcatggcggacctgaatgtttgcaaggctccggatgtaattacgactttaggtctcggttcctgtattggactggttctttatgatccggtgacaaaagtgggaggcatggtgcattatatgcttcctgacagtacaaaagtaagaaacaacagcaatatagctaagtttggagatacgggaattcgggaattgttaaagcgagttgttgcggcgggagcaagtaagccaagactgatcgccaagattgccgggggcgcgcggatgtttgaggtaagcggactttcggatgtaggaaatatcggagcaaggaatgcggaggctgccaaagcgattttaaaagaacttggaatccggctggtagcggaagatacaggactcaattatggtagaacagtggaactgcattgtgataccggagaattttatattaagtcggtgggcaagccgcttaagatcatttaaggaagggctgtaagtatgaaaacaaaatcagtacctgcgattgtgatgctgtcagccgggtttgtcgcctgcgtagcgggcatctgtgcacacatggaagtggcagatttcatgaaaatgcttttgattgtcctgattgtattttaccttctgggcggtgtggtcaaaattgttcttgaccgcaattttgccgggatgaatgacgaggaaaccacggatggtacattgtcgcaggaagaagaggatcctgaggcagaagagaatgaaacggcatcggaggatacagagaatgccgatgcgaaagaacagtaatctttagacgtgggggcttccaatgaaaacggttgacagagaaaaactatggggagaataccagaaaaatccatcgtctgcgctgagagaaaagctgattacggaatatgcaccgctcgtgaaagtggttgcgggccggctcagcatgtatcttggatacaatgtggaatacgaagatctggttagttatggaatattcggacttatcgatgccattgataagtttgatcccggaaaagacgtaaagtttgagacatatgcgagcctgcgtatccgcggttccattctggatcagatccgcaagatggactggataccaaggactgtcagacagaagcagaagcggattgaggaagcaatcaaaaatatcgaggcgcggacgggacgtgctgcggcggatgaagagattgctggggagattggaattgcggcggctgaactgaatgagtggcagtcgcagttaaaagtcacaaacgtggtatctctcaatgagttcgtggagcagggcggagagccggtgatggatgcgcgcgggaactcccatttcgcacagccggaggacaatattgaggaggaagaactgaaaaaagttctgtccgagacaatggatctgctcacggaaaaagagcgcaaggtgattcttctgtattattatgaagaactcacgttaaaggagatcagcaatatattggaagtgtctgaatcgcgcgtgtcgcagcttcacacaaaggcgctgcttaagatgcgcaaaaagatgggaagctatatgggaattctgactgagtagcagatgagcggaggtgtgttgcatgtcaataagaccagttgttttaaacgggatgattcagaggacgcaggatgtcgggaatctgaagcagcaggaggataataggccgattgtcgaacagcagaatattcagattgaacagcagaagcacgaagaccagctgacccatcgtgtgcaggatccggaggaaaaggagaacgatggctatcgttatgatgccaaggaaaagggcaataacgaatatgagggcgaatccggcaggcacaaaaagcgccgcgaagaggagcctgagaatgagggaaaagtcatattaaaagggcagggcagccattttgatatcaagatatagataggtgaggagaagcatatgaccggagtagcatggatattacttctgatcggtgtggtttttatgatcggaagcttttttgtgacggaaaagttatcaccgtcagaattgaaccagattgcagagttgagcgaagaggaattaaagagaatcattgaccggggactcaagaatgcggagacacggattgaggatgcgattgatgagcaggttgaccagtcttccgaaaaggtggatcgttcccttgaaaaagtgacaaacgataagatcatggcgatcagtgaatattccgacacggtgatcgagagcatgaataaaacgcataatgagattatgttcttatacagtatgctgaacgataaacacacggagcttaccggtatggcggcggatctgcagcgcctggctgcggatgtaagaagtcttgaggagaaagcacctttgactgcaccgcaggctgcaccggagcgtgccgcaacggtatctgcggcttcggcagtaacactggtaccggttgagaaggcagatacgacggggagagagacggctgctgcaccggcagagcagaaggaagagatgccggagacggaagagacaaagcaggaaggactgcatgcagagattctgaagttgaaaaaactcggaatgacggaggttcagattgccaagaagcttggaatcggaatcggtgaagttcgcctggtcaatgggctttacagaggagagagtgattcgtgaaactgaaatattatttgcggggactggggatcggaatcattgtcacaacggtgatactggcagtcagtttttcaaagaaagagatcaagatgtctgatgaggagatcatggcacgggcggcacagcttggcatggtcatgcaggagacagagacaacagagcagggcgatacggagcaggatccggacggcacggacaccggagcgaagacggaggttgtgaccgagcagacggcatccgaactattggaagaacgaaccgcggcagaagagaccgcgcagaatacggaagctgcagctgaggacgtggcagctgaggcgcaggagaatagcgcgaatacggatgaggagacgcaggcacagcaggaggctgctgatgcagagaatccgtccggcgtataccgtctggtgattcagaaaggggatgtctgccgtattgtctgcgagaagctggcggagaacggagtcatttccgatgcggagacgttccggcagtatttatcgcagatcggctacgcttccaatatgcgtgttggcaactacgatattccttacggtctgtcgaatgaggaaattgcaaaaattctgcaggcgggaccgcttgaagagtaaaaaggtacttgcacagcaaagatgtttgtgatataatatgcgaggttcaagcgtggaaaatcatttccacacaataatacacatatgctgaccaccgggccggtgccgaatggttgccttgcgggatgaagcatatggaagatttcaaccatggaggtaagaaaatgagcgttatttcaatgaaacagttacttgaagcaggtgttcacttcggacatcagaccagaagatggaatcctaaaatggctccgtacatctacacagagagaaatggcatctacatcattgacttacagaaatctgtaggcaaggtagacgaggcttacaaagcagtatctgatattgcagctgagggcggcaccattcttttcgtaggtaccaagaagcaggcacaggatgcaatcaagaccgaagcagagcgctgcggcatgttctatgtaaatgagagatggttaggtggtatgcttaccaactttaagaccatccagagccgtattgcaagattaaaagagatcgagacaatggcaaccgacggtacattcgaagtactgccgaagaaggaagttatcgcacttaagaaagagtgggagaagttagagaagaaccttggcggtatcaaggagatgaagaagctcccggatgcaatcttcgttgtagacccgaagaaggagagaatctgcattcaggaggctcatacattaggaattaccctgatcggtattgcagatacaaactgtgatcctgaggaacttgattatgtgatcccgggcaatgatgatgctatcagagccgtaaaactgatcgtttccaagatggcagacgcagtgatcgaggcaaaccagggtgcagagatgactgcagaagaggctgagtccgcagaggcagatgcagcagaggaagcataataagttggaaacaacgggtgcctgattggcaggatcgcccatatgtcaacaatcggaaagggacgcgtgttacgtccctttctgtggcataaagataaagaatcaggataaattattttttggaggatgagaaaatggcaattacagcagctatggtaaaggaactgcgtgagatgaccggcgcaggcatgatggattgcaagaaggcattaaatgagacaaacggtaacatggacgaggctgtagagttcttaagaaagaacggacaggctaaggctgagaagaaggcaagcagaatcgcagcagagggtctttgcatggtagtgaccaaggatgaccagacagcagcggttgttgaggtaaactctgagacagacttcgttgcaaagaatgcaacattccaggagtttgttaaggctgttgcaacacaggcagtgaattccgatgcagcagacatggatgctttcatggctgagaagtggaatgaggatgccagcaagactgtaagtgaagcactggttgagaaggttgcagtgatcggcgagaacttaaagatccgcagatttgagaaggttgtagctgagcatggctgtgttgtaccgtatgtacacggcggcggaagaatcggcgttatcgttgatgcagacaccgatgttgtaaatgacactgtaaaggaagcaatgcacaatatcgcaatgcagatcgcagcactcaatccgaagtatgtttccagagacgaggtaagtgctgattacatcgctcatgagaaagagatcctcttagcacagatcatgaacgatccgaaggagtcccagaagccggagaaggtaatcaacggaatgatcgaaggacgtatcagcaaagaactcaaggaagtatgcctggtagatcaggtttacgttaaggctgaggacggcaagcagaccgttgccaagtatcttgaggaagtatccaaggcagttggcggtactgtgaaggttaagagatttgttcgttttgagactggcgaaggtcttgagaagaagcaggaagactttgcagcagaagttgcagcacagatgaacgcataatttgatattgtgctaaactgttgaaggataatgacccctacgaatggtggagacactatttgcaggggtcattttgtaagaaaaaaccttatcgaacctggttatgattcgataaggtttttgcgtcataaagtataaattctacagtcccatgatcgcgtcgaccggcagggcaaagctgacgccgtgcgccggtgtgtcaatgccgtgctgcttgctgatggcggtcatgatttcggtctttttatcctttggaacgacgatggcaaggacttcctgttcctcctggagagccatgccgaaatgtttggcaacctcctccggactgcagcgcagaccctttaagatcgttccgccggtagcaccagcagcgcgcgcggtgtacatgacatcatcgctgtatccctgattgattgtgacaagaatcattgcatgtgtaatcgtttcactcatttttttcacctctttttctatctccggctcagaggagtccaaagaaccggaaccgagaactttatagagccatccctgaatgccggataacggtatgctgacagcgataccggttcctctcttgtgaagctgcagcgcctgattcatctccgccaacagcatacgggtgcgttccttcgggacgatgcatagcatgatggttttgttggtgtcgccgagaccgcacagattcagaaaatcggaactgacggtgccgacgccgtgcatctggtaatagatcgggatggaggcatcggtgagaaattcggtcagtttatcacggatattggaatctatgataatgacgaggcaccggaatgccggcatcttttttttatgttgcatggtatgatcctgcataattattcctcctcaatatccataatggcattgtcgtcgacatcgatcatgataagcgcatcggatgtcgccctcttaagcttcagctgatacagtacgcccatgatctgaatggcaattaacggtgccattgcgaccatcgccacgacgccgaacgcatcggttaccacattgccgcccacggcggtacatgcgcccatggcaagcggaagaagaaacgtggaggtcatgggaccgctggcaacaccgccggagtcgaaagcgataccgacaaatacttttggaacaaaccgggtgagcaccagagcaatgatgtagcccggaattaagagccagtaaatgttaagtccggtcagaacccggagcagcgccagcgcaacggaagcggagacaccgatggagagacagaggttcatcgcactgcgcgaaatggaaccgtttgtcacatcctccacctgcttgttgagcacctgcacggcaggctcggcttttacaatataataaccgattaacgcgccgatgggaatcagaacaaagcgccatgtctgtgcggcgagattgctgccgagcagacttccgacgggagcaaatcctacgttgacaccggtcagaaacaggatcagtccgatgatggtgtagagaaagcccataagcatcttgatcatctggttcttgtggtagcgcctggaaatgagctgaaacagtaaaaagacgatcagtaccggaaggatggaagaaatgacttccctgccatagcccggcagcatatgtacaaactgacgcatgacatcctgcatggtcacaacatccggtatttcggtggcattgtaggatgcaccggctggatggtagaaaataccgagcaggagtaccatggcaatcggtccgatgctgcagaaggagatcagaccgaaactgtcgctcgaaccgtccttgtcacttcgcgtggaggagaggccaacaccgatggccataataaaaggaacagtcatcggacctgtcgtcacaccgccggagtcaaatgcgactgcgatgaaatcagccggcgccgcaaaggagagcaaaaacagtgcggcatagaggatacacagcagcagggggaggctcagcttgaaaatgatacgcaaaacagcgatgaccagaaagacaccgacgccgagagcgaccgtccagattaaggtttcgtttggaatagaaggaacctgattggcgagaacctgcagatccggttccgcgattgtgatgatgacacccatcacaaagcagacaataatcagaatcgaaagacgcttcgtcttcatgatatgggaaccgacaccttcgccgagcggtgtcatcgccatctcagcacccagctggaaaaatgccatgccgatgatcagcatgaacgctccgaccagaaacagggcaatggttccggtctccatcggtacgacaaaaatgctgagcaacagcacaatgacggtaatgggaagaacggcgcttacagattcgtcgaatttctcttttaattttttgttcaaaataacatcacacactttctaggattcggttaatagagttaccagttaaacagttcacaaatcaactattattttatcggttgttgtgtagaaagtcaaccgagtcggagtgatttttctgaaattttaacacttttttaattgacttttatacagatttcaaataaagtttctatataaacagttcacaaatcaactaaagcaaagagaaggcatgaaccggcggaaaggagggggaacatgctggaggacttttttgaaaattattttaagatagagaaagcataccggaaatactttcaggatgagatggagaaatatcatctcacgccgaacgaattgctggtgctgctttttttggcacgcgacaacggcggatgcaatacggcgcgggatattgcgcagtacgagggggtgtccaagggactggttgccagatcggtggagagcctcgtggaaaagcagtttcttgtggtggaacgggatgctgccgataagagaatctgccatttatatctcacgcagcaatgcagtgcgctcacagagcagatgacggagaaaaaagctgcgtttttccgcaggctggccgaaggtattccggaggaagcgattgcgacgacggaacagacactgcgcaggtttatggaaaatatatccgcatctattgacaagtcgtaagtgctttgctatcgtgaggaaagagtcttggaatgggaaaggagcagggaacatgcgcagtgcagatagaagaaaagcgttttttgcggtttgcatgatggcggttctgctgttttcccatcttggtgtctgtctgtggcagacacagatcgcccaggtgcagaatctgacggcagaggccggaggggaagcacagggtattttacggacgacggactccgattatgtctcaaacgcgctctcagcggaaccggaagcaggattgtcacagagtatgattgtcgtgacgagaaaaatgaccggggcggcggagcagcgtcttttttttcatctttttactgctgttttattcaaaatagcagagattccctatgcagaggcggtagtgcttaccgtcacggcggcgtgcatctgcctggcaggttaccgcatggtacgattcgtgcacaattccgacggtaaaaaagatttgcccttttggttatcacaggtatcagaagcgtcataagattaggataagaaaagggaaaagaagaaaatggaatataaaaatttttttgcactgctgggcgggcttgcactctttttgtatggaatgcatcagatgagcgagggcttaaatgctgccgcaggtgagaagatgaagcagatcctggagcggctgacaaagaaccgcttccttggcgtgggcatcggagcagcggtgacggcggtgatccagtcatcctcagccaccacggtcatggtcgttggctttgtgaattccgggatgatgactctgcgccaggcggtctggattatcatgggggcaaatatcggcaccacaatcaccggtcagctgattgcactggatgcgggagccgttgcgccgcttctggcttttttgggggtggttctgattctgtttgcgggaaaagaccggatccggtacacaggcgagattgtggcggggcttggaatcctgtttatcggcatggatatgatgggggaagccatgcagccgctctgtgattcgcaggtgttccttcaggcaatgacaaagtttgaacatccactgcttggaatcctggcgggcgcggcgttcacggcagccattcagtcatcctcggcttcggtcggtatcctgcagaccctggcacagggaggagccgtatctttcgcgggggcggtgtatgttctgttcggtcagaatatcggcacatgcattacggcggttcttgctgccataggcaccggaagaaacgccaagcgcaccacgatcattcatctttcgttcaatctgatcggaacggtggtgtttaccgtgctgtgcatgacaacgccgctcgtttcgctggttgcgcagctgacgccgggacggccggctgcccagattgccaacatgcatacgatttttaatatcggaacgaccctgcttttgcttccggccggaaatctgctggcagggatggcagagcatcttcttccggataagaagagcgaatcgcttgcggcggaacagagaaaggcagcatgcaaaaaagtggaggatgtatggaattcataaagaatgtcataagaggaattacgatcggaatcgccaatgtagttccaggagtgagcggcggtacgatcatggtgtcgctggggatttatgatgaacttctgcaggcggtcaccggatttttccgtcataaaaaggaaagcatcttaaagctgtttccgtatctgtttggaatggggatcggaattatctgcctttcctttatgatcggttatctttttgagaattttccgttccagaccgcgatgctttttatcggactgattttcggcggcgtgccgctcatctggcgcaaggtgtccaggggatatccgaaggtgccggagctggcactgtttttgggattcttctgcctgatgattggaatgcagttccttggaaaaggcagcgaacaggttcttgccgccggtcctgggacggcagtgaagctttttgcggtggggctggctgccgcggctacgatggtcattccgggggtgagcggttcgatgcttttgatggcgctcggatattacacgccggtcattgaccatatcaatgcgttcgttgtggcggtggtcatgctggatgccgggacggcgtggtactgtcttgtcctattagtcccgttcggatgcggcgtgcttggaggtatttttcttgtcgcaaagctgatggaatatctgctctgccggtttgagcggctgagctactgggcaattttcgggctgctggcggcgtccccggttgccatattagggaaaatcccgctgcgcgggacatcgccggctgtcatcgcctggggcgtgatgctgtttagtgtgggggcggtggtcaccgggcttttagcgggagaaacataaaaattcagaaaatacatgaaaaagtgtagaaaaatcatacgatttttttgcgcttttttctttgaaaaatacaaaaatgtgatacaatagataaagtattatgattaacttgggggttctacatgcaggataaggattctgaggcactccgcaatcaacgcaggcggagaaagcggattgcaagaatgaaacataccataatcgcgataattgccgggtggatcatcctgtccatgattctgatcatttttctgcttgtccggacgagatccatggagagaaagttagatgaactctggcagatgcagcgggtgatgaaccagcaggtgccggatacggaggcactaccccaggaagagaccagcggcatggatacggagacagtggctgtgacggcacctgcatccgggatcgacgagacagacaatctggcacaggatggagatgtacataaagtttatctgacgtttgatgacgggccgtctgagaatacggacgccattttagatgtgctgtcggagtacgatgtcaaggcaaccttttttgtggtcggaaaagaggatgaggcatcggcagccatctaccagaggatcgtggatgaggggcatacgctgggaatgcattcctattctaataagtacagtctgatctatcagtcggaggatgcgttcgaggcggattttcatcagctgcaggattatctctatgaggtgaccggtgaaaagagccgctattaccggtttccgggcgggagcagcaatcagatcagcaatgtgccgatgagttcgctgatccggtttttaaacagcgaggacgtcgtttattacgactggaacgtctcggcaggtgatgcggcaaatgctgcatatacaccggaagaactggtcgagaatgttgtttcagatgtttcaaaatacaagacctcggttgtgcttttgcacgactcggaagataggtcaacaacggtagaagcggtaggaccgctgatcgaggcattgcaggatatggatgccgagattttaccgattgatgaagatacacaggttatccagtatgtcaaagccgacagtgccagatgaccagattataaatggaggtaagaacatgggatttttcaaggactttaaggatgatttctcacaggcagtgaatgaacttatgccaggagaagacaatctcgaaagcacggacaaggatgatgacatggtcgtgaacacactggaagatgaagtggatgtggcgagcgaattgtcgaagctggatggtctgttagagcaggtaacgaagcaggagccagctttggagcggacacaggcagcaacggtggaaccacagaaaacaagagaagaatacacacagcatgcaatggcagcagcacaggaggaaaagaaaatggctgataatacagtaacaccagtacaggtagcacagacaggagcacaggcggcagcaccgcaggagaagccgatcgtatcggatgaggtttccgtgattacagagggaacgattatcaacggtgatgtaatttcaaacggatctctcgacatcagaggccaggtagacggaaatgtaagctgcaatggaaagcttaccgtaaccggcgttgtcaacggtaacagcaacacttccgaattctttgcggattctgcacaggtagagggtgaagtcgtaagctccggtacggttaagattggtcttggttctgtaattataggtaatgtaacatccaactcggcagtgatcgcaggagccatcaagggtgacatcgatgtgcagggaccggttgttgtggatacttccgcagtggttatgggtaacatcaagtcccgttctgttcagatcaacaacggcgctgttattgagggattctgctcccagtgctatgcagatgtggatgttcagagcctgttcaatgccaagaaaggaaactaagcatcatgaagagagttctgttaaagttaagtggtgaggcgcttgcaggtgataagcacacaggatttgacgagccgacagtcacagaggttgcaaaacaggtaaagcagattgtggatggtggtaccgaagtaggcattgtgatcggcggcggcaacttctggagaggacgcaccagcgagacgatcgaccgcaccaaagcggatcagatcggcatgcttgcaacgatcatgaactgcatctatgtttcagagattttccgctctgtgggcatgcagacacagattctgacaccttttgagtgtggaagcatgacaaagctgttttccaaggatcgtgcgaataagtattttgcaaagggaatggttgtgttttttgcagggggaacgggtcatccatacttttcgacagatacgggaattgttctgcgtgcgattgagatggaggcggacggaatctacctcgcaaaagcgattgacggcgtgtatgacagtgatccgaagctgaatccgaatgcagtgaagtatgatgaagtctctattcaggaagtaattgacaagaagcttgcggtggtggatctgacagcctccattatgtgtatggagaaccggatgccgatgtatgtattcggactgaatgaagagaatagtatcgtaaaagccatgacgggagagtttagcggcacgaaggttacggtttcttagaattgatagaaaggcatggtatatatatggatcagagattagcggtatttgatgaaaagatgggcaaaacaatgaataatcttgcggaggagttcggcggaatccgcgcgggacgcgccaatccgcatgtgcttgacaagttgagagtggattactacggtactccgacagcaattcagcaggtggcgaatgtcagtgttccggagccgcgtatgattcagattcagccgtgggaggcatccatggtaaaggagattgagaaggcgatccttacttccgatcttggaatcaatcctacgaatgatggaaagacagtccgtcttctgttcccggagcttaccgaggagagacgtaaggaacttgcaaaggatgtaaagaaaaagggcgaaaatgcgaaggttgcaatccgcaatatccgccgtgatgccaatgattcctttaaaaagcttgccaaggaggatgtctccgaggatgagatcaagcagctggaagatcaggcacagaagatgaccgataagtacatcgcagatgtggatcgtgccgttgaggcaaagacaaaggaaatccttaccgtatagtttggatagatttgaaacgagaggagatacaggtgtttatggaggcatacatctgtatcttttccgttattttgtatagttgatacttcagtacagatacgagggagaagcacaggtatggagacgggaagaaagattccacagcatatagcgatcatactggatggaaacggaagatgggcaaaggcaaagggaatgccccggaattacggacacacagcgggagccaagaatgtcgagacggtatgccaggcggcacatgatctcggtgtaaagtatgttaccatgtacgcattttcgacggaaaactggaaccgcccggagggcgaagtggaagcgctgatgaagcttttggaaagctatctgaagaactgcattaagacagcagacaaaaacaatatgcgcgtgcgcgtgatcggcgatacgacgagactcagtgagcgctttcaggagcgcatccgtgaactggaggctgcctccgcaaaaaatgacggcttgaatcttcagattgccatcaattacggcagccgcgacgagatgacacgcgcaatgcgccgtatgagcgaagatgttgcggcggggaagagaaagccggaagagatcacggaaagtgtgtttgaggagtatctggataccgcaggcattccggatccggatcttttaatccgcacgagcggggaactcaggttgtccaatttcctgctctggcagctggcgtacagtgaattttactttaccgatgtgccgtggccggattttcacaaagaggaattagagcgtgccattgaagcgtataataaaagagacagaagatttggcggtttgacagacaagaaataggaaggactgccggatggaggagatatgtttaagacgagattattgagcggaatcgttcttgtgattgccgcattggtattgattattaccggcggggatgtgctgctggtgtccacgttgctgatttcctggatcgggatgtttgaattataccggatttttcatattgagaagtctgcaccgggcattgtcgggtatgcggctgcggcggtctactatgcgaatctgcgcttcggctttctgccggatctgatgatgctggttttagggcttctgatcgtattgatgttcgtgtatgtgttcacttacccgaagtatcagacggagcagctgctcgccgcatttttcggcgtgttctatgtggcagtgatgttgtcctacgtgtaccagaccagaatgcttagcgccggaacctacattgtgtggcttatttttctgtgttcctggggatgcgacacctgcgcgtactgtgtcggcatgctgatcgggaagcataagatgacgccgaagctgagtccgaaaaagtccgtggagggcgccgtgggtggtgtgatcggagctgcgcttctcaccgtgatttacggcatggtatttcgcggggcgatgggaagtgagatgtcacatgtctggattatggcagccatcagtgcggcgggcgcactggtatccatggtgggagatctgacagcttccgccatcaagcgtaattacggcatcaaggattatggaaaactcattccgggacacggcggtatcctggatcgtttcgacagcgtcatttttacggcgccgctcatctatttccttgccgctaatttgattgtattgtaattttgggagagacctatgatgaagatagctattttgggatcgacaggctccattgggacacagacgttagatattgtgcgggagcagggcgacatacaggtgacggcgattgcggccggaagcaacatcaaaaagctggaagagcagatgagagagtttcatccgctgctggtatgcgtttttcagaaggacgccgccaaagaactgcgcgatcgcacgaaggatctgaatatccgcgtggtgtccggcatggatggacttctggaggtggcggtacagccggagagtgagatccttgtgacggcgattgtcgggatgctcggcataagaccgacgattgcagccattgaagcggggaaaaagattgcacttgcgaacaaggagacgcttgtgacggcaggtcatatcattatgccgctggcaaaaaaatgcggcgtgccgattctgccggtcgacagcgagcacagtgctattttccagtcgctgcagggagaaaacgggaaccgcattgcgaagattcttctcacggcgtccggcggaccgttccgcgggaaaaagccggaagatctggcgcacattcaggtgggggatgcgctgcgtcatccgaactggacaatgggacgcaagatcacgatcgattcgtcaacgcttgtcaataaaggcctggaagtcatggaggcaaagtggctgtttgatgtggagctggagcagattgaggtggttgtccatccgcagagtgtgatccactccgcggtgcagtatgaggacggcgcagtcattgcgcagctcggcacaccggatatgcgtctgccgatccagtatgcgctctattatccgaagcgcagaccgctctcgggcgacagactggatctgtttgcattgggacagctgacgtttgagagaccggacacggagacgttccgcggtcttgcgttagcctatcaggcgatgcgccgcggcggcaatattccgacggcatttaatgcggcgaatgaaaaggcggtagcgcttttcctggatcgaaaaattgcctatcagcagatcccggagatgattgaatcgtgtatggaggcagctgattttattgccaatccgacggttgatgagatcctggagacggaggcagccgcatatgaacacattgcaggcaaatggggaaaggtttttgcatgaagattattatcgcaattctgatattcagtctgattattatttttcatgaactggggcatttccttctggcgaaggcaaacggaatccgggtgaatgaattctgtctcgggctgggaccgaaagtgtttggcatcacaaagggagagacgacatactccctgcatctgttcccgatcggtggagcgtgcatgatggagggagaggatacggagagcgaggacggcagggcgttcgggaaaaaatcagtctgggcgcgcatcagtgtggtgattgctgggccggtattcaatttcctgatggcgtttgtctttgcttttattctgttatgcaatatcggctatgatctgccggtgctcgccggagtgacggagggatatccggccgaggaggcgggaatgcaggcgggagatacaatcttaaagattgatcacacccggatacattttttccgggacatcagcgcctacacacagtttcattccggggacgcggtcacagtgacctatgagcgggacggagaacgctatcagacggtgctcacgcccaaatataacgaagaatacggctattatatgtacggctttcagggaagcgcgcaaaagacgaaaggttctgtgctttccaatttaaaatacagcgtatatgaggtggaatactggatccgggtgacgattgacagcctgaagtctctggtgggcggaaaggtgagcgtcaatgacatgagcggtccggtcgggatcgtcaatatgatcggggacagctatgagcagagcgtgacgtacggctattatatggtatttttgcagatgctttatattgcgatcttcttatcggcgaacctcggtgtgatgaatctgctgccgcttccggcgctggacggaggcagactattgtttctgattgtcgaggtgatccgcggaaagcgcgtcgatcccgacaaggaaggcatggtgcattttattggcatgatgctgttgtttgcactcatgttctttacattttttaacgatatccgcaagctgttcggatagaaaggcaaaaagatgacaaaagtagtgaaaattggcgaccgggtgatcggcggaggcaatccgatcctgatccagtccatgacaaatacaaagacggaggacgtggctgcaactgtggcgcagattcaggcgcttaccgctgccggatgtgatattatccgctgcgccgtgccgactatggaggcggcggaggcattgaccgagatcaaaaagcaggtgagcattcccgttgtggcagatattcattttgattaccgcctggcgcttgccgcgatcgagcacggtgcggataagatccgcatcaatccgggaaatatcggaagtacagagcgtgtgcgcgcagtggtggatgccgcaaaagagcgcggtattccaatccgtgtcggcgtcaacagtggatctctgggaaaagatcttgtggaaaaatatcacggtgtgacggcggaggggattgtcgagagcgccctcgataaagtacatctgatcgaggatatggggtatgacaatctggtcatcagcatcaaatcctccgatgtgatgatgtgcgtgaaggcgcacgagctgattgcgacacagacggatcatccgctgcatgtcggtatcacggagtccggcaccatcatcagcggcaatatcaaatcttcgatcggactgggactcattctgcatcagggaatcggtgatacaatccgcgtatcgctcacgggagacccgttggaggagatcaagtccgcgaagctgattctgcgtaccttagggctgcgcaaaggcggtgtggaggtcgtgtcctgtccgacctgcggcagaaccagaatcgatctgatcgggcttgccaaccaggtggaaaatatggtggcagacatcccgttagacatcaaggtggcggttatgggctgcgttgtcaacggaccgggtgaggcaaaggaagcggatatcggtattgccggaggaatcggagagggactcttgatcaagaacggggaagtgtataaaaaggtgccggagggcgaactgcttgaggcattgcgctatgagctgctgcactggaatgagcagcagaagtagaacagactgaggaagaagtgagaaaaaggcatggcaaaacggttttttgatgtatttccatcactgcaggtagaaggcgacatgaaaaatctgctgacggagacggaagtaacgaaggtgggcatgaatcatgagcgcgatcatctgcgcgtctatttaagcagcacgcgtctgattcacaaaaaagatatccgccagttggaatctgccattgcacaacagatttttaagggcaggatgatgcaggtcaaggtcattgaaaagtatcatctctcggaacagtatacgccggaaaagctgcttgatctgtaccgcgacagcattttagaagaactgaaagattacagcctgatggaatacaatcttcttcggacggcgaagatggagtttacgagcgaaagccacatgctgctcacgctggagaacacgattatcgcacagatgcgttcccatgagatcgtggagtttttagagaaggtgatctgcgagcgctgcggactcgatctggcggtggagcttgcctatgaggagccgaaggagagcaaatataagaaaaacagtgatctgcagattcagtttgagattaaaaacatcatgaaaaaggtgcatatccgcaatgacgacggggagagtgtgccggcggtcacagaaggcggtgccgaggcggtttccgatggcacaacaacatctggtggtacaggcggcaatgccaccacaaacaccgtttcttctgcaaaaaatgctgcaaaacctgcggaacatgcaggaaaaactgcaggaaatggcgaaaaagggaagaaggaattcaagcgcagattcgagggcggcggctttaaaaagtcggacaatccggatgtgatctacgggcgtgattttgaggatgaaccgatcgcgatcgagaagattgtgggagagatgggagaggtgacgatccgctgccaggtcatgacgttagagaccagggagatccggaatgagaagacgatcgtgattatgtccgtgacggattttaccgattcgattgtgttaaaaatctttaccagaaacgatcagctgcaggaactgcttgacgggggactcgccaagggagcgtttttaaagatcaagggtgtgacgacgatcgacaagttcgacagtgagcttacgatcggttctgtggtcggcatcaaaaagattgcggattttacgtccacgcgtgcagacaccagcccggagaagcgcgtggagctgcactgccatacgaagatgagcgatatggatggcgtctcggatgtcaaggatattgtaaaacgcgccatgaagtggggacacaaggcgatcgccatcacggaccacggcgatgtacaggctttccctgacgcgaaccatgcggttccgtcggattcggattttaagatcatctacggcgtggaggcgtatctggtggatgacctgaaggatattatcgttgactcaaaaggacagagcttaaatgacagctatgtcgtatttgatctggagacaaccggactttcgccggataagaataagatcattgagatcggtgccgtcaaggtggtggacggagctatcacggagcgtttttcgaccttcgtcaatccggaggtgccgatcccgtataatattgagcagctgacgtccatcaaggatgacatggtgctcgatgcgcccaggattgaggagatcctgcccgaattcatgaagttctgcgagggaaccgtcatggtggcacacaatgcagagttcgataccggattcatccgcaagaactgcgagcgcatgggactgccgtttgattttaccatcgcagataccgtggcgctggcgagaatcctgctgccgcagttaaaccgtttcaagctggataccgtggcaaaggcggtcggtgtatcgctggatcaccatcaccgggcggtcgatgacgcggcatgtacggcggagatttttgtcaagtttatcgagatgcttcatgaacgcggcatggagacgttagacgatgtgaaccagatgggcgcgacgtcgccggaacttgtgaaaaagttaaagagccatcacgcgatcatactggcgacaaacgatatcggacgcatcaatctctaccgtctggtctccatgtcacacctgacttattttcacaagacaccgcgtgtgccaaagagcgaatttgtaaagtacagagagggactgctgctcggatctgcctgtgaggcaggcgaactctaccgtgcgattttagacggcagaccggaggaggagatcatccgtctcgtgaagttttacgactatctggagattcagccgatcggcaacaacagtttcatgctgcgggatgagaagagcgccatcaactctgtcgaggagctgcaggatatcaaccggcggattgtaaagctgggagagacattcaacaagctggtggtcgccacctgtgacgtgcatttccttgatccggaggatgaggtataccgccgtatcatcatggcgggcaagggatttaaggatgccgatgaccaggcaccgctgtttcttcggacaacggaggagatgttaaaggagttcgagtatctcggaagcaccaaggcggaggaggttgtcatcacgaatcccggcaagatcgccgatatgtgtgagaagatcgcaccggtgcgcccggacaagtgtccgccggtcattgagaattccgatcagatgctgcgtgacatctgctacaccaaggcgcacagcatgtacggcgaggagcttccgtccatcgtgaaggagcgattggaccgtgagcttaattccatcatttccaacggctatgccgtaatgtatatcattgcacagaaactggtgtggaagtccaacgaggacggttatctggtaggctccagaggttcggtcggatcttcgttcgcggcgaccatgtccggtatcacggaggtcaatccgctgcaggcacattaccgctgtgcctactgcaagtacagcgactttgattcgccggaggtcaaggcgttctccgggcgaagcggatgtgatatgccggataagatctgtccggtctgtggcaagaagctggtaaaagacgggtttgacattccgtttgagacgttcctgggattcaagggaaacaaggagccggatatcgacctgaacttttccggtgaatatcagagtaaggcgcatgcctactgtgaggttattttcggatacggtcagacattccgtgcaggaacgatcggtacgctggcggacaagacggcgttcggatacatcaagaattactacgaggagcgcggtgtccacaagcggaactgtgagattgaccgtattgtgcagggatgcgtcggcgtccgcaggacgacgggacagcacccgggcggaatcgtcgtgcttccggtgggagaggagatcaacacgtttacgccggtacagcatccggcgaacgatatgacgacagcgacggtaacgacacattttgattatcactcgatcgaccacaacctgttaaaactcgatattctcggacacgatgatccgacgatgattcgtatgctgcaggatctgacgggaattgacccgacaacgatcccgcttgacgatgagtcggtcatgtccttatttaagaatacatcggcactcggtgtgacgccggatgacattcatggaattccgctcggatgtctcggtattccggagtttggaaccgatttcgccatgcagatggttattgatgccaagccgcaggagttctcggatctgatccgtatctccggtctgtcccacggtacggatgtatggctcggcaatgcgcagacactcatcgagcagggactggcaacgatttccaccgcgatctgtacccgtgacgatatcatgatctacctgatccagaggggacttgacagtgagcagtccttcacgatcatggagtcggtgcgtaagggaaaaggcttaaaggaagagtggaagacggagatgcgtgcgcatgatgtgccggagtggtacatagattcgtgtctgaaaatcaagtacatgttcccgaaggcacatgcggcggcatatgttatgatggcatggcgtatcgcctactgtaaggtatattatcctcttgcctactatgcggcatatttctcgatccgcgcgacgggatttaactatgagatcatgtgccagggcaaggagcgtcttgaatatttttacaaggattacacgcggagaaaagattcgctctccaaaaaggagcaggatacctaccgcgatatgaagatcgtgcaggagatgtatgccagaggatttgattttacaccgatcgacgtgtaccgtgcaaagccggaccgttttcaggtgattgacggcaaactcatgccggcgttaaacacgatcgacggtatgggcgacaatgctgcgattgcggttgccgaggcggcaaaggacggcaagtttttgtccaaggacgacttcaggcagcgtaccaaggcgaccaagacagtcattgatcttatggcagaccttggactgctcggcgaactgccggagtcaaatcagctgtcgctgtttgattttgcataaattgatattaaaaattcaatcttccgaaattccttgatttttcaaggcttaccgcctatcaaatatcaaaaccttatgtattttcccttgtttttgcccttatgagctgaaacaagggaaattttttatgcttcgcccacaaccttatccaagagccttgcggaagtccgctttgcttctctggtagagtgggcataaatgttcattgtggtactgactcagcgtgtccgagaagttcctgcacatctttgggttttgcaccgcctgaaagcagattgcttgtgtaggtacggcggagtgtgtggaaatgaaagtcctccaatccctcgacctctgcctttgccttgcggcaaatctgaccgactgcacttgcagaaacaaaagcaccgtcctcctttaagcagacaaaggataattccctgtcatcttcgggcgttccctgcgtcctttgcagactgtaaacctcgtaataggtgcgccccttttctttgactgtcttacagtagttcagatgatacagttcgccatagcggaaacggtttttatgttgttccgtctttgctttccgtaagatgtctgccaatgtgtcgcagaaatcaacggtacggactttactgcgttttgtcgtgccgacttcgtgcttatgccttgtgccattgtaccgcatactgcgtcttacagttagatattgctcgtcaaggttgatgtcctgccaagtcagaccgcagacttctccgatacgcaagcctgcataataggctatctgcaccgcaagcaacgctgggtgtttcttcccagttaagaagtccgccagcttttggtattccccctgtgtaatcgtaggaataacagtttcttcctcgctgtccgagaaaatatctgtttcctcttttttgccacgcagttttacatactgcatcgggttaaaggttatcagctttttgggaaataccgcaaaacggaatgagtcttgcagcatcgccgagaattgcagcatatagcctttgctcataggctttgaagttgtaccgtctgggtttatcccgccgtagctcataaggtcgataaacgcctgtaaatggtcggcggtcacggttttcagttttcggctttcccgacaaacttcttttcctcatagtcagcgattgcctttctgagcagggcttcggtttccgacttgctttctgttcctacaaactctttctgtacttttctgccgctttcatcttcgatgtaaaagcgagcgtaccactttttacctttttttcttacagaaccttttgccatagataaaattcccctttctatccgtggcaatcgggactgtgacatatggtgtgcgtaaaataatagtgtcacttatgccggtgaatgtcaatcggcattttcacttgtcaaagtgccacggaatttttctttttcagcaatccgttcttcggctgctgtcactacggaaaggctgtaccgtcattaaaaagagcgaggtttacgaaagtcacctctttaccgtgaaagacgataaattcaagagcgagccttttcttcgggaggtaaaagcgatttataccgaccttatcaatcggcatatctctgatctcgaacaacagttaaaggtatttgataagaacagcgtttatcttcctaccaagaaaatcggcatgaataaccccaaagccgccgagattaaagcggacaataccgcaagacaggaatggaacaggacagcggatatggcgcaaagattttagaggtcaagcagaccgagatacacgaaaaagcaagccaatctatcaagagcaaaggctggctgcctaatctgttccgagggattgtggcaaaggcaaaagactttctgcaaaaccttatccgtgaaaaggatatgctgcccaagcctacgcttgatattgatatggcagagtttcgccatatgcggaatctgatgataaaggcgcaggacaaagcggcggaaatcaaacacttgcaggacgaggtactgccaaagttaaaatcacagcttgccgaagtaaaaggaatattcaaaggcaaagagcgtaaaagtcttaccgagcagatagagcagaccgaaaagaaaatatctgagaagctggaaaaactgccctatgttctgaagaaagacggttatcccgatgtacaggcgtttatgcgtattttccgagaaatggaaagtgttgtagagcaatacaaccgtgatcttgtcgagtgggaataccaaagcagaagaaaatccgcagccgccaacaaagaacagcgcagaccgcccgaaaagcagagtgtactcaaacatctgcacgagatacaatacaggagcgaaacagacaaaagccaccgcaaaaaatcctttgacagagatagccaataggcattgaaaaaacgccgttatggtgttacccatagcggcggcatacatagcaatctcatttcttctcacaattttgttttattgggttgactaaaattgtatagatgatataatgtacttgcacattaagtacactcgtgaaataaaaggcggtgaggtatggaaatcattatcagtaataatgccaacaagcccatatatgagcaaatcacatcacagattaaagccatgataatgagtggcgaattgaaagctggtgacgcaatcccctcaatgcgagcattggcaaagtcaattcaggtaagcgtcattactgttcagaaagcctatgaagatttgcaaagggacggtttcatagaaaccacggttggtagaggaagttttgtatctgcacaaaacaaagaattttatcaagaagaacagcagcgtatagcagaagaacatttacaaatagctgccgaaatcgggagaacaagcaatatttctcttgagaaattgacagaattattaactttattttataaaacggaggaatagcatggaaaatattttagaattacagcaggtttccaagacattttcaaaatcaaaattttcattggaaaatgtgtccttcaacttgccgtatggggcaattatggggtttgttggagaaaatggagcaggaaaaacaacgacgattggttgcatattaaatacaataaaaaaggacagcggaaagataaaactgtttggacaggaaatgtcagacgcagacacagatatgcgtgaaaaaataggcgttgtttatgacggagataatttcccgacttattggacggctacacaattagcaaaagttatggcaggcttttataaacaatgggataatatcttgtttctgaagtatttagaagaatataaactacctgcaaatcaaaaaatcaaacaatattccagaggaatgacaatgaaattagcgattgcggttgctttatcacaccatccacaactgcttattttggacgaagctactggcggacttgaccctattgttcgtgatgagatgttagatacgtttcttgattttgtacaggaagaaaaccattctattttactttcttctcatattacaagtgatttagaaaaagttgcagattatattacatttattcataacgggaaaatgattatgaccgtatcgaaaaatgatttggtttacaattatgcggttatgcgttgtaaggaaaatcaattccttgcattagatccaacagatattattgcctatcgaaagcgtgattttcaaattgatgtcctagtttctgattgtaaagcaatgcagagaaaatacaaagatacggtgatagaccacatttcagttgatgatatctttttactattggtacgaggggggaacgtatatgaaagggcttttcaaaaataattttcttgccgtatggacaaatgcaaaaatatttttattttttatgcttgtaatgggtattgtcgttatcattatcccagaccagacatggcaaatgtatttcataattattggaattgttggattgtcagtaaatgcagctactgctatcggaaatgaattttcctcaaaatgggggaaatataagctcactttgccagtaaaaaggattgatattgtaaaaggcttatacatcaatcagttattgtggattgtgatagggacacttttcgttggtagtataacagccttatcctatctgttacatggagttccttttaaccagtttgaaggtatagcaggtgtacttatattaggactcagcataagcctttcaatgggggcaatatttattcctagcatttatttagcaggggaagataaactgatagtgtttcttatcatatctttgctttccgcagttggtattgctgcaatgctttttaatataccgtcatttggacagtttattttaataagtggttctatattgctatttatcctatcttttcctttgactgtccgtattttcaagaaaaaggaatactaaacgagatagcaaagtcagccgagccagtcaacggcaagtaaatgggctgccctcaaccgttgacagccccgactgtccttacaatatggtaattaagagagcgacagcaaaaatgctgtcgccctctttttaggtataaatcagttcttgatatacaatttctctcgcccttgcttgtatctcattcattcttccaacccataacatcgggctttctacttttagttgttcggtcacgccctctttgtcagccatttgctcgaccaagcgaaacatcatatccgttgcctgttcgtcagaggtttgcaggatcagtttaataacagtgatgcttttaacgggtatttgcgatcagcaggaacgaatacaggtcacggggtcaacaaggcatatatatttacatcaagtcgagaaagagaagtattcaaaggagaaaatcattaaaacttataaagagtttatggaagagatgtacattgtcaataagagagtgtaaatatgaatacagaaacaagaccgttatttttaactctggtcttgtttagaaagtcggtggtgtaggtcttttggagcagagcatcaccgatgtatttttcgttacggagaattttgttgatggtgcttgttcataaatattcctttcttctgcaaagggcgtataaaattcaaagtttcatcataaaataatctatgtaaatgcttgcaattgcaagcaaatgcgaatatagtaaagaaaaaggaggcgatactatggcaaatacatccgctgtttatgcaagaatagataccaatctcaaggataatgctgagagcattctttctcagcttggcatttctccatccagtgcaattcagatgctttatagccagattgtactgaagaagggtatgccatttgaactgaaacttccttcttctaagccattagctgttggtgcaatgaccggaaaacagcttgatgcagaactccagaagggtgttgattccatcaaagcaggaaaggtatattctgcagatgaagtcgatgcggcacttgcaaaggagtttggcatatgacagatagctataaggtcggctattctgtagatgcacttgacgacttacgcgagatctattcatacattgcgaatgaactccttgttccagagactgcttctgctcagcttggctgcatccgaaaagaggtgcgctcattggatttcatgccagctcgctatgcgttagctcattgggaaccttggcattcgatgaaaatgcatcagcttccggtagacaattttattgtgtattatctggttgatgacgaaaaaagggcagttacagtagctcgaatattctacggtggtcgtgatattgaagaaatcataaattcaaataaataaacagtaatggagcttttgagtaaaaaacaagagctccatttttatatgaataaaattcctcgggagcatcccaaagtttgtgtaaacctccaaactgatgtaagataaaattactcagtttacacgccagaaaatgagagaatttattaatgaagataaagataagttttttcaattgaaggcggaagtgaaagatcaagatggttatacagtttctagtagtcatgctttttcgattatggaaagggaagagtgcaaaaaaataacatctgaatcagcaggactgaaacagatgttattacttttcctaagctctttctactttgccggactttaaacaggaagcacatacatataacttcttcggtgttccgttcactttacagctgacacgcttgatgttcgacttccacattctatttgatcttctatgagaatggctcacgttgttaccgaaatgagcgccctttccacaaactgcacattttgccatgattttgcacctccttgcatattttatcctggtgatgcaggacttgcccgcacattctacaggtaaaacctgtatagcatacaggctcacaacatgattattctatcagaagaaagtacatattgcaagcaaaatttaaaaaaaatataaaattcaaaaaacagggctatgaatttgtgcaaaaagcggttataatagcaataaactagcgttaatatggctttgaaaggagcatcgtattatatgaatggacatatggagacccagttgggcaaggttacaatagatccggaagtgatcgcaacgtatgcaggatcggttgcagtggaatgttttggaattgtcggtatggctgcagtcaacatgaaggacggtctggtgaagcttttaaagaaggattatctcacgcacggcatcaatgtcgtcattgatgaggagaacaagatcacgatcgattttcatgtgatcgtatcttacggcgtcagcatcatcacggtatccgataatctgatcgagacggtaaaatataaggtcgaggcgtttaccggaatggaaattaagaaaatgaacatctacgtcgaaggcgtacgagtgattgattaaggaggatttttgaggtggagatcactacgataaatgccgaggctctcgcaaaagcgtttctggccggagcgaaaaacttggaagcaaagaaagagtggatcaacgaactgaatgtattcccggttccagatggagataccggtaccaacatgtcgatgacgatcatgtctgccgcgaaggaagtggcggcgatggcagagccggacatgaagtcacttgcaaaggcaatttcctccggttccctccgcggggcgagaggtaattccggcgtcattctttcccagctgtttcgcggatttaccaaggttattgcagagtatgatgagattgatgtgcaggtattgtccgatgcgtttgagaaggcagtggagaccgcatacaaggcggttatgaagccgaaggaaggtacgattcttacggttgccaaaggaatggcggtacgtgcggtagagctgagtgaggaggagacgaccgatctgcttgcgttctgcgaggaagtcatcaaagagggggatcatgtccttagcatgacgccggatatgcttccggtattaaagcaggcaggagttgtggattccggcggacagggtctgatgcaggtgatgaaaggtgcgcttgattccctgcagggcaaggagatcgattactcgattgaggcaccggagaagcagccggcggccgagacgggaagcacctcctacaatatcgaggcacaggcggctcaggagatcaagtttgcgtactgtacacagtttttgattatgttggagaagccgatttccacaagacaggagacggagttcaaagagtacttagagggcatcggtgattcgatcgttgttgtcgctgatgacgagattgtaaaggtgcatgtgcacacgaatgatccgggacttgcaatgcagcgcggtctgacttacggaagccttacgacgatcatcattgagaatatgaagttagagcgtgacgagaagatctccgcactcaaggaaaaggagatgcagtccgagaccatcgaggatgtggagaagcagttaaaaggcgaggaagtaccaaaggagcaggagcctccgaaggagatgggctttatctctgtcagcattggcgacggcatcaatgagatctttcagggactcggcgtggactacattatcgagggcggtcagacgatgaacccgagcaccgaggatatgttgaacgccatcgagaaagtgaacgcgaagaatatctttattcttccgaataacaagaatattattcttgcagccaatcaggcagcctctcttgtggaggacaaaaagatcatcgtgatcccgaccaagacgatcccacagggaatcacggcacttatcaactatatcccggacagcacgccggaggagaatgcggagcgcatgagcgaggagcttggaacggtaaagaccggtcaggtgacttacgcggtgcgtgataccgtgatcgatgacaaggagatcaagcaggatgattttatgggcatcggagatcagggaatcctttccgtcgggaaggaacttgaggctacggtactggatatgatcgaacagctcatcgatgaggactcggcgattgtcagcatctactacggggaggacgccaaggaagacgcagcgaatgcgatcggtgaaaagatcacagaggcacatccggatgttgaggtggaggtccactacggcggacagccgatctattattacgtaatctccgtcgagtaagacaaaagtgtaaatagcataagcacaggcagggctgctgcacggacatcgcttgaggcggttgacggtgcggcagcctttttctaaaggaaacagagtatgaatcagagtacatccataatggagatcaaagggatcggggaaaagacagccgccctgttccagaaattgaatattgaaacggtgggagatctgctgcttcattatccgaggacgtatgtgcagttcccggtggcaaaagaagtggcggaggtcacggatggcgagacggcggcggtactcggcagagtgagaaagacgcccgttgtgagacgcacgagaagcatgccggtcacagtgacgaccatcggtacggacgaggcggaacttgaactggtgtggtttcggatgccctacatcaaaagccagctcgcgccgggcaatacttatgtattctatgggaaggtggcgcgcaaaggcagccgtctcgtgatggagcaggcagccatctattccggggaagcgtacgccgccatggagcaggtatttttgccggtgtacggtctgacaggaggaatctcgaacaatctggtcacgaagaccgtgcgttcggtgctcggcagagaagaactttttaaggaatatctgccccgggagatccgcagccgctacaaactctgcgagtacaattatgcgatcaaagagattcattttccggaaaatatggacacgctgattgcggcgcgcaaccgtctcgtgtttgatgaatttttcctgtttattttaaatatgcagtaccacaaggagaagcggatcaaggaagccaacgaatttgaattccgggaggattcctttaccgatgagttgattgccaggctgccgtatgagctgaccggcgcgcagaagcgggcgctctcggaagtgaagcgcgatatgcgaagcccttatgtcatgcagcggctgattcagggagatgtcggttccggaaagacgatcatagcgttcttagcgatggcggatgccgcgcacaatgattaccagtcggcgatcatggcaccgacggaagtgcttgccagacagcactatgagacgtttcagaagctgtgcgaagagtttggattaaagattccggtggtacttctcaccggttccatgacggcgcggcagaagcgcatggcatacgaggcgctgcagctttatccaaatgcgatggtggtcggaacgcacgcactgatccaggagcgcgccatctacgataacctggcgctcgtcatcacagacgagcagcaccgcttcggcgtccgccagcgggaaatatttgcggaaaagggcagacatccacacattctggtgatgagtgccacgccgatccccagaacactcgccataatcctgtacggggatctggacatctcggtggtggatgaggtgccggcaaagcgtcttccggtcaaaaactgtgtggtgaacaccggctatcggaacaaggcgtatgcatttatcgaaaacgagatcaaaaatggacatcaggcgtatgtgatctgtcctctggtggaggaagtcgaggggatggagacggagaatgccacggactatgtcaaaaaactccggcagattttcccggaggagatccagctcggactgctgcacggtcagatgaagccggcgcagaagaacaaagtcatggaggcatttatgaaaaatgaggtgcaggtgctggtggcgaccacggtcgtggaagtcggcgtcaatgtgccgaatgccacggtcatgatgatcgagaacgcggagcggttcggactggcgcagcttcatcagctgcgcggccgtgtgggaagaggcgatgcacagtcctactgtattatggtgaactgctcgagcgcaaagacggcggagcgtaggcttaagatcttaaatgattccaatgacggatttcggattgcaagcgaggacttaaaactgcgggggccgggggatttcttcgggatccgtcagtccggcgaactgcagtttgcacttggcgacatctatcaggatgctgccgtgctgcgggatgcatcggaggcggtcggcgaactgcttgcagaagatccggatcttatgtccggtgagcatgagaacctgcggcattatctcgaagctttccttatgcgggaacagaatcagatgagcttataatttcacacataaaacgggaccggtgcaagcgccggtcccgtctttttctttggtatttttttctctttctcggaatgtctgcgacgggcgggttacttgcctgccatctgcttttcctgtgcctcaatcattttcttgaccatataaccgccgacagaaccattctgtctggaggtaagatctccgttgtagccgtcctttaacggcacgccgatctcgctcgccacttcgtacttgaagcggtccagtgcactttttgcctcagggattgctgctctgttagatgaacgatttgccatgattgtttcctcctttggtgtgttaatgatcctttgttatcattgttatgatcactttgtctgtcttagactttttggtcacagacttcgtctgaacttgcgccatctgcgtttgttcaggaatagtatgtgagaatttaagagagataaacatgcagtttttgtcaaaaaaacaggaaaaagcttccattttttgtacaggcttccctgcggtttggttcttgcaatcttgcgggactatgatataatgtgaaaaagttagttaaagctaacggctgtctgcaaaaaggaaacaggaatattcctgcatggggatgttccggaaagaggagattatgtcggaggaagaaaagaaatttctggaaattgttgatctgaaaaagggatttggaagcggcgagacacggcaggaggtactgcgcgggatgaacttttccgtggcgaagggagagttctgcgtgctgctcggaccgtccggctccggaaaatcgacgctgctcaatattatcggaggcattgacagcgcggattccggttatatctcgatcggcggtgataagctggaggagatgagtgagaagaaactaacgcaataccggcgcaagcatcttggttatgtctttcagatgtataacctgatcgggaatctgaacgtaaaggaaaatatcgaggtcggcgcgtatctgtccgatcatgcgctggatattgatgaactgttacatacgctgggactttatgagcacagatacaagctcccgaatcagctctccggcggtcagcagcagagagtatccatcggaagggcgatcgtcaagaacccggatattctgctctgtgatgagccgacgggcgcactcgattatcatacgtccaaagagatcttaaagctgatcgaggatgtgaatataaaatacggcaatacggttattatggttacgcacaatgaggcgatccggcatatggcagatcatgtgatcaagctgcgcgacggggaagtacgtcacaatgagatcaacacggataaagtttcagcggcagatctggaatggtaaggagtgtgaccggcatgaagaagaaaaagacaagaaatccgctgatcagacgcataccgagggaactggcgggagactggagaaaatatctgctcgtgagcctgttcctcattttgacaatcggctttgtatcgggaatgtacgttgccaacgagagcatgatgaaggctgcagatgagggagtcacgaaatataagctggaggacggacattttgaactgaatgaggaggcggatcagacactgctcgctgcgattgccacgggagagaaagcggatgtaaagcagtattacacggacaaggcaaagcgtgagctggatgagaagtttgacggtgaatttgaggacaagttcaaggacgaattcgacagccagttcaaggaggaatttgaccgcaaattcaatgcggaatttcagacacagttcgaccagacatttgcgacgcaggtaaaacagacactgctggcacaggggatggatgagaccatggctgcagcgatgctagatacggcggtggcgcaggcaaagcaggcgggaagttatcagcaggtctacgatgccgcttacgagagcgcgtatcagaaagcctacgataccgcctatgacgaggcgtatgggaaggcacatgacgaggcgtacgagaaggcttacgacgaagcctgggacaagattctggatgaaattgacgaaaaatatcaaaaggcggaagacaaatatgaattgaacgatcctgattttgcggcggtaccggtaaatatatccgagaatttctatcgcaatgaggaggaggatcacgacggcgacggcacctcggacggaaccgtccgcgtctatcagaagacagatgacatcaatctggcatgtctgatggaaggaagcttcccggcatcttccgatgagattgtggtggaccgcatgcatgcggacaatgtcggcattgcggtgggagataccataacggtccaaggagaggcgtatcgtgtcgtgggactgatcgcctatgtcaactatgccacactgcatgaaaaaagtacggatctgatgtttgacgcgctaaaattcaatgtggcgatggtgacggaagacggatttgcgcgcctgcacgagaaggtgcactatgattatgcatggaactatgtgacagaaccggcggatgaggcggcagaaaaaaatctgtcggatgattttatgaaagccctgctgacgcaggtggttgtcgcggatgcggagcttgaggattatgtaccggaatatgcgaaccctgccattcattttgcgacggatgacatgggatctgacgaggcgatgggcggtgtgctgctcgatattctgattgtgattatcgcttttatttttgccattacaatcagcaacacgattgccagggagtcgtccacgatcggaacactccgcgcttcgggttacacgcgcggggaactggtggcgcattatctgtcgatgccggtcattgtgacgctcgtcgcggcgctgatcggaaacattctcggatatacggtgttcaaaaatgttgtggtttcgatgtactataacagctacagtcttccgacctacgagacgatatggaatccggatgcgtttataaagacgacgctgattccgctgattctgatgtttgttgtgaaccttgtggtgattgcgcggatgatgcgccatacgccgttacagtttttgcggcatgatttaaagaagacaaagcgtaaaaaggcgatgcgcctgccaagatttaagtttttgagccgtttccgcctgcgcgttatgcttcagaatatggcgaattatgcgatcctttttgtcggaatattcttctgtatggtcatgctggcgatggcggtcggcatgccggatacgctcggctattacaaggagaatgccaaggatctgatgttcgcgaagtatcagtatgtgcttgcgtcctgggaggatgaggacggcgatgtcatcacaacaaaggagccgggtgcggaaaaattcagcatgacatctcttttacggaagagtgatacactcgatgaggaagtatctgtctacggcatctccgatgacagccggtatgtaaaaatcgatgatcttactcatttaaaagagaacgaggcatatatttccgcctcctatgcggacaaatacgatgtctctgtgggcgacgatgtcacactggatgaaaagtacgagaatcagcagtataccttccgggtggcgggcatttttgacaagtcccagagcattgccgtatttctgccgattgaaaattaccgggaggtatttgagcaggatgcggatgcgtttggcggctatttctcagacacggagattacggacattgcggaggaaaatatcgcgacggtaattacggagcaggacatcacgaaaatgtgcgatcagctggatcactcgatgggatcgtatatgagctatttccagatcttatgcatcctgctgtctgcggtgttaatttatcttctcacaaagatcatcattgagaagaatgagacggcaatttccatgacaaagatcctgggctatgagaaccgggagattgctagcatttatctgctgtcgaccacgattgttgtgatcgtagcggatgcaatctgcgtggtgcttggcgcgctcgtgatgaatgccgcatggaaagtgatcatgtacagttacagcggatggttttcctttgtcattcttccggcgggctatgtgaaaatgttcgcgtttgttctgatcggttatctgatcgtgatgatgtttgactttatgcggatcagaaaaattccgatggatcaggcattaaaaaatgccgagtgagatgcaccactggaaaagagagggatatctattgcatagtttccgaaattcttctataatcaaggggatgttttttgaaaaatccccgagataaaggagcagaacatggacaaaatagaaatctatattgacgaattgctggagaagagtactccggaccgcccgatctggaatattgagaagattctgcagggcttaaagtccacctggaattacatagacggatgcatgatcaaggcgattcttgagatgtatgcgatcacaaaagacgagaaatattttcgctttgccgacaactttatcgactgcaaggtcagagaggacggatcgattgagggctattcggtagaagaattaaatattgacaatgtcaatgcgggaaaaaccctgtttgagctctacgatctgaccggaaaagaaaaataccggaaggcgatcgatcttgtatacagccagatcgagcagatgccgcgcacggcagagggaaatttctggcacaagaatatttacccgaatcaggtctggctggacggactgtatatgtgtcagccgttttatatggagtatgagacgagatttcatgagaagaagaattatgacgatattttccgccagtttttcaatgtggtggagcatatgcgcgatccgaagaccggactgtactatcatgcttatgattcttccagagagatgttctggtgcgacaaggtgacagggttaagccagaatttctggctgagagcgcttggctggtattccatggcgcttcttgacacgttggacaaggcggatgcgtcggtgggagagccgtatgagcgcctgaagaaggtgtttgtggatctgatggacgccatgttaaagtatcaggacgccagcggcatgtggtatcaggttgtgaattttggaggcatggagaagaattatctggagaccagcggaagctcgatcatggcatacgcgctgcttaagggtgtgcgcctgggctttctgccggagaactatcagacatacggtgcaaaggcattccacggcatctgtgagaaatatctctccgaggatgcggacggaagcctgcacttggacggcatctgcttagttgccggacttggcggaaaacagatgcgctccggcacctacgattattatatgtcggagccggtggtaaaagatgatgcaaagggcgtcggcccgttcctgctcgcttatactgagatgcgcagagcaggactgatcgaagcctagggcgcttttactcgatcagggtcagaccggagatgtccggatgaatggtcagagaataattggtatagtatacaacaaagccgggcgcgctgccgttcggcttttttacgttctttttctggagatagtcaatctcaatcttgtcgttgtccctgcctttggaataatagccggcgagtcttcctgcctcctcaaagacacggtccggcagttcgtcgctgccggattttacgataacgtgggagccgggcattcccttggcgtgaaaccaccagtcgttgccggtggcgaatttaaacgtcagttcctcgttctggtaattgttcttcccgacatagatgtcatatccgtcggaggaacggtagtggaacggtttgctcttaatcttggccttcttgtcggtgcgcttcctgcggatatagccgtattcgatcagttcttccttgatctgcacgagatcgtcttccgtgagtgcaatatcgagtgaggttgcgatgctctctaggtgctcgatctcggcgcgtgtctccgcggtcagatccgtgagggcttcatacgtgcgctttaacttattgtatttgtcgaaatatttctgggcattcgccttggcgtcaagcatcgggtcgagcggaattttgatcatctcgttggtgtagtaattgagcgcctccagttcctttgcgccctccgcaagtccatagccgtaagtgtggatcagttcgccgtagactttgtacctgtcgcgcttttcggtgtcctttaactgcttttcctgcagctggtatttcttgcggctgcggtctaaggcggtggcgacaatccggcgcaggtcgacggacttctgccggatgcgcgtgtagacgttgcgtgaagcgtaatactgttccaggaccgctgagatcgaagaaaagtgctgcatcgtgtattcgcttccgtttgcagcggcaccggtggaatttgtggcttccgcggcatcgtcgctgccgacatattcggtcagacggaagcaggaaaattcgaccggctccctgccgcgggtaatgatgttcggctcgtagcggtgctcttttacgtcctccatcagccaggcaaagttgtgatagagatgcttttgggcatccggggtaagcgaatccacggacatgtcgccgtcgatggaggcgcggtggcagatttcgttagcgacgagggggctgacaccggtaaaggaggtgtagagcgcctttgcgatcggaagcggctttttcatggcgctgcccaaaaaagtctcctccgtgacctccaacggattcagacggtcatcctgcgttgcgggaatgcagtaggtgcgtcccggcagaacttcacgcagagaactcatcgcagccgatacgtgtttgatgctgtcgatgattctgccgttcgcatcgcagaaaatgatattgctccgcttgcccatcagctccacgatcagggttttctgacacaggtcgcccatctcgtccaagtgctcgatcttgaagttgatgatgcgctccatgtgcggctggctgatctccacgatccgtccgtttgcgatatgcttgcgcagaagcatgcagaaattcggcgcggtgagcggactcggtttgttggtgccggtcagatataaaaacggcagggaagcgctcgccgacatggcaaggcggtactgaccgttagatccttttaaggtgaagagcagctcgtcggtttccggctgcgcgattttgctgatttttgcattcagaatcgtgttgtttaattcgtatactaaattggatatgacaaatccgtcaaaagccatgatgtttgtactccttcataaataatgtgaatccattatagtagaaaacgctgcaaaatacaaatggaaagaggagtcggggagttagaaaaaacaaactgggtctttacaattcggctttgggaaggtaaattaagagagggatttttatatcccttattttatgcggtgcgaccgaaaacggggacaccggacaggaggttatctatggcaagagaattaccaaaaagaagtgaggtaaaagaggaatatacatgggatgtaagtgcaatgtatgcttccaaagcagcatgggaggcagatcttaaggaagtagttacgatcgtttctgatctcgcaaagttagagggcagtgttatggcttccgcagagaagcttcttacggcgctggagcttggcgcgcgcgcagagcagaagatcgatctggcgtttaattatgcggagcgcctgtttgaccaggatcagaagaacaccgagcatcaggcaatgtcgcagaaaatgtacggtgttgtgacggattatcagagccgcacggcatttgttgtgccggagattctggcagccgacaaagcaacgcttgcgcagtatttttctgaaaaaaaggaactggaactctaccgcggactggtagatgagatcctgcgcaccaaagagcatgtcctctcggcggagatggaaaaactggtggcgatgaccggagagatggcacagacgccggagcaggtatactccatcatcaacaatgcggatctgatctacccggagatcgaggatgaaaacggggagaaggtgcgcctgtcccacggcaactttgttccgttcgaggaatcaggcgaccgccgcgtaagaaaggatgcgtttgaggcattttacagcatctacaagcagtttgcaggaacgattgcagggctttataacggacaggtaaagcagcagattttctatgcaaaggcgagaaattatgcgtccacgctggaggcggcagtcgatgcgaacaacgtgccgtcgaaggtttaccgcaatcttgtggagaccgtaaatgccaacatggacaagatgcaccgctatgtaaagctgcgcaagaagtgcctcggggtggacgaacttcacatgtatgacgtctacacgccgatgatcgcggatgcagccaaaaaggtttcctatgatgaggcgaaggagacggtgcttaaggcgctcgcacctcttggtgaggactacgttgcaacggtaaaggaaggctttgagaaccgctggatcgatgtctatgagaacgaggggaagcggagcggtgcatactcggcaggcgcgttcggcacgcacccgtatgtcctgttgaattataacgatacgttagacaacatgtttacgctcgcacacgagatgggacatgccatgcattcctggtactcgaatgcaaatcagccttatatttactcccagtacaagattttcgtggcggaggttgcctctacctgcaacgagatccttctgatggagtatctgctcgcgaacacgacggacaaaaaagagcgtgcctacctgttaaatcattatctcgacagctttaagggaacagtgtaccgccagaccatgttcgcggagttcgagatgaaaagcaaccagatggcggaagcgggcgaaagcttaaatgctgagaatctctgcaaactctattacggactgaaccagaagtatttcggcgaggatatggtctccgatccgcagatcgcttatgagtgggcgagaatcccgcatttttactataatttctatgtataccagtatgcgaccagcttttccgcagcggtggcgatcgcgcacggcattctggaggagggcgcaccggcagtggagcgctacaagaagttcctctccggcggatgctccatgtctccggtagatctgttaaaacaggtcggcatcaatatggaggagccgaagccgattcaggatgcactcgatgtattcggaaaagtgctcgacgagatcgagacactgatctaggaaaaagatgtaaatgattgattacggcagcggaaagtctggaatactataccataaaagaaacaggaggtatggtattcgtgaaacaggtagaagtgctgctgaatgcgccggagcgcgcactaagattctgcaatatcctaagtgcctgcgagggaccgtttgatcttgggcggggcagttacacggtggacggcaagtccattctgggaatctgcacaatggatcttactgtgccgctcacactttccatctatgatgagacggaaaatgtgctggaaaaaatccgggagtttctggtgtaaattccggatgcggcgcagggtttttctgtctataaaaacggtttcagttcgcatgcgagcagttcttccatgcggatgagttcttctgccttgcctctggcctcgcggtcagcggcaaggtactggttgatgtgccgctgcattgtcttggtgcccatgtggcagccgtccgtaatcagatctgcacagacccggtcactgtcgtcaatggcaagttttgcgttcgttttgatccaggacatgcccttggcgatgacgcccgggtcttttgtcgtatcgccgtatttctgcagcagaatatgcagttcgttgccaagctgttcgtgatggtttttggatgagatcagaatctcacgcagcttctgatctttgacattttccagaatctcgccgatggaatagactgccatctgcgttccggcgttgcactcgcgcagcagataaatggtatcttcgttaatcatagttgtctccttttgggaacctggtctgaagcgacggcatcccttttcgataatatgtcttttttattttggaattatacatgacaaattgtcataacaactgtcttgtcatctgtaaagatatgtgctatactcggatgaaatgtgaccggcgtatcagatgccgggatacgaaaagagggaataaataagatgagagatatgtactatgacgtagtgattgcaggctgcggagtggcagggctgtatacggcgctgcgtcttggaagagacaagaagattctgatgctgtccaaagaagatctggagagctgtgattccatgctggcacagggaggcatctgtgtgctgcatgatgagaacgattacgattcttattttgaggataccatgcgggcgggacattatgagaaccggaaggagagcgtggatctcatgatccgcggaagccgggcgatcatcgatgatctgctttccctcggggtccgttttgcgaagaatccggacggcacgcttgcctacacgagagagggagcacattccagaccgagaatctgttttcatgaggatatcaccggcaaggagatcaccacgacgctgctttcgcatgtgaaaaaattgacgaatgtgaccatcatggaatatactgtaatgacagatattctcgtcgtgaatgatcactgctgcggcatgatcgcgaagacaagggacggcgagacgctgcacatccatgcgcaggatacggtcatggcgacaggcggcatcggcggtctgtatgagcactccacgaatttcccgattctgacgggcgatgcctgccggattgcggagcagcacggagtagaattggagcacatggattatgtgcagatccatccgacctgtctctacagcaaaaagccgggcagaagctttctgatctcagagtccgccagaggcgagggcgcgattctcttgaatcacaagggagagcggttcgtcaacgaactgcttccgcgcgatgtcgtgacgaaagcgatccgcgaggagatggaaaaagagggtgtcgaccatgaattcatctcctttgagaacgtaccggaggagatcatcaagggacatttcccacatatttatgagaaatgtctggaagagggctatgacatcttaaaggagccggcaccgatcgttccggcacagcactattttatgggcggcgtccatgtggaccgcgattcggaaacgactatgccgcatctgtatgcggtcggggagacaagctgcaacggggttcacgggaagaaccggcttgccagcaacagtctcctggagagccttgtttttgcaaagcgcgccgcacaaaagatcgaacttacacagaaaggaaaagaagaacatgaatccaattaccatgcagcttgttgctgacaaatatatcaagatggcgttagaggaggacatcaacagtgaggatgtctccaccaacgccgtgatgccggagtacaaaaagggcgacgtacagttgatctgcaaggaggacggaattattgcgggtttacagattttcgagcgtgtgttcacactgctggatgaaaagacgcaggtggagttcttcgtgaaggatggcgagaaagtgaaaaagggacagacccttgcggttgtgaccggcgatatccgggtactgctgtcgggagagcgcacggcactcaactatctgcagcgcttaagcggcattgcaacttacacgcacagcgtggcgaagcttctggagggatctaagacaaagcttctggatacccgcaaaacaacgccgggtatgcgtatttttgaaaaatatgcggtgcgcatcggcggcggatgcaatcacagatataatctgtcggacggcgtgctcttaaaggacaatcacatcgatgcggcaggcggcgtgaaggaagccgtggcggcagcaaaggcatatgcaccgtttgtgcgcaagatcgaggtggagacagagaaccttgatatggtaaaagaagccgtggaagcaggcgcggatattatcatgcttgacaatatgacaccggagcagatggcggaagcaatccgcgtgatcgacggacgtgccgagaccgagtgttccggcaatatcacaaaggaaaatattaagaccattacatctcttggtgtggattacgtgtccagcggcgcgctgacacattctgcgccgatcctggatatcagtctgaaacatttgcgtgtgctggaagggtgagaaaatctatggaaaaagaaatgaccggtgcggacagaagaaaaaaactgatctttctgatgcgggagtcggaacagccgctctccgggacgcagcttggacaggtcacgggggtgagccggcaggtcgtggtgcaggacattgcgctgcttagaacagaagggtatccgattgtgtcgaccgcgaagggctatctgctcaacgaaccgaaatgtgcgacccgcgtgcttaaggtctgccataccaatgaacaggttgaggaggaactcacgacgatcgttgatctgggcggcaccgtcttaaatgtcatggtgaaccacagggtttacgggcgcgtggaagcggcgctcaatatcaggaaccggcgggatgtgcagggcttcttaaatgatcttagaaccggaaaatcggttccgcttttgaatgtgacttccggctatcattttcacaagatttccgcggaaagcgaagaagtgctcgacgagatagagcatgcactgcagaaaaagggctttctggcggaagtgatgccctacgagcaggagacacatgcctaaacggcacgatatgccgcatgacacaccgcatggcatgccatgcggcacctgtatgtcatagagaattgctgccatgtcgtaaggaatcattttgcggctcttgacttcaaaccggattcgatttataataaatcgaattagcatcagaagctatcatgttagggagacagtgaatgattaagagcatgaccggtttcgggcgcgcggaggttgcggatgcaagccgcaagtttaccgtggagatcaagtccgtgaatcaccgttatctggatgtgaatatcaagctgccgaagacgctgaatttctttgagagtgcgatccgcagtctgttaaaggaatatatcgagcgcggcaaggtggatgtatttatatcttatgaagattacacagaagagaattattcgttaaaatacaatgcggggcttgcagagcagtacatgacctatctgaaggagatggcagagcagttcggcatcgagaatgacgtgcgcgtgagcacgttgtcccactatccggacgtcttcgtgatggaggagcagagcccggatgagcagaagctttgggcgggattggagcaggcgctccgccaggcggcagcgcagtttgtggagagccgtatcaaagagggagagcgtcttaggacggatctcgtggagaagcttgacggcatgatttcctatgtggattacattgaggagcgctcgccgcagatcctggacgagtaccgcatgcggctggagagcaaagtgcaggagcttttaggcgacaggcagctcgacgatgcaagaattgcggcggagattactatttttgccgacaagatctgcgtggatgaagagacggtgcgtctcagaagccatatcttaagcatgaaggagaccctgcttgccggcggcggcatgggcagaaagctcgactttattgcgcaggagatgaaccgcgaggcgaacaccatcctctcaaagacgaccgatcttaaggtttcggacgtcggcatcaatctgaagacggacatcgagaaggtccgtgagcagattcagaacattgagtaggtggcgtccatggctgggttaatcaacatcggctttggcaatatggtcaacaccgataagatcataagcatcatctcgtcggattccgctccggcaaagcggctgatacagcgcggcaaggagacggagacgttaatcgatgcgacacagggcagacgcaccaagagtgtgatctttaccgaaaataataaaattatattgtcggcattgcagccggagacactggcaggaaggtttaacggcaataccgcagaggattatgacgatgcaaaagaataaaggaattttgacagtcgtatcggggttttccggtgcgggaaaaggtacgatcatgaaggcgctcatgcaggcacacagcgagacctacgcgctctcgatttccgcgacgacgcgcgcaccgcgaaccggggagcgcgacggtatcgagtattttttcaagagccgcgaagcgtttgagcagatgatcgcggacgatgcgcttgtggaatatgcagagtatgtgggcaactattacggcacaccgaaggcatatgtggaagagcagcttgccaggggcaaggacgtgatcttggagattgagattcagggtgccttaaaggtacgcagacagttcccggatgcgctgcttttgtttgtgactccgccgagcgcggaagtgttgaagaaccggctgatcggccgtggaacagagaccatggacgtcattgaacaccggctggcacgcgcgttagaagaagccgaagggctggaggaatacgactatctggtagtcaacgatgtgctggaggaagcggtcagggaagtgcatgagatcatccagaatgagcactaccgcgtagcgcgcaatgcagacaaaatccgtgaaatgagaaacgagctgaaaggcttcactcgtcagtaacagggcgtcagaaaggagatttattatgatacatccatcttatgtagagttaatgaaggtagtcaacgagggcgtagagatcggtgaggaaccggtggtaaacagccgctattccctggtgattgcagctgcaaagcgcgcacgccagatcatcgccggagatgagccgatggcagataaagtcacctgcccgaagccgttatccattgccgtggaagaactttatgagggcaaggtaaagattattccggagtcacagtccgaggaagagtaatcattttttcagatagtttcagatgggaaaaggatgatatgcttatcatcctttttggcgttaaaatacaatgatggagacaacgatgaagttattatttatatcccttggctgtgacaagaatctggtagatacggaattcatgcttggaatgatccgggatgccggcacatttgacggacagccgatcgagatgaccgatgatgaatatcaggcggatatcatcatcatcaacacctgctgctttatcaacgatgcgaaggaagagagcatcaacaccattttggagatggcggagcacaagcgcgatgcaaagttaaaggcgctgatcgtgaccggatgcctggcgcagcgctacaaggaagagatccgcaaggagattccggaggtggatgcgatccttggaaccaattcctacgaagatatcgtgaatgccataacggaggcgctgggcggcaagttctacgagaattttgagacgctggagggactgccgaagcttacagccaagcggagcgtgacgacgggcggacactttgcttacctaaagattgcggagggctgcaacaagcgctgcacctactgcattattccgtatatccgcggcaattaccgcagtgttccgatggaggagctggtggcacaggcgaaggagctggtggcggcaggcgcgaaggaactgattttagtggcgcaggagacgacgctttacggcgtggatctctacggggagaagtccctccacaagctgctggatgcgttaaatgagattccgggactgttctggatccgcattatgtactgctatccggaggagatctatgaggagctgattgacgccattgcccgcaatgagaaagtctgtcactacctggatctgccgatccagcacgccaacgataccatgttaaagcggatgggcagacgcaccagcaacgcggatcttgtgcgcattatcacgcatttgagagagcggattccggacatcacgctccggacaacgcttatctgcggatttccgggagagacgaaggagatgcacgaggagctgatgcagtttatcaatgatatggagttcgacagactcggagctttcacctactctccggaggagggaacacctgcggcggagttcccggatcagattgacgaggagacgaagaaagagtggcaggcggatgtcatggaactgcaggaggagatcatcttcgacaagaacgaggagatgaagggcagagagctttatgtctttatcgaaggaaaagtgagcgatgagaatgcctatatcggccgcacctaccgcgatgcgccggatgtggacggctacattttcatcaacacggacgaggaactgatgaccggtgatattgtacgcgccagagtgacaggagcgtacgagtatgatttgataggagaattgttatgaatttaccaaacaaattaaccattatgcgtgtaattttgattccgttttttgtattctttctgctgtcgccttatttcccggcatacggcaactatattgcagtggcgatctttatcgtggcgagcctgacggatatgctggacggcaagattgcaagaaagtacaatcttgtgacaaatttcggcaaatttatggacccgctggcagataaacttctggtgtgctccgccatgatctgtctgatcgagcttgaccgcctggcggcatggattgtgattgtgatcattgcaagagaatttatcatcagcggtttccgtctggtggcatccgacaacggggttgtgatcgcagcaagctactggggaaagttcaagacaacgttccagatgctgatggtgatcgttctgatccttgacatccagatgccgttcttccagattctcggcaccgtgctgacgtatgtggcgctgattctgaccgtggtatctctgatcgattatattgtgaagaacaaagacgtcttaaaagaccagaaatagagaaggaagaaaagatggcagcagagggacagaacggcagcaagatgcttgatgaaatgccggagtatcggatttttgaattgttaaaaaaatatcattatacgctcacgacagcagagtccgcgaccggcgggatgattgcctcaacgcttatcaatgtgccggggatctccgcattttttacggagggatatgtcacctattcaaacgaagcgaaggtgaagatgatccatgtgaagccggagacgattgagcgctacggcgttgtgagtgccgagacggctgcggatatggcggtatctgcggcgcggacggcagatacggatgcggcgctgtccgtgaccggcgtggcaggaccggacggcgggaccagggaatgt

SEQ ID NO: 11492 - DNA, 23728 bp, Unknown
  gut microbiota DNA sequence
atattcctggctgctgctccgttaacgcagccaaaatctcatgcttctccttaagacagacttccacacgagccgcaccgggtgcctccagatagaattctgccgtgccgtcactgcacacttttacgcccggtatggtctttggatatttccctgccggtctcccctgcgcatccgtttcaaaccggatctgccggtgtaccggatcaaaaaagagcatctgctcctccatgctctggacggacagctgtttttcatccaggcggcgctccatgcagcatgcagatgccgtttcttccacagtctctgcgccacaaaacagaagcggcacaaaatctctcagactctttctccagacatgccattcatgatagccttcatatactttctttacgcaaagcgtttctgattcgcgcatttttttacagatatcctctattccgcgcgaaatctcctcttccctgctcccgcaggagaaaaacacaacatccggtttttctgcctcatccgtgcagatcctctctgcgtcataaagcgataccccggaaaacattccaagtgccgaaaatttatcccggtgcctgcatacacttcttgccgccagtgcagaccccagtgaaagacctgccagtgcccggtaatttctgccctgctttaccggaaaatgtgtttccacataaggaatcagatcctccatcagctctctgtcaaaatccccgggaaagaaaactgcctcctcaccctcgataaacgcataatcacagctcatcaccacgatcatttccctgcatttatgctccgcgatcagattgtccatgatgtaattcagcttcccctgccagatccatcccgtctcattttcaccgacaccatgctgtaaatataagaccggataccgtcggctgggatctttctggcttccataaggcgtgtatacataacattctttcaggtgaccgtttacaccggatgcgtactttgccagatgcaccgttccatgcggtacctctttcagatagtaaaattctgctccgcgctccggcacctcaaatgtgttgattgtctcaaagcagccataagaaaaaccggctttcggatgaaacagtttcactccgtccacaaaccagtgataatagtgcattcctcgcgggaagttctctatcttcctgtaaaaccctccgtttccatccggcaggagtgcaagcggcgccgcatcaaaataaccgcccacacccgccacttccaccgtctcagccgtcggtgcatacagatagaattctaccgtcccatcttcccacaccttcaccgcctgccgttcttccgttatctccggcgcaaacgaaagtgcctgctgcaccagcgcctggttaagttctgtccccataaaaaaacctcccattctataagatcttctgtgagaatatcgtatagaatgaaaggttctaccggcagatgcggcgcatcacttcctgctgcagatcctccatcaaaatctgtggactgcaggcattgtatgcatccatgtattcctgccaggctgtatcaaaatcctctgccataataacccgcggaagccactcgtgcttgatctcattgatctgctcatataccattcctgcttctgtggtatcagaaagcgatgtagcgtaagaatacatcggataccagtttcccggtgccttatgattcccaatcatatccacatagctttcacagccatacgccctgagacatttctggacgtcccccggctggctttttaaaaattctgccggctggtattccagtgaaaaagcatttttcccatccggaagcattccctcccaacgtgggaaatacgagtaatagcagaaatagtccgatgccagcagatcatccgaaaaacgctttgactgttccttcgtcagatagaaaaccccttcctcatccacgcaatagtccgttccttcctgcccccagaaacgcagaatctccacctccggctttaaaagatcattcacaaactgcaaggcaccgtctatgtcttcacacgagaccgtaaccgacaggccggaggacgtatcgatagatgccgctctctcgacatgccactggttctccaccccctcctgcatcgtaatcggaagctgtacataatcgcatccctgctcactcaatttctgtctgtcatatgccggataaatcgcatagtaaaactgccaccactgatccaccattccaaggaccgctccggtggacagcttattcagatactcttcatagctgtttgtgaacgcctccgcatccagtattcccttacgatattcttcatttaatttttcaaaataagcccgcgccgtctctgtcgtgttgtaatccatcacctgaaaggtctgcggatcgaccatgctgcagccgtcattgggatatccatccagaaactgcggcacattctccaggcagaaatatctccagtcatcgctaagaaccgtaaatgggatattcctggttccgttctccatcatgggattggcattcacataagcctccagcagatcgaaatattgctctaccgtatgaacttccggatatcctgcccattttaaaaccctcgtctgaatccagaatgcttccccgtcatggatcacatcgctgctttttccatttgtcaccccgaattgtggaatccagtaaatgtgtccgtcttcctggcgcagcatatcccactgctcattcgtcatgtattgccggatattgggatattcctcccagtactcatcaatcggaatcaatgcctctgcttcgtataagtttttttccccctgtatgaagtccggatatctgccgctggcaatgtatgaattgagcgcctgctccttggtctgaccggacagccagagttcttcacactctgctcctgttacctctgcaatcttcgctttcatgatatttccatattcaaggctgtttccctccgtcggaaaaaaagccgtaaaatgctttatctgcgcttctgccatgcggtctgtgtgtgccgccatgttccacagcaccagaagcagtaccattaaggtcattccttctgccagtctctttttcatctgttttccctcttttccagtcaattatactgtttttaagggacaccggcaagatgggattgcatacgctccttcgcttttatatggaattattcttttacgccaccgagtgtaagaccggtgacaaaatatttctgtaaaaacggatagatgcagataatcggcagcatcgtgagtatcgttgccgcagagcggactgacgtcggtgtaacggttcccactgcattcttcatggcttctgccgaagttccctgattcgtgacggatgacagcagcttcatcagctcatactgcagcgtcgtcagatcagaattcatgcggttgtacagcatggcatcaaaccaggaattccattgtccgactgcaacgaacaatgccaccgtcgcaaataccggcttgcagagcggacagtaaatctttagaaaaattgtcgtatatccggcaccgtctaactgtgcggattcttccagactgtccggtataccattcatgtaagtgcggattaccagcatattaaacgcacttaccatgcccggaattacatacacccagaagctgttggtaagaccgagtcctttgtaaagcaggaatgtcggaatcattcctccattcacatacattgtaatgacccagaacagggaaaggcttctcttaaacagaaatcgtttccggctgacaacaaacgccagaatcgcgtttgcagccagtgccagcactgttccgatcacggttcttgctaccgtgacatatgcaccggtaatcagattatctttctgcaataccgtgatataatttttccatgtaaattttctcggccacagataaattccgccacgcaatgcatccgtgccatcgtttaatgaaatcgccagcgtattcagcaccggatataatgtgattacaacaatcacaagcataatgattccgttcacaatgggaaatgcatcaacggatcctgttctctttctttttttatttgctcctgccagctgttgcatgctattaccctccttagaataacctttcttctccgttgcgctttgcaatctggttcgcaatcacaatcaaaatgatgcttactgcactcttaaagatacctgcagccgtaccaatggaataatctccctgactgataccccatttaagtacatagatatcaatcgtctgagacactttctgcaccagtccgtttcccagaaggtactgaatctcaaatccggcatttaatacatttcctacattcattaacagaagaatcataatcgttggtttgattcccggaagtgtcacgtatttgatttttgcccatcttcccgcaccgtcaatggaagccgcttcgtacaaagaaggatcaatggatgtgatggctgccaggtaaataatggcattccatcctgtctctttccacacattggcaaacgcgacgatcggccagaaataattcggatgtgcaaaaaaattgattggctgtgtaatcacatgcagattcatcaatatctcattgatgattccgcttcccgagagcatatcatgcagaattcccgttacgataatccaggacaggaaatgtggcagataagagatggtctgaacaacctttttcccgccatgtgattttatctcattcaaaagaatggcaaatgcgattgctgtcacaaatgtcacaaccaggtttatcacacccatcgcaagcgtattccggatgacacggataaatgtcatatccgaaaataaggtctgaaacttctgcagtcccacaaactcagagtggaaaattccaagctttggcttataattctggaacgccatcgcccatcccgccagtggaaggtaatagaaaatgatgccatagattaccatcacaccactccagaacagcagaactttctgtctctttatttctttccaggtgatctttgctttatattgattttctttttctttggatcttgttctcgtcaaagccataccccactccttaaaaaaacaggcagatgaaatcttccttgcatctgcctgtttccaatttcattttatgtgttattcgtatttcgctgcttcttccattctcttatcaagttctgtctgtaactcaccgataaacgcacccggatcgcagctgttgtatgcatccatgtactctgcccatgccgcgtcaaaatcttttgccatcacgacctgtgggagatactcgtgcttgatctcaccgatcttattccatgccataccgccttccgtatcggtagtgaagctgtttgaataggaccacatcggataccatgcacccggagcttcatttgttccgatcatatccacataggtctctgcgccataagcagaaaatgcttcttttacatcatcatttaatccgtcaaaaaattcattcgcctgtccatccggcttattcgcattgattccgtcatcacttgtaccggaatactgcggaaaataagaataggtacaggtatgggatgctttgtatgcagtgtcaaccgctctggttctctgctcctctgtgcggtaaaattcaccgttgtcatccacattatagtcaacgccttccactccccagaaacgcaggttgtgaatatcctgtgagaggaggtcatctacaaactgcagtgcagcttccacatcctcacagcttgtggtgatcgcaagaccgtctgatacatttaacacaccgccggaacagtgccactggtttttgacactctcatcaatggtaatcggaagcggaatgtaatcgcatccctgtgcatccagccctgcctgcttgattgcatctcccgcagtgtaagcaaaatcccaccactggtcaatcatgccaagtacacgtccggttgacagtttggcaatatactcatcataggtctgtgtaaaggattccggatctacaattcccttctgatattcttcattcaatttctggaaatactttactgcggtatccgtcgtattataatcgatcaccgtcaatgtctccggatctacgatacaggagccgtcgtttggatatccatccagaaactgcggcgcattctcaaggcagaaatatctccagtcatcgcagagaatcgtatacggaatgttctctgttccgtcttccatggtcggatttgcctcattatatctctcaatcagatcaaaatactgatccatggtacggatctccggataatccgcccattttaataccctggcctgaatccagaatgcctcatcgttgtgtgtacaaaccttctcttctcccttgatattgctgaactgcggtatccagtagatatgtccgtcgtcctggcgaagctgatcccactgctgctgtgtaaagaagtttttgatattcggataatcatccagataatcatcgagtgctaccagaacgtctgcatcatagagctgtgactgtccgcttcccccgcagataaagtccggcagctcaccaccggtgatcatcatgccgacagcttcctctgccgtctgtccggtcagccatgtttccttcactttcacgccggtcttatcggcaatgatctgctgaatctcattgtcgtcattgatctctgaaccgggaactgcaaaaaaagccgtaaattcttttaccccaccggcttccgtgctgtctgcaccgtctgcgttttcctttgcgtctgtcgatgccgcatcactcccgcatccggcaaacatggctgccatcattgtggctgccagcaatacactgataagtttccttctcttcatcttgtaactacctccctatttgataatactattttacctttctggcagattcagacaattggaggaagtatagataaaagcagggcaaagtataggttcttatttccatactttgccctgcttttgaacttgccgtatttcctttatgcctcacgccggaacttcgccggtgtacagccttttaccagaataaaacggttcacaaaataatcaagatcatgatacccgacttcctccgcaatctcgacaatcttcttatcggtatgtaacagcagatccgctgcccgttccattctgtaattattcagataatctttgaatgactgcccgtttttcttacggaacagctgtcccagatatgcgctgttgacgtaatatttttcactcaggctctttaatgtgatattctttgcatagttttcccggatctcacgctcaatctctcctagcactcctctggatacatttttgcgaagctgcgacagatagtcaccgtattcacatgcaaaccgggtcagatgcgccttgctgccgcgcattacccccttttcaaagctgctctcactgatcaggcgcagaatctcttcctgatttaccccgtcatcctgctcactcgccagatggatcagctgaaacagaagataattgatgttcagattcatcgtctcaccggtcatttccctgcttatcatctccccgtaaaactgctcaatcgcactccgtatctctacatggttgttctgctccacagcttttaacagacgatccagactgctcttgcataaaacaattcctccggaagtaacctgcacttcctcctcatagtaatagatcggcttttttgtgcggaatccctgaaaagaccggagcatacacgcatttccataagatctggcaatgttgctgatatcctgcacctttttccctacaagcatgatgaccggctggtgcatgttagcaatcagatactcaagaaaccggttcagatatgttttcccatcaatcccctgctcctttgcaaacgcatcacaatacaataacccgatgtcataaatcttctcatgcgttgagacatcaaagacacaatgtgatgcatggggtcccaggaactcaatacaatactggtacagctgccgctgaaagccccgtttttccttatctgatatttcctcggctctgccgtcatcatccatctgaatctctacataccgtataccggatgccccatccatatgcgacttcacatactccagattcacactgtcaaactttccctgaatcaatgcgatcagatgtctggacagatacgcctgctccatttcccggctgctttgcttcttctggttgtccgcccttcgcaatacctggactttattcagcaccttcagcaattcttcccggtctaccggtttcaaaatataatctgtgcagtcgtaacggatcgcctttctcgcatactcaaaatctgcatatccgctcaggatcacaaaatgtgcatcggaaatcttttccctgcgtattttttccagaagttccagtcctgtgacgaccggcatttttatatccgcaataatgagatctacctgctccccgcgcagatattccagtgcttcctctccgtttgccgccgtcttaacaacttcaaatccctcctgctcccagtcaatcagtatcttcagtccctgtaatataaacggctcatcatccacgagcaatacctttaacaatgcttcccccatctttttccttcccttctctacaatggcatccggatactcactgtcgtaccgacaccctgctccccctctatatcaaatgccacctgctccccgaataccattttcagccgcagacatgcattgatgattcccactcttccgccatcctttagcatatcaatgctggcgtttagcatgcgctcttttaattcctgcatctgggaggcgtccatgccgcatccggtatcttccacttccagataaagtgccttctgcttttggcagatccgcacaaaaatccagccgggagctgtctttgcctcaattccatgtacacaggcattttccacaaaggtgacaactgtcattttgggaattttaatgtccagacaatcctcttccacttcaagactgtaacttaaccgctctccaaaccgatacttctgaagccccagatacgctctcacaaattccatttccctgcggatctcgacactgtcgtttccccattccacatactgacgctgcatcagcgccagcttttccaccatgtctgccgtctcatattcgtttttcaacaggctgtgcatgcggatgctctccaacgcattaaacagaaaatgcggattgatctggctgtgcagcgcgagcagttctgcattctgtctttccaccagcatctcctgttctttaatcttattcttatacacaatctgaatgagttcatttgttctcgcaaccatgcggttgtaattgcgcatcaggcttccaatctcatcttttccacgcacatgcgaaatcggcaccagatgttccccgccgactgtctcgaacactttgctgagttcgctgattctctgcgtaaatgaccggttaaatccccgcaccagaaggagtggcagaatcgcatttacaacaattaagaatccaatcagcggcaggtttttccggatttccgtccacagctggcgtttgggctgcatgacataaatatccagatccattccgtaaaactcgagttcctgacagtatccgaccctgcccgtctggtcaaatgtctgaaattcctttccgatactggaatatctgccatttgataagacaatcttatctccctggcagataaatacatccgtgtcataattcattttctctaatgtccggtttactgcactgtaatcgatgttgatcagcagcaccttttccatattattttccgcataaaagtccagcttctggaaaaaaagcatccgtctctgcggctccaccgaaggtgccctgctgtcatcatactggaaatataatcccttattcaatccgttatcctgaaaatagcggtacacttctgtaccgcgtatttccttcatattacatacctttcccccattcacgatcgtgtcattatccgcatacatcgtgattaccatgttgttcatgccaagtccgctctcaaacagggtatctttaaaaaaatcctgataactcaccacatagtccaacggatcgctgtaggtattcgccaaaaaacggttaatatatttgctcgtataaatactcttcccgatctctgctgcattgttgaccgtatttgaaatactgtatgcaactgcattggcaatattcgccatctcatgctctctggcttcccgctcagacttcatgacaacagaaaataccgcactgtccgtcacaatcagcggaaccagcacgcacaagatatacaggatataaaatttattttttattttaaagtcatccatccaggcttcaaccgcatgcagaattctcttcatatcctctcccagtatttttatactaacattgtttttcatcgagtgcaacggataccggcagcatcagtattccacttccgtcacatttcccgttttgcatataaaaagtgtgctcaccgtctgtccggtcagacggctgcttctctcatccggctgctgccctccgactgcgatctcatagcttcccgggtgtaccagacattttccctcctcggagatcagtgcaaaatcacgcgtagaaagggtgatacaaacctctttcttttccccacattccagtgcaaccgaccggattcccttcagctgatagccgggatcgtaagcttctctttcactgaatctgacatatacctgtaccgcttcctgtaccgggtaggtaccggtattctccaccgttacatgcaccgttaccggctccagtattccaaaatctgtgacatctgcatgtgcatcagaataacggatctgcgaataggtaagaccatatccaaacggatagagcacatgtctgtccgtataccggtaggtacgtcctgccatggaataatccgtaaaatccggaagaaattccgttccttcataaaaggtaaccggcagttttccgcatggagagaattctccgaacaatgcctctgcgattgcttttccacctctcgctcccgggtaccagcaatccagtattgcccgtatctgtgcatgttcctgcgcccacgacagatccagtgcacttcccgccagcacggtgagcacaatcggtttttcgactgctgcgaccgcctctaaaagttcctgctgcagtccgggaagctttaatcccagcttgtcaccgctggcatactcatttcccgcatctccctcttcgccttcgatgcccgcatccaatcccagacacatcacaatgacatctgcccgctccgcagcaatcagcgcttccttaaaccggtccttcggctccccgaggaattctacctgatccttatacagatggcagccctgcgcatataggacgcgggttttctctccggtgtattcctgaattccctccagcggtgtaatgtatctggaggatgtcccctcataatttccaaccagcgctgctctggagttcgcgtttggtccgatcactgcaatggtatggatctgttcctgcttcagcggaagaaaatggttgtcattcttaagcagcaccatacttcttttcgaggcttctaaggacagtgcaatatgttcggggcactccaccacatcataaggaatgttcgcatatggagacggataatcctccatcatccccagccggattctaacatccatcaggcgctccaccgcttctgtgatcgtcttttcctccaccagtccctgttcacaggcacggcttaaatacaaaaatgccttcccgcagtttaaatcacagccatggttgacagccattgccgcagattcttctaccgtctttgtcacatgatggttctcatgaaaatcaagaattgcccagcagtcggacactacgtgtccctcaaaaccgaattgttttcttaaaatatcctgcagaagtgtcttgcttccgcacgccggttccccgttgacgcggttataagcgcccatcacggcttccacaccggcatccttgacacaccgcttaaatgcatacaaatacgtatcgtacaaatcgtgcagcgacacctttgcatcaaactcatggcgcaatgcttccggaccgctgtgcacggcaaaatgcttggcacacgcagccgcctttaaatgatctggatctttgccctgaatccctctgatatacgcacagccaagctttgccgtcagacagggatcctccccgtacgtctcatgtcctctcccccagcgtggatctctaaaaatgttaatattcggcgcccagaaagtcagacctttataaatacctctgtctcctcttcctgaatacgcttcaaactttgcccgtccctcggtggacaccacatctccgatcttctcaatcagttcttcatcaaaagtcgctgccagggcaattgcctgtgggaacattgtcgccacaccggatcttgccactccgtgaagcgcctcattccaccagttatacgccggaatatgcagccgctcaatcgccggtgattcatagcgcatctggctgatcttctcctccaacgtcatctgttccaccagtctttttgcatattctttcgtctccagactcatctctccctctccttttgctctattcttctgctccactgcacgtaaagctcacataatccgcataatttttactgtcagttccatgcgaagacgcgtacattccaatggtgcatcccacaaagcctcccgcctcttccgtggtatatgcaagcaggctgaccttatcgcaggcacagatcattttttctcccagccttacccagatacccgcactctgctcctctccgcggatcagaatctcccataactcctgctcttctttcagaagaacttcacggatgacctcttccctggcatgaacatatgtgctcacccgaaagcagacatctgttccctttttcccgatctccatcctcagatgattctcatggttctggtataataccattcccgccgtctcatcctccgactgtggttcaaagcggaatctgaccgctgcatggaaatgatagcttttctgccggagtccgaaataactgctgcatcctttttcaccgatcgtctgttttccacagtataagcggaatacaccgcgtttttctgtcagcgaataggatgcctcatttcttcccccgatcccaagcagcctctgatccggtctcgtctcccagaaacacagggtatcgcacgttcctgtttcttccggaaaccggtactcttttagcggcacttccagtgtcttctccagacgtccggttccggcagcaattaccggccatccatcctgccatacaacttttgccagaaaagtctcgcgccccatacttccatggttcttacagcgtctcgtggcgagcatcaccacataccagttcccgttttgatcctccaccagatccccatgaccagcatagaccacaggataatccgccccaagattccgatgtgtaaagatcggattgcgcgggcatccctcaaaccattgaaacagctttcggcttctcgccacactgatgctgtgttccggtccggttcctccttctgcatgcagcagataataatagccgtcttttttgtacagatgtggtccctccggccagattgcccctctcacagcccctttccagattgccatgctctctccgaccagcttcttcgtcgtcagatccagttcctgcacccagatctcccagtccccattgtaccttactccatcgggattcggtctggttccgcaataatagcacctgccatcctcatcaaaaaacaggctgggatcaatcccggctgcttcttctcccagataacagggatctgaccacggtccctccgggtgctccgccgtcacaataaaattacctccatagctgacatttgtggtaatcatataataaatacccttatggtatcggatggtcggcgcatagattcccctggaaatctcctctcccccaacagcaagctgctcttttctctgcagaatatttccgatttgctcccaatgtgccagatccctgctgtgaagcagcggaacacctggtgcatatgcaaaactggatgttaccagatagaaatcttctcctacccggcagatcgacgggtccggataaaatcccgtcaaaatcggattcttaactgtaaccatagcttttcccccctactccacatatccaaatccgagaatcgtaaatttcttatccagattctcaccgcttatctggattctcacggtatgcgctgccgtttccttctcctgaaatacgagcaccgcattacagtgcagccagttattgacatgtggatctgctgtgaaccggaattccccatccaccagcacatccgctgtcccggcatccacctcgccggaatccttaaatatcagaaataacgctctgcatgtgatcgtcagttcaaaaaacgcccgatccggcttagttccatcatacatccagttatatgggaattccggcgtagtgcaaagatcctgatccatttccacacactgcagttcgtgatctgtcgcatcaaagcctccctctctcatactggcgccctcatatccgtcccgccggtctaagagttttactttttcaaacgaattgccgatcgcaggctccccgcgcagacactgttctaagacttcctcctccgtcatgccctgccggaagctgtccaccctcgcatggtcggacgtatcacatatctccatcaggtattccagacaatctgccataatggtatgtccaaggttggtcggatgaaacatgtcataaaaaaactggttcttcgtaatcactcttttctgttcttttccggaaaactgcggggtaaccgcatccagaatacttaccatcggaaggtcgtactgtcttcccaccggctgcagacgttcctgaagattccagtcatttgcaaatacggaaaacaagagtaccaccgcaggtctccacggcagcttcaataccttacgcaccagactctcatagcagtcccctttggtctcatctccctcatcattcaccgcaaactcgattacaacaagatccggctgttccccctcacgcagcacatctctgtcaaaacggatcattccaagctccgatggggttcctcctactccagccttgatgaatctgacattattgttccgtgcaaatcgtttctgaaacagctgatatgccttatacgcataacactctgtgtgaatcggcactgcccctgccccctgtgtgatggaccctccgataaaagcaagcgtcacttcttttccggctcgcgctttctcaatcactttccggatgcggtaggtatttcccaggttcataagagagcgctgcaccatcttataatattcttccgaatggagatccactttttcttctgtcagatcttccggtgccgtaaatccgtcgtttaaataaaaacggacatctgccttacccacccgttccggtttgtcaaatgtaaagcggatctgtccgggcacatcatcatccagactccattcataatccgacagacagatcctctgttccatcccatctccctgcagtgttgccaccagattcgttccgcccccatacaaatcctttttgccgtacatctgaaaaacaaattctatcttttcagccggatgctccatctcaaccgacacaccaatactgtgtacaagcgtgcggaagcctttcactgtaccgagcagttcaagtattctgctatccgtgatatttccgacaatctgtgcactgtttgccagacggccgtcactttcatagatgaactgcactgctttgccgtctccctgcttcagtccgcagatctcttttccacgcataatataaaaatatgctcttgctttttccgggtctctcggtgccactggtcctgtcattctgtgctcctcctgccattttattttatatacatctatggtagcacagatctccttccggatacgcgggagaaactatagatattactacgataaattagtgttcttgcccctgcccccgcggagcgttttaccggaagccgtcacatcagaaataaacggctgcctttatgcggtaagtaatatgaggagaaccgttctttttctgatgtgaccatcttccggtattgattcggcagcattccgtaccgcttccggaacaggttggaaaatgccttgctgtttggaaagccgtggttcaatgcaatctcgccaatcgcaagatccgtctcttccagatccctcacggcatgcttcaggcgcacactcgacaggtattccttgtaattgatcttcgcatatttttgaaacatccgggagagatatgccggtgaataaccgaagatgcctgccagcttttctaaagagagatcctccgtataatgctccttcagatacccggtaatccttccaagacgcttaagctgcttattgttcttaagtatctcttcgcccacctcaagcttccggtatcttgtcaccagaagatactccagctgataaaaacagcttagcatttttaattcgtaaccggtctgtttctcaccgtacgccacaaacatcgtctcgagcagggaaaatacctgacggtcatcctcttttccgctgtgcgaaaaccagataaactgttcttccgtataataatccgcaaagacgccaagcggaatctgcagcacaatcgtctcgtttggcagaggggcatggatcgcatgcacctcattgctgttcaccagcacaaaatcccccgctgcaagcacatattttttctcattcaggaaaaaatcaagctgcccctgtctcacggcaaatatctcgatagaacggtgccagtgcttctccctgatgtattttccgccgccgccctcaaagagaaacagcttaaacggaagtcccctgtccggaacgatcacttcatgctggtaaacaatatcattcactccacttcggtctcctttaacaaaatttcattaccgcgcagtaagctgaaaccgccggttttcaccagccatcctcataaaatatactgtatgttttttattttgttaaaagtataacataaatttcaattttctcatttatttttcacaataaatttatattttgtttatctttctttgcaatactgcacaattttcatgttatcttttttttgcgtttccggaattcttcccgttttcctactccggcagactgtccgacaaacataaagttccccaccccacctgcggattcggatattcctgcagcagaccagaagcccttcctcctccgagcggacgcgctccgcggatcaggtacgcctttattttttctccgtacaggtacgcatcgtttccgcgcacaatcccccattccatcagaagtgccgcgctccccgtcacaaacggggttgccatcgaagttccggaacgcgccgtatagcctccgcccggcgcgcaggaggtgatctccacgcccggcgccgcaagatccggcttgacctgtccgtttccggtaaatcctctgcctgaaaatcccgccagctgcccgaacctcgcgtcgtacgccccgaccgtaatcacctttgccgcagtggacggaatggtaagcgtcgtctcctcccgcggcagaaggaatccggtgccttcgtttaaaacgcctcccgccgggaaccacatatcatagcgccccgtgacgatgcgctgtggaatcaggcgcaccgtccagattccactgtccacatagtcccgcacaggaagaaaatccaggtagatctcctggtaatggctgtatgggctcggctccccatagtagagcagaatctgcgtctgacccagcgtaaagcgctgcggtccctgtatctgccggatcggtccgatctgcatgccgcccggatgaatgagaagcaccgccatctcatccgcataggatttccagatctgcagatttagggcgctctcgtacgcgctcaccgcgaactctacattttccgcctgccccattccaagcgctcccgccgtgtgcgtggcagccgctccctcattcccgcttccgatcacgatcgagctcttccagtagtttgcgagatcatccagataagtctcaatgagcgacgttcccgtgtggcttccgtaattattcccaaaacttaagttgatggcgatcggctgctgcctctcctgcgcttttctaaggcagtaatccaccgcctgcatcagttccgtcgtccgcgggaacgccccctcccgctggttgccgagctttacaatcaaaagatcgctctcatacgccacaccgcggtatcttccctccgatgctcttccgttgccggcggcaattcccgccacgtgtgtcccgtgtcccgatgcatccctgctcgggcagaccgcataccgctgctgttccgtgggctgcgcgagcgcctcgttgatgcgcgcctcatcgtactcggttccaaggaaataccccgccggcgccgacaagtccccggacgccgggatcgtctgatcccagagactgacaatgcgggtcgtaccgtccgccctccgaaaatccggatgcgcgtaatcaatgccggaatcaatgaccgccacaaggacaccggcgcccgacagacctgttctctcctgcagctgtgtaatgcaggatgcacgctttccattgtccaccgcgaaaaataaaagtttcggcttttccatgtactcgattttatccagcgctgccaccggctccacgagatgttccggcagcactaaaacggcatattcattctgcagatttgtcagttgaatccgcggatattcctccggaaaatttttaaaaaggagcgcctcaagctcctccgttgtcccgacaaattttacaatgacctcccacgtctgttcggcactatcgtagccgatgtccagctccagcgacttctcccgctcctcctgtgtcgccgccagtgccagattcagcagattctccattttttcgttcggcataaaaatctccgcaacaacatcttatttttattagatgccgccgcggagaccgttatgtctgcctgtattctgtttttgtctgttttttatttcacccgctcagaaaacatcataaagaagctgaccagaagacatcccaccgacacccagatcatgcgaataccgtagcgcatggacagattgccgccgatgccggctccgatcgcaaagaaaagaatgattccgaaatagtagagcgactgtcttaactgttccggtctcttgtcccgcagatacatggaaaatgccgccgtgccgctccgcagattgccaatgcacatcgtgctcgcataggaatagccatttaccttgcggaacgtctgcacctgcatcgcgcaggcaaaagacaccagcaccgtcgccgccatgttgtattcctgcgggataaatcccactgcaaataaaatcacaatctcaagcagcagaattccctgtctccagtgaagccgcttcgcgtatttgaaacgcccctgtatgcgctccgcaaaaaacacgccaaacgcaaacgccagcaacgggaacagatagcgcagtccgtccatccatctgcccaccataaaattctggctcatcagcaccacgttgccggtctgggcattggagaagacctcctccctcgtattataggtataggcatcctgaaatccgccggagaccgccagaaaaatactggtcagaaacgcctctgacatctgaagttcgttctttttctcgttcataagtatctctcaccctttcacattcttctctattatagcggtttacgtgagatgcgcaagtacccgttttctgccggctcataatttccgtttgcgcggcatacactattccagtatctgaatgtgcggcagtctgcctgcgcattctctcatgaaaggagtatttatatgtgcggaatctccggtttctgcgacttttctaaaaattttaaaaaggaacccgtcctctgggaacatattctcaccgacatgcatcacacactcgcccaccgcggcagcgacagtttcggcacctatttagacacgcatgtggggctttcccacgccagactcagcatccgcgatattgcgggcggcagtcagcccataatccggcaggatggggaacgcacctgcgcgatcgtctacaatggcgagatctacaacaccgacgaactgctgccgccgcttctcgccgccggatatactttttccaccacttccgacacggaagtcattctctgcgcctatctgcactatgggagggattttgtcagccgcctgaacggcatttttgcctttgcgatctgggacggcggaaccggtgaactgcttttgtaccgtgaccgtgccggtaccaaaccgctcttctacagcaccccgggcggcacactggtctttggctccgagccaaaagcactcttctgccacccggatatcacgcccgccatcgatgaaaacagcctgttggaacttctgtccatcggtccggcacgcacgcccggcaacggcattttttccggcatgcacgaggttctccccggccattatcagattttctcccgggagggcatggagcaggtgtgctactgggatcttaccgccgccccgcacaccgattcctatgaaaaaacggtggagatggtctcttatctggtgcgcgatgccgtaaagcggcagatggtctcggacgtcccggtctgcacctttctctccggcggcatcgactcttccatcgtaaccgcgatcgccgcaggctgcatgcaaaaggacgggcagactctaaatacgttctcttttgattttgcggaaaacgataaatatttccagtcaaacgcctttcagcccgagcgcgatctgccctacgtcaacatcatgctcgcccactgccagacgcaccacacctatctggaatgctcccagagcacgctttatgaggcacttttttcggcggtcgacgccagggatcttcccggcatgaccgatgtggatgcctccttgctctacttctgctctctggtcgccagacacaacaaagtcacactgaccggagaatgtgccgatgaaatcttcggcggctatccctggttctaccgcccggagcttttaaaccgcgacggttttccgtggtctgccgatgtctctgcgcgcgccgcattcctgtccggcgacgtgactgaccgcctggatctcgccggttactcgcgcgcccgctatgaagagaccataagtgcttccccgaagcttcccggcgaatcgcccgaggaagcccgcaggcgtgccgtcggctacctgaatatcaagtggttcatgcagacgctcctcgaccgcatggaccgcaccagcatgtactccggtctggaagcgcgcgttccctttgccgaccaccacatcatggagtacgtcttcaacgtgccgtggagcatgaagtatcagaacggcgtggaaaaaacactgctgcgcgacgcctgcgcggatctgcttccgacagaactgctgcaccgaaaaaaaagcccgtacccgaagacttaccacccgggctacgagaagcttctcgcggatcacctgcgccggatcataagcgatccgaacgcgccggtctacccgctgatcgatcccaaaaaagccgaggcgttcctcaccgctcccaaggagcttggcagaccgtggttcggtcagctcatggcgggtccccagcttatggcatattttatccagctcaatgactggatgggaaaatatcatctgtccgtgtaaggaaaaggaaacgcctccagaatcgtgtcctcataatatgtgcaaagcagatactacagtgaatttccttccgcccggctgtgaatctggaaccgaagtgatattggagccaatctgcactatatccgcaggagacagaacaaaatcattcacattgaaattctgctggatgcgctccgcgtgaactgacttcggaatcgccacaatcctctcctgtcgcaaggagtgctgttggcagagcggtcggggcagctttcctgctgcgcctcgccgaccgctttttcagagggatattccgttagctggagaacgagcaaaactgaaatcttccatttccagacttgtttgtatcctttttcccgaattggaaaacctcgttcctacacttcatatggcttccgtctatgccctgctttccgagtttccaagtgcagacacagttgcgaatgctcatcttaatggaagaattttttgtcttaatggactgcttggattcctttaatgctgcccgatactgcctgaacattcccttctttgctttatcaacctttttgattttcaattttctcaccttctttcaaatgccaacaaaaaaagccgccatgaagatgtactctccataacggcttagttaaatgttattttttccttttgtggctcttgggattaagcctcatttcttttgccattcttatttcttcttccccaagcttacattttctttttgcttcgtcccaaagttgctggctgtatgccatgaaatcacatcctttcaagattttcttcttgacaaacaatacatatacctttactataggtgttaggaagaaacgaagtttactaccgtacagctattgctcatgcggcttgctcgtttctttttttgttcttaccaaatcatatagataaagttttccatctgcatcacatcttacaagcattcttgttgaaaaaatgttataacgctccagatttccatcttcatcataaaccggtattccaaatcttgtattataacgataccatccaaattgtgcctttgccccatgtttattcttataatcaggatactgtgccttttcagaagcaatctggataagttcaccaatagcaggcgtaatgtttgctttcgctttcatattagcaccttttaatccctttgtatcatttgaatgactgaactcatctggaaaatcagaaccgatatatattttctctgaggtttcggatatttcaaagtattctccaatatattctttcagatactgctctacttcattccaatctatccccttcctcgacttaaatcttatatcattaataagggctatttttgaaccatccaaatccgtaataatactgacacttttgttcatatttctcgtccttttctcttcgtatcagatatctttcgacatctgatgcgattttaccataagtgtcacaattatactatgaatttttctgcttctccttcgctttctgttcttggattatttcgtgtaaatttgtgttgcatcaatctgataactaagatttgtcaaggttccctgacaaccagcaactgcacttttggcacaatccggaatagccgctaaattttcttccaaatattttgctttttctgggtcattcatgcacttctttaaaaatgcacttgatacagataccgttgttgggatcctgtgattgccataatcttaccttcctatctgtttttactttgtctgactagtttctttctgaactttatcagtgtttttcttccaacaactaaatcaatattgctccttttcaacgcttctatgccagcgcatcaaatgacgatgtttcgctttccgtcactcctatagatgttgaagtacctagcagttccaccagttttcctgtcagatctgccacatcttttccatcaaccttcagattatattgccgttcttcctgctcctgtttttcggcacgctgtttttccagccgttcctctgtctctttcttttctgcttttcttttct

SEQ ID NO: 11493 - DNA, 7338 bp, Unknown
  gut microbiota DNA sequence
tatggatattcttgtcacaaagtggatcggaattgagggaacttccattatcgcaaaggaaaaagaaacagaactaaagacaaagttctcggtgccttttgtcgagaaggcaaaagcactggatgcttatatatcggtacaatcagaggccgcagtcgccgtcaagtctggcgttggtgcaatgcatgacgtcacagagggcggaatattcggtgcgctctgggaaatggcggaagcatctggcgtcggacttgaaatcgatttgaaaaagataccggttcgtcaggagaccattgaggtctgtgaatttttcggaatcaacccctaccagctgatttccagcggctgtatgctgatggcggcagaggatggcaatctgctggtaagagaactggagaaggcaggaatccctgcaacgattatcggaaaggcaaccgcggggaacgaccgcgtccttttgaacgaggaggaacgcagatttttggagcctccgaaggcggacgaattatataaggcgatataaaggagaagaagcgatgcgtgaaaagattttgacatttatagagaagaacagccggattgacttaaaggagcttgccattgtgcttggcgtcgatgagacaacggttatgaatgagcttgagaaaatggaagaggagcacattatctgcggctaccacacactgatcgactgggacaaagctggcattgagaaggtgactgcgctaatcgaggtacgtgtgacaccgcagcgcggcatgggctttgacaaggtggcagagcggatctacaactatccggaggtcaattccgtttacctcatctccggaggctttgattttatggtgacgatcgagggaaagaccctgcgcgaggtttcacagttcgtgtccgataagctttccccgctggattccgtgctcagcacgaagaccaacttcatcctgaagaagtataaggatcatggaaccgtaatggcagagcagcccaaagatgaaaggatagagatgtaagatgagagatccgttaaataagacaatcacaacgatccagccgtctggtatccgaaagttctttgacgtcgtccatgagatgaaggacgcgatctctctgggtgtcggcgagccggattttgataccccgtggcatatccgcgacgagggtatttattccctggaaaaaggaaagacacactatacatccaatgccggactcaaggaattaaaagtggagattgaccattatctggaccggcattacggggtgtcctatgatccggatcatgagatcatggtgacgatcggaggcagcgaggcgatcgatgcggcgatgcgcgccatgcttgatccgggagatgaggttttaatcccgcagccgagctacgtgtcctacgtgccgtgcgccgtgcttgcaggaggcgttccggtgatcattgagctgaaggcggagaatgaattccgtctgacgccggaagcgctggaggctgccatcacaccgaagaccaagcttctggtgatgccgttcccgaataatccgaccggcgccatcatggagaaaaaagatctggaaaagatcgcggacatcgtaagagagcacgacctttatgtcatcagcgacgagatatactcggagctgacgtatctggagcggcatgtgacgattgcctccctgcagggaatgcgcgaccggacgatcgtgatcaacggtttttccaaatcccatgccatgacaggctggcgtctggggtatgcgtgtggaccgcgcatcatcatcgagcagatgttaaagattcatcagttcgcgattatgtgtgcgccgtccaccagccagtatgcgggcgtggaggcactgcgcaacggagatgaggatgtggctgccatgcgcgaggagtataacggcagacgccgctatctgctgcaccggtttaaagagatgggattgtcctgttttgagccgtttggcgcattttacgtgttcccgtgcatcaaggagttcggaatgacgtccgaagaatttgcgacggagctgctcaatcagcagaaattagccgttgtcccgggcactgcgttcggagactgcggagagggatttgtgcgcatttcctatgcttactcgctggataacctgaagaaggcgatgaaccgcatggaggcgtttatcacagatcttcgcaagagatcataagaaaaagggaggagggcgtttcctcccgaatggagactgacatggcaaagctgaatgttgtattatatgagccggagattccggcaaacaccggaaatatcggcagaacgtgcgtggcgacagggacaagactgcacctgatcgaaccgctgggattccatctggatgagaaagcaatcaagcgtgcgggcatggattactggagtgaactggatgtgaccacctatgtcaactgggaagatttctgcgagaagaatccgggtgctaaaatttatatggcgacgacgaagggcagacatgtatacactgaggtatcctatgagccggactgctatattatgtttggaaaagagagtgccgggattccggaggagatcttaaaagccaatccggacacctgtgtgcggattccgatgatcggcgagacgcggtcactcaatttatccaattcggttgcgattgtgctgtatgaggcattgcggcagaatgagtttgaccacatgaagctgctgggcgagctgcaccggctgcgctgggaagattagagagggtacagatgggaattatcaaggcaagacagttggttcatgaatatatcagacgtgatgaggagggcaatgtggagtccatctccacagcgctcgaccacgtcgatctggatgtggaagcaggagattttattgccattttaggacacaacggttccggtaaatccacgcttgcaaaacacattaacgcgctccttctgccgagcgaaggctcgctctgggtggatggcaaggacgtcacaaaggaagagaatacatttgcggtgcgtcagaccgcgggcatggtattccagaatccggacaaccagatcattgcgagcgtcgtggaggaggatgtcggcttcggaccggagaatatcggcgtgccgacggatgagatctggaagcgcgtggaggaaagccttggtgcggtagggatgctctcgtaccgccaccattcgccgaacaagctctccggcggacagaagcagcgcgtggcgattgcaggggtcatggcgatggagccgaagtgcatcgtgctcgatgagccgaccgccatgcttgatccgaacgggcggaaggaagtcatccgcacggcgcatgagctgaaccggaaaaaaggtgtgacgatcattttgatcacacattatatggaggaagtcgtggatgccgacaaggtgatcgtgatggatcagggaaaagtcgtcatgcagggaacgccgcgggaagtgttctcccaggtgggaaaactcaaggagtacagactggatgtgccgcaggtgacgattttagcggatctgctgcgccagtccggcattaatgtacccgtcggtgtgctgcaccgccaggaacttgtggacgcgattcttcgtgtggcacagatcggagagtagaaatgtcaattattttagataaagtgaattttgtatacagtgaggagaccgcgtaccagattcaggcgttaaaggacgtgaaccttgagatcaaggacggacagttcatcggcatcatcggccataccggctccggcaagtcgacgttgatccagcacctgaacggtctgatgaaggcgacctcgggaacgatttattttcatggacaggatatttatgaggaagattttgacctgagagaactgcgcaaccgggtgggactggtgttccagtatccggagcatcagcttttcgagacgacaatttttgatgacgtctgctttggtccgaagaaccagggactttccaaggaagaggcgggactgcgggcgtttgaggcactgcgcagtgttggtatgccggaggagctttattaccagtcgccgtttgatctctcgggagggcagaagcgccgtgtggcgatcgccggagtgcttgccatgaagccggaggtgctgatcctggatgagccgaccgcgggacttgacccggcaggaagagacgagatcttagaccttgtggcacggatgcaccgcgagcgaaacatgacggtcattctggtgtcgcacagtatggaggatgtcgccaagtatgtggagcgcattatcgtgatgaaccatggacaggtgatgttcgacgacacaccgaaggaagtgttccggcactataaggagctggagacgatcggactcgcggctccacaggtgacttacctgatgcacgaactgaaggagcacgggctttccgtggatacggaggcgacgacggtggaggaagccagagccagcctgatgcaggcattgacgggaattgattccggcaggagcgatattcaccggtaaggtgtgccgcggcaggaatcattttacggaggaaagagtcaccggcgggcgtcgatgaagaattccggtagggaggaagtttatacatgttgagagatattacactgggccagtattatccggcagattctgtgatccataaactggacccgcgtgtgaaactgtttagtacaatgatctatatcatatccctgttctgcttccgtggcgtggcagcgcttgcgattgcaacggtatttctgattacagtcataaagctgtcgaaggtgccgtttaagttcatggtaaagggattaaaagcaatcatgatcctgatgttaatcacggcggtgttcaatctgtttttgacgcccggtgaggcactggtgagtgtctggcgttttacgatcacgaaggagggtgtgaccagcgcggtgctgatggcgatccgcctgacctatctgattctcggaacctcaatcatgacgctgaccacaacgccgaaccagctgacagatggtctggaaaaagcgctgatgccgctttctaagatcggtgttccggtgcacgcgattgcaatgatgatgtcgattgcgctccgctttattccgattctgattgaggaaacggataagatcatgaaagcgcagatggcacgcggggctgattttgagagtggcaatctgttaaaaaaagtcaaaagcatgatcccgcttctggtgccgctgttcgtgtcagcattccggcgtgcggatgatcttgcaatggcgatggaggcgcgctgctataacggcggagaaggcagaacgaagatgaagccgctgcgctatgagggacgcgaccgcctgtcctatctgatcatgtggctgtatctggcgctcatcattctgtgcagaatctttgtgccgtggccgcaataaagctgcaaggagaaatggtttggagaaagaggtaaaacgtgtaaaaatgaccgtggcgtacgacggcacgaattataaaggatggcaggtgcagcccaacggaatcacgatcgaggaagtgctgaaccgccatctttcctcgcttttgggggaggagatcgcagtgaccggcgcaagccgcacggattccggcgtccattcgctgggaaacgtggcaattttcgatacgacgacgcgcatgccggcggataagatttcgtttgcactgaatcagcgtctgcctgaggatattgtcgtgcaggggtcctgcgaggttcctgcggactggcatccgcgctatcagaacagccgcaagacatatgagtaccgcattttgaaccggacattccgtatgccgacgagacggctggatacttatttttaccaccacagcctggatgtggagaagatgagccgggcggcggtgtacctggaaggggagcacgattttaagagcttctgtgcggtcaatgcacaggtgaagaccacggtccggacaatctatgcgtgcagtgtcacaaaagcggacgacatcatcacgatccgggtgacaggcaacggttttttgtacaatatggtccggattattgccgggacgctgatacaggtcggtggaggccagatcgagccggagcagatggagcagattctcgcagcgcgcgacagagaggctgcgggaccgaccgcaccggcgcacggactgactatgatgggaattgagtatatggaagaaaaagatattgacacgcaaggagtcgtgtaatataatatttaagtctgtgatagtgaataaatgtcattccaaagccccggagtgccatttaactataaacaatatgacatggaggacagtgtgccggacattcacgctgcctgagatgaacagcatttttctaggaggaataacgatgaagacttttatggctagcccagctaccattgatagaaaatggtatgtagttgacgctgaaggtatgacattaggacgcctggcatctgaagttgccaaggtattaagaggaaagaataaaccaatctttacaccacatatcgatacaggtgattacgtaatcgtagtgaacgctgagaaggtaaaggttaccggtaagaagttagatcagaaggtttactacaatcactctgattatgttggcggtatgaaagagaccacattaaaagagatgatggctaagcacccggagagagtgatcgagcatgctgttaagggaatgcttccgaagggacctcttggaagagagatgtatacaaagttattcgtatacgcaggtccggatcacaagcacgcagctcagaagccagaagctttaacattttaatgaggaggtaaaagacattggctaacgcaaaatattacggaacaggaagaagaaaatcatctgttgccagagtatacttagtaccgggtacaggtaaggttacaatcaataaaagagatatggacgaatacttcggattagatacactgaaggttatcgttcgtcagccgcttgcagctacagagacagctgataagtttgacgtattagtaaacgttcgcggtggtggttacacaggccaggcaggagctatccgtcatggtatcgcccgtgcattactgaacgtagatgctgattacagaccgatcttaaagtccgctggattcttaacaagagatccgcgtatgaaagagcgtaagaaatacggtctcaaggcagctcgtcgcgctccgcagttcagcaagagataatcgactgctcagactatatcaaaatggttcaaaaagcccggaaaatcaagtttttccgggcttttgctatatctaaacgggctgatatggtttgaccaaatttggcaaaacgagagccgatttcatccaatttttagtggtccgcaagtggttaactggccaaaaaga

SEQ ID NO: 11494 - DNA, 27745 bp, Unknown
  gut microbiota DNA sequence
aagttctttttctttctgagagtaatctgccatgtgcctcacccacttcatccatgataatttttatttcaatattatattttatttcctaataaaatgcaactttgtattttctcatctgttttccatctatctgcaccgtttcacagtaatgaaagcccagcttttgcgccagatgctccgatactacgttcccctcctcgatcagacaactgaccgacggcagcatgagttcctcctttacataggtaagaatcgcactgcatacctccgtcgcatagccctgtctctgccacggcacaccgatcgcataaccgagctccagctctccgcccagctcctcccggtgttccacgccggcacgcccgatcagctttccggtgttcctgtcgcacacgatccacatgccgtatccgtagaaccggtacatctgctcgatgtacgcctgctgatattcccgctcctcctcatacggatacagtggctccatataatccgtcattcccttcccggcatacagttcaaacagtgcatctaagtattccatggagaattccttcacgatgcagcgcggcgtttttaagatgatccacggaatatgatgatgtctctcataaacgtgctgtaaaaaagatccgtcgatctcctccatcccttccgcatacatatccgccggaggcgtcacttccatctccccggcggctgcctcgtttctctgcgtccttccatctcccggcatcagatagcaaagcacagccatcccgatccgctgtgcctcgtttagttccttcgcatctcccgaaactaaaattgccttttccgcaaacaccttttccgctaacctctcttttgcaagcgccccttccacacgcttctcttcctgaatgtgtttcttcgcgctgtcccattccaaaacgttccgcccacattcccgctctgttctcagattctccagcagcatgtcacgctctgtctttggcagctttccaattaaaatatattctaactttaacattcttcctcttcccagaaaatttcatccagtgttttgtccagctccctgcatatcgcaatgcacagccggattgtgggattataatctcccttctcgatggcattgatcgtctgtctcgacactcccaccttctcggcgagcgcctgctgggacagatcctttgccgcgcgcgccgcttttaacctgagatttttcattcagctttttcctccgacagatcccgcttctcccggcttctttttatgagaaaaacaatttcaaagacaacgaacatcactgcaaataccagattcaccgcgccaaatcctagttttccgtccgcaaacaggactccgatccgctggttattttccgcgattccaaaattgcacagtgccagcactccaaacagcagatgaacgctccacggcttctggttcaggttcatataagcatcgttccagatgcaatacacaccgaataccagcagtgccagcgcaattccaagataatttcccatcgtatagtcgcaccatgacggcgcctccttactgtacaatgccccgtataacaattcataaaacagcagtgtcagaaaactgtaccggcatgcacggtcgcgcgtctgatactgccgctcatcatagtcagtctccctgcgtccccgtttcttcacccagcagataattcctaccgctgccacccctgccacaatcccaagcagatacgccacattttctttcatcttccaatcctcctgtttcatttcctgtcacacagtcctgatagtttctgatttcttcttttatggtagcatctgctttacaatatgtcaaatatatattacattcctccccatgcatccgtaatcccgtcatgcatccactgattctgttcctccgcataatcctgtaccagaagatactgatactggctgacggtttttaatgcgtcatacacgtagcgcagcggaatccaggagcggttgccgtccggatccgccggatccccgaggaacacctgatctgacgacgcatcgtaaaggctgatcgacacataatgccctcccgtcttcttccagtaggtatcatcgtccctgctggaaaccagaaccaccgccatctgtgacgccgtgatctcctgctggaactgctcatagctttccggttttgtgttcagggtacagtcaaaaccgctttttcgcaatgtaactttcatatccgcccagccgattgccccgatcttccgcgatggtgcatagccggacacctgcctcgcatattcgtacatgtcccacggagaacatgtatactccgtaagcgtgcagtagatatttgccatacagcacagaccgcatccgaaattgccgaagtaattgcctctgacatactggttcgaccactcccccgaccatgcccgtccctctgtccaggacttcggtccctgtaaaaatgtgtagacgccctgttccggatgtgccgcctcctccgctgcacgctctgctgctttcgcaagaatctcctggttgtccgacaaaattgccatctcattcgcgcgaaattctgcaagaattcctgcatatagtggtgtctgcacccgaccatcagttcccgtctcctcatatttctgcccgccatggcgcattttccactcagatccgtcatttttcccagagacagccgcactgcaaaataacgccacgcataatatcagtgcaatcattccctgcacaagttccttttgtttattcttgattatatttttcatattcatttgcaacttttccttcaaaatagcattcctgaatctacctaatgttaccctcttcctgcctgcagggcaagactttttcggaaattccatcgtttctctttacgaatccgctctttttcgctacaatagtgccgtagaggcggcggatgactgctgtcacagcaggctgcttcttatttcacccgcccgcatacagggcagaaagaggtatactatgtcaaacccaatcgttactatcgagatggaaaatggcgatatcatgaaggcagagctctatcctgagatcgcacctaatacggtaaacaattttatcagcctgatccagaaaggctactacgacggactgatcttccaccgcgtcatcaacggctttatgattcagggcggctgtccggacggaaccggcatgggcggcccgggctacgatatcaagggcgaattttcccagaacggtttcaaaaatgacttaaagcacacagagggcgttctttccatggcaagagccatgcatccggattccgccggaagccagttcttcatcatgcataagacttccccgcatctggacggcgcatacgctgcattcggcaagatcactgagggcatggacgtagtcaacaagatcgcagagactgcaaccgactatagcgaccgcccgctcgctccgcaggtcatgaaaaaagtgactgtcgaaacgttcggtgtggagtatccggaaccagagaagtgctaatgcaattctccgaaatgctatgcaggatttctaaccagcatttttgcatctgcgatgatccgtgtctttccaagtttggagcactccacggtgggtcatgtccgcactccgtgagacaatttgtaggacttttgtgcagcacttacctgtgctcccgaaaaaacataaccgcgcgaagcagatgtctgagctgctatctgctgtaatttcaatagcagatagcagcgagttctgttcgcgcggtttaataatgtctatgagggagcacagttagtgctgccagaaagtccacccattgtctccggtgtgtcggacatgcacccaccaggtgtccaaacgtggaagagacacggaatcagatgcaaaatctgtctggaagaaatccacacatttttctccaccgaatggttcaggcttattttcattccagaacctgtcagtgcttttacctccatataataacacttactccagcacggtctgccctatccggcagaccgttttttgtgcatatttattttaccggaatcagcttctccttgcctccgacatacggacgcagtgctaccggaacattgacgcttccgtctgcgttgaggttgttctctaagaacgcgatcagcattctaggcggcgcaaccaccgtgttattcaaggtatgtgcaaaatacttgctgccatccttgcccttcacacggatctttaatcttctcgcctgtgcatcgccgaggtttgagcagcttccaacctcgaaatacttcttctgtctcggagaccatgcctcaacatcgcaggacttcactttcagatctgccagatcgccggaacagcactccagggtacgaaccgggatatccagacttctgaacaggtcaaccgtgttctgccacagtttatcgtaccacatcttggactcttccggcttgcagactacgatcatctcctgcttctcaaactggtgaatacgataaacaccgcgctcctcgatgccgtgtgcgcctttctccttgcggaagcatggagagtaggatgtcagtgtatatggcagcttctcctcatcgttgattgtatcgatgaacttaccgatcatggaatgctcggaggtaccaatcagataaaggtcctcgccctcgatcttgtacatcatggcatccatctcatcaaaactcataacgcccgtcacaacattgctgcggatcataaacggcggcaccacgtaggtaaaaccgcggtcgatcatgaaatctctcgcgtaggagagcactgcggagtgtacacgcgcaatatcgcccatcagataataaaatccgtttcctgccaccttgcctgcagcatccagatcaatgccgttaaaacgctccatgatctcggtgtgatacgggatctcaaaatccggaacaaccggctcgccaaacttctcgatctccacattgcaggaatcatccttgccgatcggtacggacggatcaatgatgttcgggatcgtcatcatgatcttggtgactttctcctgaagttccttttctttttcctctaattctgccagacgggcagctccctctgcaacctgtgtcttgacagcctcagcctcgtcctttttgccctgacccatcagtttaccgatctctttggacagctggtttctctttgctcgaagatcgtctgcttcctgctgtgtcttgcgcgcctcggcatcgagttcaattacctcgtccacaagcggaagcttgtgatcctggaatttgttcttaatgttctgctttacaacctccgggttctctctcaaaaacttcagatcgatcatgtcatttcctcctaaattcttctgttctatccgcacaggaacaaaaaaaacctttcgcccctgtgtcaaatgtccccgccatctctgaccgggcaccacttgcacatgggacgaaaggttctgcttccgcgttgccacccatcttgccacaggcatgttcctgcgacctctcaaacgtatgttaaaggatacgaccctcgcagctttcactgccggctccaaaagtggaaagattctatcctgcaccggttcgcaccacccaccggctctctgtcgcagtcttcaaaccgcagctttcttcatcgccaattcttccgctattatataatgattatccgcaaaatgcaaggttaatatgcagattcgcccgatccgcgcccagtccgcatcgaatcccctgtattttccgcactttgtcctttatctattgcgcggcgtcctccgcaatccacgctgccagcgtcttcgcgcgctgtgcccaggtatgcttctgctccacaatcgctctgccgcgccgcacaatctcattcctcccggaatcattttgcaataaatccttcactttttccggaagagcgtccatatcctgcagtgcaacatagcagaccccctcaccctcatgaagttcctcttccagatagcggctcgggtcggtcacacataccgctccatttaagatggaattaaacactctgtcatgcgctccgtccttaaaccacggcatcacattcaaagacaccttcgcatccgccagcatcccaaggcaggtaacggaatccgtctgcggatgcagctttaagcactccggatgtctcacatcctccagttcctcccagccttttccgaccacatgtaccggaattcccgcattgacgagcgtgcgcaccgcctttccccgccagtaattgcgcacatacagatcaatgaaaatcatcttatgcagggcaatccgcagctgatcattgggctctttccccatctcccgctcgcagtgggcaagcgccacttcctccaccgtgcacgccggatgttctaacagatcatctatgatcccccggtaaaatgccgcgtactcctcattgatccagttgatatagggttcaaaaaaggaaagctttgtgtaatttccggtcaggatcacgtcatagcaggacgccgcctgttctgctgcgccctgcgctccagtttctcccgtctcaactgcggcgccctgcgctcgcgcttttccctgctcagcttcgccttcctcttctgcctgccgcaatccggttcccgcaagcggcagaaagccacgcgacacatactccggataaaactcttcaaaatatgccttctgtctccggtctatactgatatgccggtatttttccggcagatcttttaacctgtcatcataaaagtacggatggtcggcggcaatattataacagggaatatgataggtatcccagagataaccgatcccctcgcggtacacgccggcctccttttccagtccctggaaattgaaggtaacaagcaccgtctctcgcggtctgataaacttgcgcagctttcccgcgctgctctcctcctgtttcagatcatagaaaaatactgcatatccgagcatttgaaactcttgtgccatctgatgggagaaataggataatgtctccactccgccctccatcatgacaattctttttatcatgccggctcctttctgtccgcagcgctgtcattattttttgcttactcatgccgcagcgcatcgatcggatttaaattcgccgccttgtaggacgggaacacaccgaatacgattccgataaccatggaaaacgccaccgctcccacggctgccggaacactgatcgccaccggcgtcgtcgtcacatacgagatcacctgcgccagaataatgccgaccagcacgccgatgagaccgcccaggctggtgagcaccgccgcctccgtcagaaactgtcccaggatccgggacttgcgtgccccgatcgcctttttcagaccgatctcctgcgtccgctccgtcaccgataccagcatgatgttcatgacgccgataccgccgacaatcaatgaaatgccggcaatccagatcagcatggtgttggtggagctgctaagttcctgaatctgctgtgcctgctccatcagatcttttgccttatactggatcgtcgtatccgacaccgacagatacccgtttagcagatccgctcccgcttttccggcgctggtcatatcatccgtactctccacgcgcagcaccacattctgcggctcgtcgtactgatagatgatcggccaggtcgtcgccggcacatacacagagccggcggaatcctgcgcgtaggtataatagtcatcaattgagttgatgaccggttcaaactttttcgcctttgtcacaattcccaccacaacatacggctcctgctgaatctcaatcgtctccccgacagcttcctctccctggaacagtgcgtccgccgaatcctcatccagaatcgcgaccttgtgatactggtcaaaatcctgctgcgtgaacccgcgcccttccttcataatataattgcaggtgtcaaaataagccgtgtcaacgcccttgacataaccaccggaaagcccggtattcagatgatagactccgttgtaatcctgccggctcagatagcgcgacacattttccacatgcgggatctccttgagctgttcaaccacctcatccgccacaagcggcacgccctccggtatgccgttgtactccatctcatattcccactctccctgatacagggaaatctcgacggtattctcaccggctccgaccaggttctgcttgatctgttcatttgttcccttaattgtagatacaatcgcaataatagctgcaataccgataataattcccagcatcgtcaggaaggaacgcatcttgtgagcccagattccgcggaaagataatcttatattttcaaacatctccgttcctcctttaataattggatgattcgtccgtgacggcagcgccctccaccgcatttttcccgtacgggaatgcgatgcggtcgtcctccgtcagacccgacttgatctctaccgcagatccgtacaccgttcttccggtcaccacatactgttttttcagccggttattctcatctgcaatcatacagtacgcctttccatcctccgacctcacatacgctttttctataaaaatgccgccgccatcggactgattggtcgatatggacagatctaccgcctccccgttgcggagcgcggaactgtcctcgatataagccgtgtactcataataggagacattgggatttccatcgccccacgagttgcccgaaaccggataatccgatatttccgtgattgtggcatcaaacgtcatgccgctctcccaggaattggcagtcaccacggttcccatcttcacatcatccaaaagcagctcgctgatcgtcccctttacatagagcccgtcatctccggttatcaccagaaacgcctgcccctgctcgggcttctcgtccggatcaccgagcgtcttgacgacaccgtccacctccgcgtagaccacaccgtccgtcgcacttttctccatggactcgagcgccagctgttcctgtctgcgctgaatatcgagcgtctttaatttttcttcaatctcggcagcctcctgatagagttcctcggaagtatatccctttggcacctcccagtccgccataaaatcctcgtaggcctgcatgtactcatccgcaagggaggtcggtatgtattcttttcccgaaaacagataccacatgcggctctcatcgtaatccgccggaaaatcgctgccgtttaactcgacggtattcggggacactgtatcatccgcaaccggcgtctgccgcccggtcgcttcatcggtgtcaagcaccatcttaccgtccgcatccttcttgcagacgatcacgcgcacatgttttccgctgcctccctccgcggtaggacggatggcattgaaaaagccgccgtaggcgtatgcattctggttgacataataaatatacggttcttccgctgttcctgccggatacaccagttcccccgccgcattggttgtcacgttgtagggaatggaggccgccgtcagatagttgtagattctgctgtcgttcttatctgtctctgtcaggcggttttcctcgtccatgtgctgataccaggcaagctgctcctcgttcagcttcggcggatctttcttcaccggtgtctgtgtctttaacatctcatacttgtatttttgtctctcgatgttattctcgatcgtactgatatcgagttttttgcgttcaatctctatctggagttccgccgtgtcataggcgagcagcgggtctcccttttgcacctcatcccccttctccacatagacctccttgatcattctggaatcatccagatagatctcctgtgaggaatcgttcgtgacggtgccgtaacttgtctccgtgtctccccagtatccccagttgaggttggaaaccggctgcacttccgcgacaagctttttgtcctggtaggacttatacccgtatacgcctcccactgcagccgagagggtgaccgcaatacctgcgatgaccgcaatcactttcttaatcttcatgataccgctccgtccccctctccctcatagatctcaccgtcgatgatccggacaatccgcttggctttcgccgcaatcctgggatcatgcgtaatcatgacgatggtaacgccctcttcgttcaggctgtcaaaaagctccatgatctgctcgccggatttggagtccagagctcctgtcggctcatctgccagcagaatcttaggatggttgaccatcgcgcgggcgatggcgacacgctgcttctgtccgccggaaagctgtgtcggtctgaaattgacacgatccccgagtcccactctctcgagcgctttcgtcgcgcggatccgcctctcctttttgcgcactccggcgtagctgagcggaagcgccacattttccacggcgctctcccgcggcatcagctgaaaactctggaacacgaacccgatgctctttaagcggagatccgagagttccctgtcttttaatttgagcacgttctcccccgccagctcgtaagtaccgctcgtcggtcggtcgagacacccgataatattcatcagcgtggtcttaccggaaccggacggtcccataatggcgacatactccccttcctcgaccgtcagcgatacatcctttaacaccggcacaaccagcttctcctgctgatagtctttgtagatattctgcagattcagtatcattctgccacctccgcctctgtcccttctccggcatccataccgtcatacatttcatccggcagttctgtatcatagacgctgtccaacacatcatagagcagttccgtgtcatagacaccctctgtatcgtacagattctcgtccaccggctgattgtaaagcggagaagaataatccacttccgcctcgtcggtcacggtcgtcacaccctcatagagaccagccatcggccaggcaatgtaatcgtcctctgcaagccctgatacgatctcatactcatccatatccgcatcgtactctcccagctcgatgtagcgcttctccagacggtttttctcattagccgcccacacatacggggtatcttcgtcctgcacgatgtaggagccgtacagccacagaccttccttcacttcctcctgtccctgatccagctcgatgtacacatgctgccccaggatcagtccgtccaccgagtcgagatccacatagaacggatacttggacgctgactgtgtatctcccgccgaagaagtgctgtaatagctgttatcgttcccctgctgcgggctctccgtgtcaattttcccgatcgttccgctccacgtcttcgtgccgtccacacgcgagcggatcacaacctcctgtccctcggaaagcatccagacattctgctcatcgatgcttcccttgatccggtactctccagtctgtaagatcgtcataaacggcgcgctgttcccgttgctatccacgcctttctcattgatctccttgaccactcccgccaccttgctcacaacggaagaactgctgacctgtttctgctccttggagatctcaagcttcttgctctccatatcgaactgcttctgtgcgatggagttctggatattctgaatctgcgtggtgtaatcgtagcgttccgattcgtccaccttctccatctctttcgtcagtgtgtcgatctgtttgttgtaattatctatctcattctggatgccttccagctccagcttcgcctgctcaatcttcatggtaaggtcactggtgtcgtaagtgaccagagtctgtccctcctcgacctcatcgccgacctccaccttgatctcgctgatcgtccgggaagaatccacattcacctcgtatgaatcctgcgtctccaccacaccgttataccggttggaaacacctgcatactgattcataatgcgggataccttttccacatagactttgtcctctgaacttccatcatcaaagatcggtatcatctgcctgatatcatcccggaaataataaccggttcctcccagaacagcagccactgctgccacaccgatcagaattccaacgctctttttgcccatagctcctcctctgccccagacgggttactttcttttctttattctatcatcttttcagacccgatacatagcgtttaattcttaataatttttgtagaatagaacattaaaaaagcctccgcgcatattgaacactcacaatatgcacggaagcctagtctacacactttgaaagattttattttaacggatactttgcggtgagctccgccacaatcgctctggcgcgatctgctgccggctctccctccttgatcatcatggcaatcgcctccgcaatctgatccatatccccggtattgaatccgcgggatgtcaccgccggcgtaccgagacgcacaccactcgtcacgaacggagacttcggatcgttcggaatcgtatttttattgcaggtgatatttacggaatccagaagcttctccaccgcttttccggtctggtcaaaattcgtcagatcgacaagcatcaggtgattgtcggtgcctcccgatacgatcctgatgccgcggttcatcagtcctttgcacagcgcctgcgcattgtcgatgatgttctgctggtacaccttgaactccggctgcagtgcttccttgaagcagactgccttcgccgcgatcacatgcatcagcggacctccctggattcccgggaagattgccttgttaaagttgtacttgtctgccgcttcctgattgcagagaatcattccgccgcgcggtccgcgcagagtcttgtgcgtggtcgttgtcacgacatccgcatacgggatcgggcttggatgaaatcccgccgcaaccagaccagcaatgtgcgccatgtcaaccatgagcacggcaccgcaggcgtccgcgatctcacggaatttcttaaagtcgatcgtgcgcgcgtaggcactggcacctgcaataatcatcttcggcttgcactcgagggcaatctccatcaccttgtcgtaatcgatgaatccctcgtcgttcacaccgtacggtacgatatgaaaataggttccggaaaaattgaccggtgaaccgtgcgtaagatgtccgccgtgatccagattcatccccatcacggtgtcgcccggctttaaaaccgcgaactgcactgccatattcgcctgtgctccggaatgcggctgcacattgacataatcacagccgaagagcttcttcgcgcgctctcgcgccagctcctccacgacatccacgcagtcacatccgccgtaatagcgcttccccggatacccttccgcatatttattggtcaaaacgcttcccatcgcagacatcaccgccgggcttacccagttctccgacgcaatcagctcgatatggctgttctgtctgtcaaactcatcctttattgcctgcgcgatttccacatccaccgcttcaatatcttccattgtatacatcgtatgtattctcccttcctgaaccaccgcactgtctttctacgaaaaacacttgtctttctacggctatgctactcattataaatgactttgtatctttattcaatcagaaaacacataccgtctataacaatttgttataaaacatataagcgcaccagataaatcgcaagtgccgcctggcaaaccagaatgagcggcattccggccacaaaataccagtgctttgtcttgtggcggaacaaatacattcctgcccaggttcccgcgcttcccccgagcaggctcacaccaaagagcaccttctccggaatccgccaccggtgcagtcttgcgcgcttcttatccgaccacatgaccgccacaccgatcacattcataaccgccaaatagattgcaaacaacttcatcccatccatctcatttctcctcaatgaccgttttcatgtcactccgcaaactgaacatccagatctaccgctctcttaattccatccacacttccctcttcactgtactgccagaaggtaaatatggcagggtcaatctctgcgccataccattatacacgctatcgtacgtttcttcatgcctgcttcccgttattttcctttttcctgcagggaaataaaaagggctgcaaatacatctttggtcaatgtattgcagccccttactatttattttatttcttgatcagtctgttcttgccaagatgcagtctcatgatgtaccacagctccgttgcaatacagatagaagaatatgctccgcagagcagacctgccatcaacggaagtgcgaactcacggatacttgcaacaccgagtaagaacagcatgaataccatgataaaggttgtcagagacgtattgatacttcgtgaaagtgtctgtgtcaaactcttgttggcaacctccgccagaagctccggcgtctgctttgcagctgtcctgcccaggttctcacggatacggtcaaagataacgatcgtatcattgacagagtaaccgatgatcgtcagcatacatgcgataaaggtatttccgacggaaatacgaagcagtgaataaaccgccagcactaccagcacatcgtgcagcagcgcaataatcgcacttgcaccaaaacggatatccttgaaccggaaccagatgtagatcagcatgcagatcgaagctacgatcacggcaacgatggcatcggaacgcatctcattgctgacagtggagctgatactctgtgatgtaatggaagattcatccgctccaagctgatccaccagtgcctgctccagcgtatctctctcatccagcgtcagggtacgcgtctttaccgtaatctgtgtcgtaccttccactttgttcgccatgatgtcattgtcgccgatcacatctgcaaccaccggaacgatggtattctcaatctcttcaatcgtgtaatccttaccataatctgcagtggtggaagtacctcccacaaaatccagaccatagttcaacgctccgcttcccttgaccgcatgaacgcccattccgataaatcccgctgcaatcattgccagagaaaccgcaaagaatacgcctctctttccaaggaagttcagcgtcctgcgctcttttgcacgaccatagaacttctcgtcacggataccgatggcatagaaggaatacaggatccatcttgtcacgacaagcgctgtgaacatggaaagtacaataccaatcatcagagtgtatgcaaatcccttgactgtaccggaacccagcgcaatcagtaccagcgccgcgatgatcgttgtgatgttaccgtcaaggatggctgacattgccttcttaaaaccgatcttcattgaagaattgactgtcttgcccgtcgcaatctcctcacggatacgcgcgaagataatgacgttcgcatcgaccgccataccgatacttaggatgatacccgcaatacccggcagtgtcagtgtaatctcaaataagtacaatgtagcaattaccagacaggtatagattgccagcgcgatggctgccgccagacccggaatctgatacatcacaatcatgaagatcatgacgatcactaaaccgatggctgctgcctttaagctggaagagattgcctggcttcccagctgtgctcctacaacgctggattccagctcctgcagctttaaggaaagagaaccgatacggatctgtgttgccagtgtctcggcatcctcataggtcttcatgccggaaatctgtgcggtaccgccggtgatggcttcctttacctgcggatagctgatcgtctcgccgtcatacacgatcggcagataattgccgacattgtctgtggtggcatccgcaaacagctttgctccgtcgtctgtgagctttaactgtaccacatactgcttgttgccgtagctgtctgttgtggttcccgcctgcgcatccgcaacctggtcacccgtcatgtaaactgttccatccggaagctggaactccagggaacccggattaccgagatcctccagaatcgcattggcatccgatacgcccggaatctcaaccgtaatacggtcatctcccacctggtagacagacgcctccgtgctgtagccctctacacgcttctgtagcttgtagatcgtatcgctcatatcctccgcacttgggttgtcatccacaacctgataggtaatggagacaccgccggatagatccagaccaagcggaatgctcatctcttccccgattcccgtcgaagaaagaatgatggatgcataataagcaagtcccgccagtgcgccaaggatcacgatcaaaataacaatcgctttactcttcttcattcttttgttcctcctctgcagcttttatcataatcgcacattcgatgcgctttttctgaagctcacatccgatgtcatatgctccgcagatgtcgccgctgaaattgtaggcattcgccgcgcagccgccgctgcagtagaatctcgcgaaacacttgcggcatttctccttcgcatagacattgcagcatttaaactcgtcgcgaatgtctgtatttaagatgcccgcatcgacatttccgagaaggaacttttcatttccgacaaactgatgacacggatagaaatcgccccacggggtgaccgccagatactcggttcccgaaccgcagccggaaagacgcttcgccacacacggaccgccctcaagatcgatcataaagtggaagaaattaaaatcttctccgctcttatgacgtctgatcatctcaactgccagcttgtcatactcctcgaagagcttcggcagatcctcctcccggattgcgtacggctccttcggctccgccacaaccggctccaccgaaatctgcttgaatccgagatctgcaagatgcagcacatcctccgaaaaatcaagattataatgtgtaaaggttcctctcacataatacttatcctgatgtctgctctccgcgaactgctggaacttcggcacgatcagatcatagcttcccgcacccttgcggaacggccgcatcttatcgtgaacttccttccgtccgtcaatacttaaaacgacattgcccatctcgcggttacagaattccataacctcatcatttaaaagcacaccgtttgttgtcagcgtaaaccgaaacttcttgtcgtgaagcttctcctgctctctgccgtatgccacaagatccttgaccacctgccagttcataagcggttccccgccaaagaaatccacctccaggttgcgtctgttgccggaattggcaatcagaaaatcaagtgccttcttcccgacttcaaaggacataagagcccttcttccgtggtactcaccctcctcggcaaagcaatactgacaggcaaggttgcagtcatgcgcaatatgtaggcacagagccttcacgaccgtcgggcgctttttgaaatccatgatatagttctcgtaggtatccttcgtaaaaagctcctcattgtcgaccagcatctgcacctcatcaagtgcctcttccacttcagtctccggatagcgctcccgcagagaattcacaatctcttctcttgtatgtccttcatacagggcaatgacatcgtatgttacgtcatccaccacatgaatcgcgccgctgtttacatccagaacaatatcatagccgttgttcttatactgatgaaccactataatatttcctctctttctaattctgactattataacgtacaaatgaccgcacgcttcgcgaacggtcgtctgtaggtaatgctattcacttatgcccgtgaaaaattatctgttctcacagctctggtttcctacggtgcaggatgtcttacatgcagactgacatgatgtctggcactcgccgcatccgcccttcttgatggtgttctgtaactttctggtatttaatgtcttaacgtgcttcataataatctctcctttatatcttacaataaaattctattaacccgtatagtatagcacatgaccgtttagatgaaaagcccttttttgctgaactttcgccccgcagagcggcttttcagcttaacattcctcccgccatgccggatgccccgcagaggatcagcgtcgtaaaaatgcgcgtcatctgaagatcacccgtaccctttacgagcagcgacacaccaaacagcagcagaaaatagatgactcccgccgccagtccccacaaaaacttctgttcccgcatccgttttcccatcagaaaacctccgcaaagcccggaaatcacatagaccgccacaattccgatcttaatgacggattctcccggctccatcttgtataagagaagtgccagaagaagcagcagaagaccgcttataaggaacatcacaaacacggctgcaaggatggctgtcgtcgggttgctttttgcatctctcggttttattctgtatcccagcttcatagatagacctgcctgattctttctatcctatctatatgccggttcgcatgcggctatgcaaacacgattgcgtactctgcatcaaaactgcctccggctgcaagcgcattctcgtacgggcgctccgccaggcttccctcaaagtcaaccgcatcgcatcttccataccacggctcaatgcacaggaacggtgctttctttccttccggagaccacagagcaaacagcggcgcatcaaagcgtaccgtcacataggcttcgccgtcgcggtccaggattgacacctctcccgtctgcgctccctccaccatgtaggtgcacttgtcaaagaatccgggcgtaatcacagcctctccatcctccagttccagctcctcatccgtcatgactgccatgccgtccggcgtgttgccgtgatgatgcagcttgtcggtgagatctccgaaccggagacgatagcccgtcttatcctgttccccgttgatcgggcacaaaaatgccggatgtgcgccgatggaaaaatacatcggcttctcatcggtgttgtccaccttccagtgaacggagacttcattttcatccagcgtgtatccaatgtgcagccggaaccggaacggatatttcgcataggtctcctctgtggatgagagcacaaaccagatgctctttccctcctgtgcctccagatcaaactccatatcacgcgcgaatccgtgctgtcccatcgggtaggttctgccctcataccggtattccttgttcttcggcgcgccgacaaacgggaagagcaccggcgaagttctgccccagtatttcgggtctccgcaccacatatattccctgccgtccgccttgcgtttcacagatttgatctccgcgccgaacgattcgatctcgacccgcagcgtgtcattttccaagatatatctcatgcttcacctcagtcttcccacttacagttcacagttgttgaccgttctcgggaacggaatgacgtcacggatgttggacataccggtcagatacatcacgcagcgctcgaatccgagtccgaatcccgcatgtcttgcggaaccgtactttctgagatcgagatagaactcataatcctcctcgtgaagtcccagctcgttgatacgtgccagaagcttgtcgtagtcgtcctctctctggcttccgccgatgatctctccgattcccggaaccagacagtcgactgccgctaccgtcttgccgtcctcgttcatcttcatgtaaaatgccttgatctccttcggatagtccgtcacaaataccggacgcttgtagatctcctctgtcagatagcgttcatgctccgtctgaagatccgcgccccaggataccttgtactcaaacttgtcgttgtgcttctctaagatctcgattgcctccgtgtaggtcacacgtgcgaaatcggaattcactacattgttcaggcggtcaaggagtcccttgtcgataaagttattgaagaatgccatctcctccggcgcattctcaagcacatagcggatgatatatttgagcatgctctccgcaaggatcatatcgtcctcaagatctgcaaatgcgatctccggctcgatcatccagaactccgccgcatgtctggtcgtgttggaattctccgcgcggaatgtcggtccgaacgtatagatgttcttaaacgccatcgcatatgtctcgccgtttaactgtccgctgacggtcagattcgtcggcttattgaaaaagtccttggtatagtccacggttccgtccgggttcttcggcacattggcaagatccatcgtcgtcacctggaacatctcgcctgcaccctcgcagtcacttcctgtaatgagcggtgtatgcacatagacgaaatctctctcctggaagaacttgtggatcgcgtaggcaatcagggaacgcacacggaacaccgcctcaaaggtgttggtgcgcggtctcaaatgagagatcgttctcaaatactcaaagctgtgcttcttcttctgcagcggataatccggtgtggaagctccctccacatcaatcttctccgcctgaatctcgaacggctgcttcatctccggggttgcgacaagcttacctgtcacaatgattgccgcgccgacgtttaacttctccacttcctcaaagttctccagcacattggaaaataccacctgcaccggctcaaagaacgtaccgtcattgacaacgataaagccgaaattcttggaattacgaagacttctgacccatccgccgatggtcactgtcgtatccagatactcatccttgctgcgaaataaatcccttatatttaccagatccatacattcctccatccgcaacagacgggtgcgccactctgccgcatcccgtctgccactctctatctcttttctattatcttatctgcattgccgcaaaaaatcaatgcttattcctaattggctgcgccggtcttctccgtgccttctgctgcctcatacgtcgtagatgcgtttgttgcactgcccgcctctgttgcatccgcagcatcttctgtcaccgcgtcactctctgtgtccgcagacggatcaatggtcacaaccgccgtctcaagcagctgatccagcgcctggtcgtagcggtagagatctgcgaaatagcgcttgccatagtcggtatctccaaaaccgtagatattatacatcgcctccacagactcgtatccgttctggcttaccagctgctctgcataggtatcaatatcgtcctggttcacttcaacgccgagttcatctgcgatcgcatccataatgaattcaagacggatactcttctccattccctcattccagtatgcttccatctcctcaacggtctttccgtagtaggtgctcacataatcggcaagctggctctcgtctccgttgcagttctgctcaatgtactgtcttctgtaatcatccacacgcgcagtaagataatcctccggcacttccgcctcacaattatctataagataattctgcacggcagtcgtagtgtctttctgcttattatactcggcactgctctccatgtagctgcggatctgatcgtacatctcgtccaccgtatccacctggaactgctccttggcaaatgtgtcatccacatcatcgatcgtcatttccttctgaatggagttgaccgtaaatgtaaagactactgcttttcctgccagatccgtgttgccataatcatccggaaatgtcacgtcacagtcgatcacatctccgacagaagcgccctttaagccgtccgtaaatccgtcgatgtagcctgttcctgtggcagatgcgttctggtacacatcaatgttctgattctcggcggtacctccgctaaacgctgttccgtcaagcttgccaacgtaatccacattgacaatgtctccctcctcgaccgttgtcttgtccggatctgccgtatagaacggaccatagttgtcaaacatctgcttgaaatagtcctttactttctggtcatccacgtcataatccccggtgatcgtcaccggaatggcactgtaatcacagagtgttacataatcgctccccctgaggtcaaacgcgctgctcgcacacggagtgctcgtgatcgtgccggaagctgcactgtccgcaatatcctcggtcgacgctgcactctctgtcgcctctgtcgcctgatccgtctcctttgctccgcatcctgccgcaccaaatgccatcatagcgcagagcatcagtgctactgttctcttcttcatatacaaataccctttctattccctcttttggcgaattctgtttcgccaacactaaccttagtatcgtaccacatttccctcaaaaaaggaagcagacaagccaaactttcacaaatgtttcaaatacaagattgcttttttgccgaatcaatgctacaattaaatgcagtttgattgtaggaggattttaccatgagtaccgtaaccattgtattgctggttattcttgccgtcctcattgtcggcttgatcgtattatattttctcggcaaaaaggcacagaaaaagagagacgagcaggaggcacagcttgcagccaacgcgcagaccgtctccatgctgatcatcgataaaaagcgattgcgcctgaaagattcgggacttccgcaggttgtcatcgaccagaccccgaagatgatgcgccgttccaagcttccgatcgtaaaggcaaaggttggtccgaaagtgatgtcactgatcgcagacgaagccgtctatgatctgattccgctgaagaaagaagtcaaagcgaccgtgagcggcatctatatcacgaaagtaaccggcgtcagagggcctcttgagaagccgcagggcaagaagagcttccgtgcgaggatgcaggaaaaagccaaaaaagccaacgcagagctggaaagggaaaaggcagaacttgccaaagagaaggcagcaaagaagaagaaaaaataagcagctatttaaaatgcagggaatttcagattttgaaatcccctgcattttttgattgaatattcatggtaatcttgcagtccgccatgtgctcataattcacttccagcgcataatccacttttacggacagattgtgttccgtctcctccacctgcactttcgtggcgtcaattccgatcagcagattcccgtacggcgtataataataggtgacatttttcttgtccttttcaaacatcatatgtacattcgtctcaccacgcttcgtgatatcaagtacctcatccccgagcttgatgatatttttggtggtacccgccgtatcctccgccacctcgtcatacagaatataatgcctaccgttcttcttataataggaaccggaggtaatcacctctaccggttcactgttttctcccccagcaaactgaagaccgctgatggagatcaatacatcttttgtcatcgttacactcccttttatctcaactcatattaccggcttttggcggaataatcaagcctattctttcaggtcgtccaaaaatgtcagatagcggcagcgcaccttataatttccctcctcaagcaccgcccggtattcctccttggacaacacttttttcagttcctccccggcgctctcatccacgacttcatacatacttccctcaaagcacatattcgggtacatgacgcaccaccagttatgaccttcgccctctccgatcacaacccgcagcgcctcatatttccccgccgggaaggtgaattttccatatgttttggacggaaattccgtctcctctatcgcggcatgcacctcgtactcatatccggcttcccgcaccaccgcctgcgccgtctccgcaatctcgggcaggtgcgcctccaccacctgctcgcacgcctctctgtccgggacatccgaaagcagctctgccatccggcttcccacggcatcacgcaccgcaagctttaaattctgatcctccgcggtatcgctgttggcaagcacatggaaccgcagcaccttcccagcaatctgctcctgtattctctgatttttcacatactgcatttccaggagggcaagcagcatcacattcattcccaacaacaagtaccagatccatttacgtctttgcataacggcattttcttcctttcctctgctgcaaaagacgattcccgttttgataccgttttattcactttatgataaatgaatccagtttatttttacctgatagacaatcgcaacctcttcctcgtagttctccccgcgcttctgatactcctcataccagccccgcgccgcgcctccgagcttgcggtaactgcctgtaagatccacctgccgcttccgctgcacatttgccgccatccggttcatatagtcttccgccaaaagtgcaagctcctttttgttctcctttccgccggttccctgcacgcttccgctgcagtgaatcgtcaccaggacttcccgcacgccatccttttccgagaacgtgatctcatttgtggcatccgacagcagtaacattccctcctccaacggtaaaccgtactccctcatgcggttttgtgtaaaaaaagcgagtctcgctgcctccgcgtcaaccatgcctgccggcatcccacgcttccacacataatactgctccaccgccggtttttcgtccttcacggtaacatacggcaaaaacagtgtctcctgtctattgtccatctcctggtacagcgatccgatcgtggggtacgcctgctttttgatctgggacacattctcaaactgttcctccagataatccccgaccgcttctcccagcgtctcactctgcgccagcagtgcttcggcatcctccgcgaccaccacataggcgttgcgcggcacctcgctcttctccttcaaaaacgcgagccactcctgcacggttgcctcatcctccacaaattcctgttccaggatcagaaccttcagatgactgtaatccaccatccggtttcccgcctgctccgcttcataccacgccagcccggcatccttcgtgtccctcaccgcaatctcaatcggaaaatcacgatcctccagctccgcgggggcacagcctgtcatcacaagcaagacaactgcacagatcaccgcaagcgcaagcagcctccttccccattttttctgtgcggcaaagacgggggcaagcaccagaaacggcgtaccgacataccacaagaaccgctcgtaccagtcaaagaccgcccggctccggtaaaaacagatcgctgccacagaagctgccacagccacagatccatagaaaatccacatgtaatttttcccttttggcattttgcgaataggtttccataatttctctgctatgctgcttccgtaaaagacgcagctgtttaaaagtgcgtacagcgtaaagaaccacacgccgaacataaacgcgtctgttcttttcaaaaagccgccggatatttttaccgtgctcatcagcgtgactgccggataatccatccccgcaagcgccggtaccccgaaaattccctccagaaccagatagagcaccgcatggagacatcccacaaataggattgccctctttcccgccgcaaacaatgtttcctgccgctcgacatacgttcccgaaaaaaggaggagaaatgcaaaggaaagattcaaaaacaccccataagctccgcctgccacgccctttaagctgctcattccaagcggtgcccagtaatcggtgcacacttcatccgccgcagcaaagagcatgagaaacagtgggatcaaaagaaaccagaacagcatctcatagactctcgcccgtccctcgattccccccgcaagtccatacagcaccaacagcatgataaccgaaaggaccagataaaacgattctccgcgcagaagatcccggagaataatgtctgcaaacagatacgccacataccctgcaagcagcaccagataaatcagataaccggtctgtacgattcctcccccgatccttcccagctgccgctccatatattccggataagattcctgtgcgggcggcgcaagcctgcgcaatatccatagatacgcgagcgctgccgccatcccgattccgattgacagaatgccgtctctccccgccgtcttcgcaagcatctgcggaacgagaagtgtgccgataccgagcagatcatacgtcatcaagcgatacatctggcgtcccgatatcctgttattttctgaaaacataatccgttccctctctgtcacaatttcatccgcagctttctgcggttatttttcttcgcgtagatcgggcgtttccagagcagccgaagcggctgccgccaaaggaaatcgcgttcatcttcataatcgttcagatctgccgccacatacggcatcaggtacggcacgccaaagctttttaagtgcgacagatggatcagcacggcaagcagccctgccagaaacccgaaaaaaccaagccatgcgcagattccgataaaaaagaacttgagcagccggaatgccgttgcaaactcctcattcggtacggcaaacgaacacagcgccgtaaacgagatcacaatcacgacaatcggactcaccagatttgcctccacggctgcctgcccgatgatcagtccccccacaattccaatcgtattccccatcgctccgggcagccgcactcccgcctcccgcagcagttcaaacgaaagctccatgataatcacctcaatcaccgccggaaacggcacgccgctcctggcgtccgcaaaggacagcaggagcgtggtcggcagaatctgtgtgtggaaattggtgaccgccagatagagtcccggcaatgtcatggcaaaaaaggatgccaggtagcgcaaaaggcgctcaaagcttgcgatctcccagcggttatagtaatcgtcgctcgtcttgataaaggaattgtaatcggtcggcagaatgagcgcgatcggcgaattgtccgacagcacaaccactctgccgtcaaggatggacattgccgcccggtccggccgttccgtcgtctgaaactgtggaaacggggaataccatttttcctccgacagctgttcaatgactccgctgtcgagtaccccgtcaatctcaaatccctccagccgctcctcaatctttgccaccagctccgggtaggcgatcccttccatatagaccagatagacgttggtgttggagcgcacgcccatttttttctcttttaccttgacctgtggcgaccggattctcttgcggatcaacgccgcattctgttttaccgaatccccgaatccctcgttagaaccacgcaccactttttccgagtccgcctcgttgatccccatattcggataaccgtcatccggaatcttgaccgctttcgcaaaaccgtcgacgaaaaagacggcttctccggtcaaaagaccgtcccccgcctcctcgatcgtcgtaaaataggtcgcatcggaggttccgagggcattctgttccaacacccgcagaatctcctcccgctccagaccccttaagtattttaaaacttctaacagcgccgaatttcccatatctaccgagacttcaatgaacgtgaggtagcacgccacgtcccgtttttttccaagattcatccgcttcttcttgatgtcgtcacaggtgtgaaacaattcctccatatgtgcgatgttctcgtcgagtctctcgctgatctttgtcttctccgccacagattttcttcctttcctaaaacaaaaacggggcaggcatccgcctgtccctgttagtgt

SEQ ID NO: 11495 - DNA, 93492 bp, Unknown
  gut microbiota DNA sequence
cctcgatgtcgtggtaatccagtgtgtctgccacacggatatcatccgcataatcgcccagtccggatcccagcacaagtgccaccttcggggtaaaatcgatctttgccttataactttcatagcatttctgtaacttttcatatactagattcattgtcggttctccttttcctttcgatcacaaaattatttatattatataccatgcgctctgaaattccaatctcattcattaaaaaacggtgccattttctctccgacccacgagatgaccggaccgagtgtgaagcccatcaggatcgtcaccagaccgatcttcgcaccgaacacccacgcaatcacgatcaccgtaaaatcaaataccatgcgcaccacgcggaacggtacctttttctgcgccttcacaatcagaaacggaatagcatcgtagggggcagttcccagttccgtaaccatatacacacctgccgcgacgacgaacaccgccagtgccgggaacagcacgccgatgcgcactgccatggaatcaaacagcccgtccggcaatacttttgaccatacccacgagaaaaaatcaatcgaatagccgacgaggaacatattggcaagcgttccgaatccgatgtactcccgtccccacaatatcacgataataaataaaaggcagttgagcagcgcctgccagttgccgagactcatgccgagtctgcccgaaatagcaagattcatgctcgtgcaggggtctgttccaaaattgaccagcaccagccatgacagagcaaatcccatgacgatcaccgcgagaattaccgagatgagtctccttgcaaaatgtttcttctgatacattccctgaataaagtttttcattattttctctccgttctttccgatatatatcatagtaacacaggaacggcttttctgccagagttcccttttactcctgtgcgcttctctttaaaggcagcattatgattttatggcaattatttcccgctaggaatccgtgacagttttttcggaattcatgacagctttcttggattcacgatatttttcattggacagttatttctcatatcatatttttttcacatgaaaggatttttttatgcagacacttcatctgacagggatcaataaacttcttcatccggagcgcgacaaacgctccgccaccgagcgcatttttgaccatttaagccactcaaacatcggattaaaccgcggcgaagcaacggctgataccggctctgcggcatcggcgctcgacagtttttctgtcacgcagaatatctcggagcttctcagtcccgcctacggcatgagcgaggaagagaaaaaagcctaccttgccaaaatcattgcgaaattaaagagcggcaaaaagcttacatcagaagagatgcgctttctgcaggcggaagatccacagctataccagcaggcggctcgtgtccaggcaatgcgtggctcccttgagtcgggtcttgcgcacagcacttccaaggaggaggcgcaatctgtctatctggacgcgctcacccatatcagcgaggatgatcccatgaaagaatacatcatcgccgcctatgatgatgccatgaaggaattccagaaatccgaccagtaccagtcgctgccagagacaaaagaggatgccgcaaagcagcacaccggttcccgtcattcccatagctgataatttgagttcatgttgcagcaattatctttgtgtgcctgtcttccaagctgccagaacgcaaccgcactggcagctgcaacatttaaagaatcgacgccgtgcgccattggaatgcataccgtatcatcgcatgttgcgatcgtctccggtgccagaccatctccctctgttcccagtacaattgcaagcttgtcctcattcataagcttcggatcatcaatacttaaggaatcctctttcaatgccatcgccaccgtatgaaatcccagttcatgaagctgcttctgccaattcccggaatctgctttctcttccggctccaaatttcgttctatccccgttcccggctctttctcttcttccgaatccggatttctcacagtctccggctttgtctcctctccaagatatgtccacggcacctgaaacaccgtccccatactcacacggattgctctccggtaaagcggattgctgcaccctgtggtcagcagcaccgcatccattccaagcgccgcagcagagcggaaaatagcgcccacgtttgtcggatttaccacattttccaaaactgcaattcgttttgcccccttgcagacactccgcaccgaagggagcggctgccggtacatcgcacagagcattcctctggtcagttgaaaccccgtcagcttcgtgagtacatcaaactccgccgtgtagaccgggatctccccgcaccgcgcaagaatcttctgtccttctccctcaatatgccgtttttccgtcagaattgacaccggcatatagcctgcgtccagcgccctctcgataaccttgggactttccgcaataaacatacccttttccggctcatggcggttaatcaactgattctctgtcagtcttgcatacacatccaattccggtgcatcaaaatctgttatttctatcatctgtgccattttattcctcttccacatctactgatttctgtttgttcgttgtctcacccgatcttgcggtgccattttcgatcgttttatgctttcggctgttttctgatctgtttctctttgcatcctgacttttgaccgagatttggcttcacagtcgatttcctgggacaatttggttttccttgtaatcaattcattttccctttcgttttccgggcttgatctggctttccgtacggattttggtacctgcatctttttcaaacgggtctgtacggcaaaaatatcctctccagacccgtttttccttgtttcccatcatatttaacatgaaaggccataggaaacgggtctcaggagcactttttcttctctgagacccgaatcacagggaaaaacgggtctcacaggcaacttttcccactatagacccgttggtcatatcaaattcaggatctgagtctcataaacatttaattataataccgatctttatcagaagtgtcaatctatccgtttctacacccggaccggtgtctgtcgtacaaatttcccacctctgtttttcctgcctgcgagttccctgtcacattttcaaatgctcattgcgcttcctcattactgatattttctgatgctttcccgcacattttcctgtcacattttcaaatgctttttctgcttcctttttcttcctgccctacaaaataatgcataccatcccgccgttgttgtcgttcacaattttctgcatagtatcctgcagcttcatttgacactcgtcatccatcatcgagatcttgccgcggatgccgttctccatcagctcaccgatggattttccgaaaatattggtctcccaggctccctcctcgctcttttcgccctctctgatgtaggcgatcagatcattcgcctgctcctcgcttccgacgatcggcgcgatctcggtctcaatattggcacggatcatgtggatcgagggggaggttgcgcggatgcggacgccgaatttatttccgtgcttgatgagcaccggatcttccattttaatatcggagagtccggggcctaccacgccatagcctttcacctgtaccgccgccatcgcgtccgccaccttttcatatgcctcttttcgctgcgacatctccttcaccagcgcgatcagttcatattcgccggcaatcggcacacccgcaagctcgctcatattttcatagtaatacttctcagcgacctccatgcggattttggcgcagccagatgcaagatccacttcctccaatttcatccgcgagacatagtgctccggcgtaaaatcctgtgcataaatatctttcacttttcgcattccaccgaggatcgttctggcgctctgtatgatttccgccttcatcggatgatcgggcgggagcatttccgtccatttcggaatatagaattccatgcgggcgaccgggaactcatataaaatctgctctaatatatgaaagacatcatctttgcgaagctgctcgcaattcaccggcaacaccgccgtctggtacttttcccgaagtccctccgcaatgcggacggtctcctcgctgtagggtctcgtcgaattgagcaccacaacatagggcttgccaatctcctccagttcctgcacggtctgctcttccgcattcacataattttcccgcggcaaatctccgatacttccgtctgttgtcaccacaatgccgatcgtcgcatgatcccttatgactttttccgtaccgatggacgccgcctccacaaacggaatctcatggtcgaaccacggcgtatgaaccatacggtccgtgcttccttccatgtgtcctgtggctccgtccaccataaagccgacacagtcaatcagacggattttaatccgcgtatcatcttcaagcgcgatctctgccgcgtctttcggaataaacttcggttccgtcgtcatgatggtttttccctgtgcagactggggtaattcatcaatcgtgcgctgcctgctatgtacatcttccatatagggaagtaccataagatccataaaccgtttgataaacgttgactttccggtccggaccggtcctacaattccaagatacacctccccgtctgtgcggttttgtatatctttgtataaatcaaactcttttttgctgctgatgtccataaaaataccccttccatacttaataaaatgtatgaagggggatctgtaattattcccgcggaaactaaaatatcatcgcgcgcggatgaccttctggcgcagacaaagccggggatctgtacacttcgcttttctacagcatcacccgcagcattcccggcaaacagcggaattgcagcttcgtgacatcaccacagtattctccatccgcatgcagcaccataggatccttcagccggacctcgcatgtgccgcagtcgtctatgtcaaatccgcggattcccgtatgctttgccgccacgaggaacggcaggcataaaaatgtgcgccacttcggaattccgtgtacactgcagatcgaaagctttccgtccgtggcatccgccttcggcgccatgggaacgccgcctccctctgccttaaagttcatcgccgcgatatagatgatgcggtctaacttccgctccggggtctcgtccagacgcaccgcagcctccgtcgtctgcatggaaaaaagcgactgcaccgtaatgagcagataggtcagtttgcccagatgcagcttatttaaaaatactttcagcttcgatgttagggcttttttgcagactaacgcgtcaagtcccacgccggcactgatggcgaactttctcggcttctcgcagtcatcccatgccacctctcccagatcgatcacggtgcatgcctctctcccccgctgcatgcaggagagcatgcgcgccagattctccaacggcgtgccgctaagctttaaccctctcgccaggtcatttcccgagccggtcggtatcagtccgaaccgcactttttccggatgtgtgatgccgttgatgacctcatttgccgttccgtccccgccgaccactgcaaggcagatatcatcatccgtcttcgcgcagatctcgacagcaagacgtgtggcatgcccctcatgctccgtgacataatgccggtaatggattcctctcttcacaagttctctctgtacctctttccagatctgcgcgcccctgccgcttctggacttctcattcacaataaaataaagcatctgtttctcccaccgtaacatacattctgctgtttccggcatgtgccggacatacaccgctctgttccacgtctgtttttcctatataaacacaatcgaaaacgcccacccggcctctgccagatgagcgtttctcttctgcaatgctcttttttatcgtatcacggatacacggcaattacaactgtttactgctcttttctgtctgcatcttcgcccacccagagacgtccgtacatttccatataattataaagccgtttggcaagcttgacggtaatctgatctgatgttgcacgccactgccagttgccccccagtgtggacggcgtgttcatgcgtgcctccgaaccaagaccgatcagatcctgcatcggcaccaccgcaagctccccgaccgaagaccatgcaccacgcatcatgccccagttatagccttcctctttcgtgaggtttaagtattcctttgcaaatttgacgctctccttcggcgcagtcttcatccagccaagcagcgtatcattgtcatgtgttccggtgtacaccacacagtgctccgtgtaggtatgcgggagataattgcttccctctctcgagtcaaacgcaaactgtatgactttcattcccggaaatccggaatccgcaacaagctttaacacggacggtgtcaaaaagcccagatcctccacgataatgtttaatctgccaagcttctgctccagcgtatgaaacagatccatgcccggtcccttgcgccactcaccattctttgccgtcttatcctttgccggaatcgcatagtaggaatcaaatccgcgaaaatggtcaatccggacaatatcgtaaagctttgacattgccgcaatgcgtttcgtccaccaggtgtatccgtttttcttcattacatcccaacggaacaacggattgccccagagctgtccgtcctcggaaaatgcatccggcggacaccctgccacatcaatcggatttaaatcctcatccagatagaactcttccggattcgcccatacgtcagcagaatcccctgcgacgtagatcggaacatccccgatgatctcaatacctttttcattcacataggcttttagctcccaccactgcttgaaaaacagatactgtaacatctgataaaagcggatatccttcgcataggtgcttctcgcctcggcaagtgcctccggttttctcatctttaaatctttttcccaggaaaaccatgcgtttccgtcgttggcatcctttaacgccataaacagcgcataatcagaaagccagtctgcctctttttcacagaacgcctcaaaatcgtccggctctgcgcgaaggaaccgctcaaacgcgatctttaacagcttatagcgcgactcgtacatcacgccgtaatccaccttgtctgctttctttccccacgggaaagactcacactccgcctttttcaacagtttttccttacacaggtattccagatctataaaatacggattccctgcaaagctggaaaatgactgatacggcgaatcaccgtaacttgtggggcagatcggaagaatctgccagtatttctgtcctgatttttcaagaaagtctgcaaactttctggcttcttttcccatcgtaccaattccatacggagatggcagggatgatatatgcatcaatactccactacttctcataacctcgtccttacctttcatctatcactcgaatactctccccatttacaaactcaaacggaacaatctcgtgaatcggctctttcttcaactcgatctggccgaataaaatctcgatgctgcggtttgcaagcgtctgatgctgctgcttgatcgtcgccagcttcggattgtaatactctgcaagcgatgtaccgtcaaaaccgatcacggaaacatcctccggcacgcggtaccccagatcacgcagtgcgcggatggccccgatcgccatcacatccgacattgcaaacactgcggtcacatccggaaacttcccgatcaggcgcttcatcgcccggcaggcgcttccaaaagagaatcttgccttctcatagcagtgctccacatcaagaaccgccccatgctccgaaaagctctgctcacatcccaggaaacgctgatgactcgtataagacttgtcaaaatcaccgccgagaatgccgattctgcggtgtccagccacaaacagctgatccaccgcacagcgtgccgctgcaatatcgtccgtggcaacgctggaaagattctcaaaatgcatctcattggcacggttcgtcaccaacacacacggcacatccacaccggagaactcccggtgaaaatattccggattaccgccgaggaacaaaagcccaagcggctttctctccctgcaaagaagaattgcctgctctacctcatctgcatcctcgtccagataagacacgaccagcgtatattccgttttctcgatcatgcgctggatttcctccacgacactggcaaaaagcatatttgagatacctttgaccagtacgccgattgccttggaattgttctgttttaaatgcttcgcattgttgttcggcacaaaattaaactttgcgacaacttcctcgatcttttttcttgcatccgggctgacatcatttctattattaagcactctggaaaccgtgctgacggaatagcctgactctctggcaatatcttttattgtaaccataacttttcctgcctgtttttgtcttcttgatttcactggcaattattatatcagcctttgacagctcctgcaacaacaccttctataatatacttctggcaggctgcataaaaaataatgatcggaacaatggcaagcaccagcatcgccatcatggtaccccagtcaaccgctccgtagccgccctttaaatactggatgacaatcgggatggtcttgtattttttcagatccagcaccagataaggcagcagatagtcgttccagatccacattgcctgcagaattgccaccgtgatcgtagtcggcttcataatcgggaataccacctggaaaaaggtctggagcggcgtacacccgtcaatcattgccgcctcctcaatctcaagcggaatgctcttcacaaaaccgcagaacataaacaccgccagtccggctccgaatccgaggtataccagaataataccgatgggattgcttaaatgcatcatgttcgccagctttgacagggagaacataaccatctggaacggcacgatcatggaaaacaggcataacatgtagatcgtggagttcactttgttatgtactctcgtaatgtaccatgcgcacatggaggtacagagaatgattaccgccacagaacctaccgtgatgataacggagttccccatcgccgcaaaatagttcgtcttctgcacgcccttgataaaattctcaattccgaagaaggaacggtgatccggcagtgcaaacggatatctcgtgatgaatccttttttctttaaggagttcatcgccacgaggaaaatcgggtacagccacagtaccgcaaggattgagaaaaatacggtcaaaatccatccgtgtttggcacgtcttaccgcgctcacctgattgtctgcttttttgttctttgccattattgctgcacctccttacttctggtaagtctgttctgtagcattgcaatgactgccacaatgataaagaataccaccgctttcgcctgaccggcgccctcccatccggttctggtgtagaatgtctcataaatattcagtgccagcatctgggaactgttcgacggctcacccgcagtcagcgccaggttctggtcaaacagcttaaaggagttcgtcagtgtcaggaatgtacagatcgtaatcgacggcattaccatcgggatcgtcacatggcgcagcagctgacggttcgtcgccccgtcaatctttgccgcctcgatcagctcacccgggatgttctggatgccggcgatatagataatcatcatataaccgatctgctgccagttcattaaaattacaagtccccagaatccgtaggttccggaataggtaagtgtctttccgaagttcgccagaataccgtttaacaggatctgccagatatatccaagcacgatacctccgatgaggttcggcataaagaacacggtacgaaacaggttcgttcccctaattccctttgttaaaagcatcgcgatcgcaaatgcaaacacattgatcgtaagaacggacacgaccgtaaacagtgccgtaaacaccagcgcatgtgtgaatgttgcatccgaaaaaatccggatataatttttcagtcccacgaactttgcatcagtcaccgtcgtaaattcacaaaacgataaatagatacccataataaaaggaattataaaaccgattgtaaatgccactaaagtcgggagtgcaaaaacaggaaaatatttcttaattgatttctccatactctttcatcctctcatattcaataaaaccgatatcgggcagatgctttgcagtacccgcatccttctaaaaaagggtgggcagttctcatgcccaccccctgcattttacagatttttattcgtgtgttgcgtcgtactcagtcttccatccatctacgaatgctgtcacaacgccatcccagtcgccggtaccctgtgcatactcaagtaatgcagaaccaacgccatctttccatgtctcagaaggaatagtggagaagttccatgttacagaatacttgccagctttggtgtaagctgcatctgcctggatgaatacattgtctgctgtgtaaccgtcagcgaaagtatcaaacggtgttgtgaatcccattacattagccatggaatcacgtccctcatcagatgtgatcacccactcaaggaaatcaagtgttgcctgctgatcctctgcggatgcctgattattaacgcaccagtagttctcagaacctgtgcagagtccctgattttcctcaccgtccacaccaatgtagatcggcatcatgctcatgtcctcagctgttacgagataaccgttatcctcattggtcaggttgctgtactcccatgtaccgttctggtagaaaacagcctcttccataccgaactcggactcagcctcgtcaccggtcttgctggaaagaagacccggctcacaggtggaatctgtaatgtagagatcccagatctgcttgtagttgtcaaggtatgtaccctcgattgcatcggtggaatcaatgcccttgtccttgtactcatagtagatcggaaggtttgcaaggtgtgtcttaaatctccagtcggaagatccatccatacctgcggaagtaaatgctccctttaagtcatatccgaactgatcgttgatctcgtctaatcttgcctgaatgtcgtctgccactgcctttaatgtctcaaagttgttgatgtcttccggagaagagatcactgcgttgtccattgtgcagtagtcgtttaagatcgtcttgttgtaaatgatgccataagtctcgattacatatgcgataccggaaacctcgccggcgtcattcttcagtgcatagtcatcgctggtcagatgggagtagatctcgctgtttgaaagatccagacagtaatccttccagtttgcaagtcctaccggtccgtttacctggaataaggtaggagcttcggccttggcgatctctgactttaacgtctgctcgtaagtaccgtctgctgctgtgataaccgttactggaacacctgtctgctctgtgtaggttgctgccagatcctgccatgcctgatcctgctccggcttgaagttcagataataaactgaaccgcccgctgcatccgtctttgctgcatctgtatctgccgcctctgtggttgttgcagctgcatcgtttcctgtggtagctgttgcgttactgtctgttgtgctgctgtccccacatccagtaaacatcgttgcgagcattgcacttgcaagcattacggataacacttttcttttcataaatttaccctcctgatatgatttgttcaacttcttctgtaacgtttccggtattgttatcggtaatgtttccggtaacgttttcagttgatggttagattatatttccatatgtcaggaaatgcaatacccaatcgttattttccacattattgccaagtttcaagaatacattttgtgatatttgtacaaaagaaaggctgccgcaataagcatagacctctttgaggtgataagtaatattacaggaatactagagaacaaaaaagttccagaataaacagacggcggcaaattctttgaagcaaaattcgtgtatttcttccgtgccgtggctggcatcccattccgtgtctcttccacgtttggacactcacggagtgtgtccgacaagccacagacaatgggcggactttctggtgtccctaatggcacctcttcacagacaatataaaaccgcgcgaaccgaactcgccggcatctgctattgaaaatagggcagatgccgactcagacagcggcttcgcgcggttatgttttgttcagaggtgccataagggacacacacaaaagtcctacaaattgtctgttggcctgcggacacagtccgtggagtgctccaaacttggaaagacatggatcatcacagatgccagctgcggcatggttagaaataccggattttgcgttcagaatttgtcgccgcatgtttatctggaacttttaagtatctatctcttgtaatattacttatcaaagcacgatatgcttattgcgacagcctttcattgcacattttatctggtcgaagatcttatcgtcctcccgtcatgcgaaggctctccaccccataaacgatcacgcctgtcagccagacaaaaagcaccatcgtaagcggaagcagtccgaaattccaggacagcatcccgataaagcagaccagaaacattccgagcgccgcataattcattgcggtgtaggcacggaacgccgcgcggtatatctgtagctgttcggcctcatcacagcttgcgatccacgttttctggaacttcagatcgtaaacgcttcccttcttttccggattgatctccttcgtaaaattgacaatccggttctgggcggttaccgttacgaccataaccgcaatcagtccgagaaatgtggctgctattttcacccacggaatctcttcctcccagccgctgtctatgccggtggacttcatgccggctgcaaaaaagaaaaatccggcaatgagcgccacattcgtgacaatcacaccaatgcccagtttccgctcgatcttttcgatcaactgctcttcctcgccgtcccaacgcctgtattctgctctgccgccgcaaagcattcccgtcatccacacagccagagctgccgcgatcacaagatttgcatagggtgcgatcttttgaagtcccgctgtgattcctgcgccgatatccgcctgttcctttgccgccatggtcgaaaacgcgcctgttatcccgcccacaaccatggatactaaaagaagcactataaacttgcggaatgctctcctatcctctctctgattctcctcaatcttcgggttgcatttctctgtcccatctgtcatactcttctcctccctgcctgctatttttcttcctctgattcttcctcataggtaaaaatggcttccaccggaacctcaaacacttttgcaatcttaagcgccaacgtcaccgacggcgaataatccccgcgctcgatctgactgatggtctgcctggatactccgaccagctgtcccatctcgtgctgattgacgttgatttttgcccgatattcttttaaatgattgtataatggcataaatcctccatatcccgatgtgcttttcacacaacgcaccgctttctttgcggcacattttctcacaccgttattatagatatgacaaggaaagttgtcaatacatttttgacaactttccttgtcacatcagtgcatccgccagcgcatgactgacggaacaaccatagcggcatactattgtaaatctgtttggaaaatgctaaaattcagatataagagtatgttatggaaagggaatcacatccaattatgaaagagatcatcaaacataagataacccacaatgtcaaccgcttaaagacttccctgaaatgggtggtattcgccatcctctccggtgtgctggtcggatctgtgggcacacttttttatctgtgcatggctctcgtcacgctcgtccgcacaaaaaatccgtggcttattttcctgcttccggtcggaggtattctcattgtaggtgcctaccgcctgcttcacgatgagcgcgataccggcacaaaccttgtactctccgccatccattccggcgatgaactgccgctgcgcatggcgccgctcatttttatctcgacgctgatcacccacctgttcggcggttctgccggccgtgagggtgctgccctgcagctcggcggcagtattggaaacggtctgggacgtctgtttcattttgatgagaaggacaagcacatcatgatcatgtgcggtatgagtgctgcgttttccgcgctgttcggcactccgatggcagccgccatcttctccatggaggtggtgagtgtcggcatcatgtactatgccgccctcgtgccatgtgtgatctcctcgctgatcgcccacgcgattgccacctcgttcggcgtgagcccggacggcttcccgctcggaaaaattccggattttacgatcggctccgccgttgaaatttccatcctcgccatcttatgtgcgctggtgagcattctcttctgcgtgatgctgcacggttcagatcatctgtataagaagtttttcaaaaatccctatctgcgcgtcttcgccggtggatgcattgtcgtcgtgctgacactgctcgtcggggatcagacctacaacggtacgggcatcaacatcatcgcccgctgcatggacggtaccgtccgcccggaggcgttcttcttgaaaatgctttttaccgccgtcacactcggcgcaggatacaaaggcggcgagatcgtcccgtctctctttaccggagcggcattcggctgtctgttcggaaatgttcttggattttcgccgaccctgtgcacagcggttggcatgtccgcagtcttctgcggcgtgacaaactgcccgatcacctcactgctcatcagctttgagctgtttggatatgacggtatgccgtatttccttctcgccatcgcgttcagctatatgctgtctggctactttggtctctaccagagtcagaagatcgtctactccaagtacaagactaactatatcaacaaaaagacgcactaacaggaatagaaaagcgctgccacacgaggcgctgattattatgagtgataccaggaaaaataggagccaaacgttccggatgatatctgtccaagacagatctgaccgtaaaatccggtatttctaaccatgccgcgtccggcatctttgatgatccgtgtctttccaagtctggagcactccacggactgtgtccgcaggccggcagacaattttagggtgttcgtgtgccccttaccgaattgctgaacaaaacataaccgcgcgaagccgatgtttgagttgccatctgccttttttttaatggcagatggcagcgagtttcggttcgcgcggttttatattgtctgtgaagcaattcgattaggggcgctagaacgcccgcccattgtctgcggattgtcggacacactctgtggattgtccagacgtggcaaagacacagaataggatgtcagacgcggcatggaagaaatactcagattttacttcaaagatctgccttggcagatacattcggaactttgtgccctctaatctcctatcctgtcactcatgctaatcagcgcctcgtgtgacagcgcttttctatctcctattctttctcgatacaacggtcgagctgtgcgagcagatcttcgtacttgcagagcccctgcttgcgccagtcgcattttccacagttctccataaagaaatccatgttcatcgccgcgcgtgcgtgtctgcacatctcacggtatgtatagaccctgttctcctcgagtccgaagaattcgatgacccggcggtctttgttcacgacccggttgtggttgtggacgcactcgttcgtctccgtccggttcggacagttcgcacagatcatatccggttccgccaccagaagaagttcctcgtccggatcttttcgcaggcgttccaccaccgccgtcatattttcacaaaacgcaccgctgtagccttttccctcatagagcgaagtacagacgatgtgatgtcctctgaatttgtctgccatagcaactgtacactcctaaactgccgcttttgtcttctcttccagaatatttcctgctgcaagcgccttgcggatcggaattgccaccagatacgcgcccacaacggagatcacgtccttcacaatgtaaggaacagataccgctacgaaagcagccggaaacggtgtggcagccacgatggcgaactgaatgacaccgagcagatgacacacagcaagaccggcaagtcctaacagcacgcggagccagatctgcttctgtgccatgcccacgccgcagagcattgtcaggaaaatgaatccccagataaatccgccgctgtagccggcaagccaggacggtccgcctgtcattcccgcaaacaccggaacgcctactgtaccgagcaggatatagatcaatgtggatgatgttccctttttccagccgagcacatagccgcacagcgccattgcaaaagtctgaagtgtcaccggaacgccggtcggcatcgggatcgtcaagatggacaacacgctaagcactgccgtaaacatacccactgttacaattgtctttgttgaaatcttcatgattctcctcgtttccgcaggaatcgcatattttaccgctctttcctgctgtttttcgcgcagaaatcccctatgggtctctctgtctgcaaaaacaatcataacacttttttgtcgattgtcaacctgttttgtattgcggttgacaattctctaattgcatttccggttctttccaaaaatcaggtcgtaattgatactgtgatagaaaacctcctcgatatcacaggacgatatatcatagttgccaagcatccacatcaccttcgcaatcacggactctaacgtcatatcgtaggactctaagaagcggcaatattctttcatgttgtggccgacctcgtagaccgtcatatcgcttccctcgtgcgccacctgcgtcgccatgaccaccagcttgtccggatgctcctggcacagccggtaaaactcctctgcgatagactgcggtataccgcccacgccaaagctctccacaatgatacagtcataattttcaaaaatactctttaacaccttgggacggattcccgggatcagcttcatcaggaaaacattttcatccagcttctcatagaaccggacttcctcctcgtacggaagcatggggatatagcgcataatattcatgtcctgtatcacggcgagcgacggatagtcaatactggaaaatgcattgtagctcttggaccgcaccttcttggcacgggttccggcgatgacttttccatcaaacacaatctgtaccccctgtgagcggtcatcggcagcatataaaaagctgtcgatcaggttcgacttcgcgtccgtgatctccaggtcgatcggcttctgcgcaccggtaatcacaatcggctttttcgtgttctgcaccatataggaaagcgccgctgccgtgtacgccatcgtatctgtcccatgggcaatcacgaatccgtcaaaatcgtcgtagtgctcccaaatcgcatgaaccatgagtttccagtgtgacggctccatgttggtgctgtccagatttaaaagctgaaccgcctcgacatcgcagatctcttttacctgcggaatatactcgatcagctcctccggtgtgatctgcggttttaagccgttatccgactttctggacgcaatcgttcctccggttgccagtaataaaatacgtttcttctgctgcatactctctctccgttctatcgtaataatcccctcagtgcagcaagaagcgcctccacgttttcctctttggttgcccagcaggtacagatgcggacagcgctatgcgtatcgtccacacgcgcctgatattcaaatgcaaaatcgtcttttaacttttcaagcaccgcatccggaagaatcacaaactgctggttcgacggcgagtccacataaaattttacgcccatgtcctttagctcatcatggatcttttccgcaagccttgatgcatgcgccgagatctcaaaataccttttctcctcgaatagcgtgaggaactggatgccgagcagtctgccttttgccagcatgccgccccgctgcttcatattgtaacggaaatcgcgcttcaattcctcgtttgtgatcacaaccgcctcgccaaagagcgctccgaccttggttcctccgatgtagaagacatccgtgagtgctgccacatcggcaagggtcagatcattttcccggcacgtaagaccgtagcccagtcttgcaccgtctaaaaacagataaagccctctctctttgcagacatcatagatcgcctccagctccgcttttttatagatcgtgccaatctccgtcggattggaaatatagaccatcttcggctgaaccgtgtgttcaaaacttgcgtctgcataatgcgcgtccgtatatgcagcaatctgctctgctgtcagtttgccgtccgccgtctcgatcgtaaggcacttgtgtccgcaggactccagtgctcccgtctcatgtacgttgatgtgtccggtcaccgcagtgatcacaccctgatagtgtcttaatgcagccgaaatcactgtcacattcgtctgtgttcctcccaccagaaaatgcaccgctgcctccggtgcggcgcacgcctcttttatctgctccgcagctgccgcacaatatacatcctccccgtatcccggggtctgttccatgttggttgccgcaagtctctctaagatcgccggatggcatccctctgtgtaatcactgttaaaccgtatcatctttctgattccttttctctatgtatttgagacgcgaaccagctccttcagcttccgtgctgccgcgccgctgtcgatcgcctctgccgctaattttacacccgcttccatagattccgcaacccctccgacataaagagttgcacctgcgttcaaaagaacgatgtcacgcttggcgccgcgctccgttccgtccagaatggctctcgtaatctttgcgttttccctgccgcttccgccacgcagctcctccagcgatacgcgcttcataccgaactgctccggtgtgatggtaaatgttgtcaccgctccatcccggatctcggataccgtggtcgctcctgtaagcgtaatctcatccatgttgtcctcaccgctgaccacatacgcgcgctccaccccaagtctgctcatcgccgtcgctaccttttccgtgagtgacggactgtagacaccgaccaccatattttttgcgcgggacggattagcgagcggtcctaagatattaaagacggtacggattcccatctcactgcgcgcctgcccgacatagcgcatggacttgttaaaaagctgcgcaaacatgaagccgatgccagccttctccacgcattcctccactttcctcggatctgccatgatattgacaccgagcgcctctagcacatccccggcgcccgatttcgacgagatggagcggtttccgtgttttgccaccgggagtcctgcagcagccaccacgaacgccgacgtggtggacacgttaaaggtaaatgtgcggtctccgccggttcccaccagatcaatataattatcaaccttcggggaaatcgtctcagccttgtcgcggagcaccgctgcaaatccagccagttcatccagcgtctcgcccttcacgcgctccaacgccagaaacgccgcgatctgcgcctgcgtcgcatcgccgcttaacatgatgtccatcgccttttttgcttcttcctctgtcagattttctccctcggcaacctttgcaatatattctttcattctttttcctcctctatctgttcagttcccttttgaatgtccggcagtatgtctccgccgcctccggcgcaaatccctgctcctccaacagcctgataaaataacttccgacgatcgctccgtcgatcagatctgcaagcggcagaacgtccgccgccgtccggatgccaaaccccatcatcaccggcagatccgtcgcatcacggactgcagtaagatagcttcttacctccttgtggaactccgctccctgtcccgtgacacccatggacgatacgcaatagacgaatccccgcgccccggcgagaatcttcggaatccgcgccccggacaccggcgacacgagctggattaagatcgtatcctccgatgcgttaagcaccgtcatcagttcctcctgctcctcaaacggcagatccggaacgatcagtccgtccacccccgcctcattgcatctttttacaaacgcttccacgccgtagtgcaggatcgtgttgtaatacatcatgaagatgatcgggaccgtcacaccctccgtgcgcagttcctgcatcattgcaaaaatcttcttcacattcaccccgccgaagattgcacggtacgatgcgtcctggatgaccggtccgtccgccaccggatcggaaaacggcacgccaagctcaatcacgtcgcagccgccgcgctcctgcgcccggatgatttcttttgtggctgccagatccggcagtcccgcggtaatataagtaataaatgctttctcctgctttttgctgcaggcgttcatacgcgcttctattcgattcatatctgtcatatcctccctcgccggacaactttccggctcaatttaaatatccttttcctgcaagataatctgcgatcgtattgacatccttgtcgccgcggcccgacagacagatgaccatggtctcctttgccgcctgcttctcaccgaccgcctctttgcgctccctcgcgtacttcatcgcataggcaactgcatgggcgctctcgatcgcaggaatgattccctccagtctgcacagctccatcagcgcatccatcgcctcatcatcccggattgccacatatcgtgcgcgtccgctctcctttaagtacgcgtgctctggaccgacgcccggataatccagccccgctgagatggaatgtgcaagctggacattgccgtccgcatcctgcagcagataggaacgcatgccgtgcagaactcccggctcgccaagcgccatcgccgacgcgtgttccccggtctcgattccctttccggctgcctccacgccgatcagctttacccccttctcttcaataaaatccgcaaacatgccgatggagttcgagccgcctcccacacacgccatcacgacatccggaagctttccctccgccgcaaggatctgttttttcgcctcgcggctgatgacgctctgaaactctttcaccatcttcggatacggatacggtcccacagcagaaccgatgatgtaaaaggtatcctccgccgtctttgcccaggtacggatcgcctcgttggtcgcatcctttagtgtattgctccccgaagtgacactgacaaccttcgcgccgagcatctccatgcgcatcacgtttaacgactgtcttttgatatcctcggctcccatatagaccgtacactccatatcaaaaagtgccgcaccggtcgccgtcgccacgccgtgctgccccgctccggtctctgcgatcacctttttcttgcccatgcgcttcgccagcaggatctgtccgatcacattgttaatcttgtgtgcgccggtgtgatttaaatcctcgcgctttaagtatattttcatgccgtacttttcactgagacgctccgcgtaatataacggggtctctctcccgacatactgttccagataatagtggtattgtttgagaaattccggatcgcggattgcttcctcaaatgccgcatccagttcctccagggtattcatcagcgactcagccacatactgtccgccaaatgctccgtaatatgctttcctgttcatgtctcgtctttcctttcctgatcatgttccgccgcgccttcttcctgttcagacgccttctgttttttgcacggctttcttaaattttttaatcctgattatactttttgctctcattccgtcacacagcgtttccacgccgctgctgacatctgcgacatcgggggcaaagattctgattccctccgccacattctctgcgttaagtccgcctgccagcacaaaggtacgcccttctgccagcagttcctcccggaacgcacgcacggcacagcacatctcatcctgcccgtcctgttcccagccgaacgtctttccgctgccgtattccccggcatcgagcacaatcccggcaatccggtgatattcttctctgcgccatcggcgaacctcggcaggatcacggaggttgactgccagccacaccggcagcttcgtctgcgctgcgatccgctccgcctctgcggcatccacgccatgcacctgcagcagatcaaatcctgcccgcccgatgtcctcgatcaacgctctctccggcgcgaccgtcacggctacttttcttatacctttatttaatttttcaaatagttgtcttgctttctgcactgtgacataacgtttacttttctcgtacagcacgaatccggcgtaatccacacctgtctcattgagcgctgctatctcatcctctcctgtgatgccgcagatcttgatcttcgtcaatgtccatcctccctaccgctgcttccagcgcgctgccacctctcccgggtgctccgcctccataaaggctctcccgatcagaaatgcattcacaccgcatgcttttaagaactccacatcctcatccgatacaatgccgctttccgccaccagaagcttctcctgcggcaccatgcggcttaatcgctccgttgtttgcaggtcaatggaaaaatccttcagattgcggttattgacgccgatgatctttgcatccagctttaacgcccgctccatctccgcctcgtcgtgtacctcgactaacgcatccagccccagctcccctgcaagctggtagaatccatgcatctgcacatcgtctaagattgccgcaatgagaagcaccgcatctgctccgattgcacgtgcctcatagaactggtacgggtcaatcatgaaatccttgcgcaggatcggaagatctgtcatctgccggatctgttctaagtacgccgtgcttccgtcaaagtgatcctcctccgtcaggcaagagattgcatccacagaagcattgtattcctcaattctatccagtaagttaatcttgcttttaattttaccgagacttggggacgcctttttgaactctccgatgatggaaatgacatctccctcaagcgctcccttaaaatcatgatggctgccctcatacgcctccgccagctttcgcatctcctgctccggtatccgtctcttatgttccggcagtcttctttttttatcactcacaatctgatccagtatcatacgctgctcctcccttaaatgacacccgacaggaaattctcgatcatccgctttccgtgttccgtgtagatggactcggggtgaaactggagaccgaccaccggatactctttgtgccgcatcgccataatctcgccgtccgcggtctgcgcggtgactttcaggcactccggcagatcgtctcttagcaccgccagggaatgataccttgccaccttaaccggcgtgtcgatcccggtaaagacgccgtccagacaatgtgtgacctcggactgttttccgtggaataatgtcttcgcatagctcacggttcctccgaacgcctcgccgatgcactgatgtccgaggcagatgccaagaatcggtattttattgtagaaatgttttaccacgtccatacagattcccgcctctttcggacttttggaacccggggagagcacaatgcgctccggctgcatattttctatctccccgatcgtaatggcatcgttgcgcaccacccggatgtccggcgtgaaggttccgatatattgatagaggttataggtaaaggaatcatagttgtcaatcaaaagaatcataagttttcctcctccagaagtgttcttgcaagcgccatcactttgttgcagcattcctgatattctttttccggcacggagtccgcgacgattcccgcgcccgcctgcagatagacctctctgcccttcttgatcatcgtgcggatcgtgatgcagaaatccatatcaccggaaaaatcgacataaccggtcgcaccgccatagagcccgcgccgcaccttctccagttcctcaatgatctccatcgcccggatcttgggtgcaccgcttaacgttccagccggaaggaaggatgacagcagatcaaacggatgatagctgccctttttccttccctccaccatggatacgatgtgcatgacatgggaataattccgcacattcataaaatccgtgaccttgactgttccgaattccgagatgcgccccatatcgtttcgcgccagatccaccagcatcacatgctcggcacgctctttctcatctgccagaagttctctgtggagtgcttcatcctcctccactgtctttcctctcggtctggtccctgcgatcgggcaggtaaacacacgcttgccctgctgttttactaacatctccggcgaacttccgatcacctcaaaatcaccgaactggaagtaataaagatacggcgacggattcaactcgcgaagctccttatagagagaaaaaccgtcgcgtccggtctccaccgtccagcgctgggagagtaccgtctgaaagatatgtccttctctgatatagtgtctgatcttctccaccttcgcgctgtaagcggcaagcgtatccgactttttgcggatgacgccgtccctttttccgccctccggctgcgccgcctctttcatcccgtgcccggtgttctcttcacacctgctgtcacatcctccctctatctgctccggatgcatggcgcgccggatcagctcttccgccgtcacgccggcacgctttcttccttcctccgtctcctcctctaagacaaccgcggtcagcgtctccgccacatagtccatcacgataaacgctttcatcaacatcagctgaatcgtctcaatcccgatctcatccggattcttctccggcagtttttccgagtagcggataaaatcgtagccgacattgcccaccagtccgccagaaaaattcagttcatcattctccttatgaatctcaaattcatcataatattcttttaacagcgctaacggattgcccctgcgcacctcgcgctccccgctcttttttgtgatgacaagcgactccccctccgaggagatcagttcctccggttcccccaaaaacgtataccggtcatagttcttgtcatagctctcgagcagaaatccctttctgcttccgaccagattctcgtacatcgccgtcggcgtctcgttcacaatgctgactgttttcttgtagaccttatagatgcgcttcataaatcctcctctttcttcttttaattcatagaaaatgcgtcccatcaagaaagaatcctgaccggagggctttttaattcattggacgtaatttcccatgaattaaaaaaaatccctgacccggtaaaccggatcagggacgaatgtctcgtggtgccacccttcttctcttgccatgcttagcttctctctttttatcagccgtcctcaccggactcatctgacagaagatacaaaaagcggatacctccaaactggaaatatccgccaccaatcatgtatagactctcagatacagatgttctctatatcgtacccctgtaacgtgaggacacggcttccgctactcggctgctgttatccgcctttcactttgctctcgcaaatccattccatccatactatcctgcctgctcccaccgccccaggctctctgtgaagaatcgtacagtgtactccttttgctcaacgatttctcatttatttgtcagtagtttatcgcactaatgtggcaatgtcaagaagttttttattttcccgtcacctttttctatcaatatgatatactttaagcattgatcctgttacaggaaatggaggagctctcagatgaacaatgatgtatttgaaacaatgcccgtaccgaaagcctatttcaagatggctctgcctgtggtgttcggcatggtcatcagccttgtatacaatatggtcgacacatggtttattgcaaagacccagaacaccagcctcgtcgccggcgtctctctctgcgccccggtgttcagtctcatgattgcattcggtgatattttcgggcttggcggaagttccgccatctcaagacttttcgggaaaaaagattatgacaccgcgcggcggatcagtgctttctgccttctcggctccatcttcttcggcattgctgttgccgttctgatgctgctttttcagacacccattctgcatcttctgggtgccagggacgataccatcgcctatgccggcgcctattaccgctttctggttctcggctgccctgccattatctttaatattgtcccggggaatctgctccgcacagaaggtctggcaaatgatgccatgattggttccgtcatcggcgctgtgtttaatatttttttagatcccattttcatcttctctctgcatatgggtgccggcggcgccgcacttgccaccatcctgagcaatctgcttgccgactgctatctcgtgtgggttgtattcaaaaaggcagggcatctgtcgatgtcctgccgcgaaatgcatatttcatccggtcatgtccgtgacattctgctgatcggaattccggcttccatcacgaacctgatgcagagctttgcggtactcctcaccaaccgttttctgttaccttacggttctgataaagttgccgctcttggcattgccttaaaagtcaacatgatcaccatgctgattctggtcgggttcgccttcggcgcgcagccgctccttggctactgctacggtgcagacaaccgcgaacgcctgaaacaatttctgcattttgatctgctcgtgcagcttctcattgcgctcgttttcacagccgccgcctgtatttttgctccgcccatcatccgcatcttcatgcaggatgacgtcatcgtggcctccggtgccctgatgctccgctgtctcatgattaccgcccctgtgatcggcatgatcttagtcttcaccacactgttccaggcagccggcatggcgcttcccgcttttctgatgtccatcagccgccagggcgtgctgctcgtgttgtgtatgctgctcttttcttccctgttcggctacatgggaattctgctcgcgcaggcagtctccgatgttctcaccggaattctgggcttccttctgctgcgcagatcaaaaatactgctctgatgcgccgtgcgtcacaccgtctctgcgctgcggtaaacctgctcaaacgtatctcttgcggtattatgcttcccgatgtcaacaaccaccgcaccgatggacatggaagactttacgtgatccgggagcagggcaatcttctccttgtacagcgccgcaactttctttgcgtacttctgaatctctgcttccttgatcggcacccgctgcccgtgtccgcgcaaaatctcatcgaattccatatagcgcacacagcatccagctcttccgtggtaaacaacaggtacatggagaacaccgaaaatgccgactcaaaccagtaaatgatttttggcagtgcaatgcggcaaaactccgcaaaaaaccaagcacataaatcaccgacgccagcgcaaataaaatacttccgacctgcgctctggaaggtctcgcctgtgttattttacatattgcaatcctctgcgcaccggattgcgcaattttgcgtctccatatgccgcattgcctgcaccatcgccataaaatcctgctcctttaacagcgcgattccccgttcttcatctcccagaaccatcaatacatcccccggctttatgtcaaaaattttcctcgcctttgctgggatcacaatctgccctttttcaccgaccttcaccattccaaacgcatgctttcccttcggcggaaacggcaggcgcgtctccccgccctcataattgaccagttcatccagcgtcacatcaagcacctcggcgatcagccggctcttctccacatccgggagggactctcccgtctcgtatttggaaagcgtctgcctggacacatcaatcttctccgccagttcctcctgcgtcattccacgcatcttccgcagcatcatcagattatccttgaacatgttttctctcctttttctctccaatcacacaccatcttatgaccggaattctttttatcagctcatagagaagatagccgcccgcgtaggctgcaattcccgacaaaaggtaggctgcaccccccgtaacttcggtgtaccgatccagaaaatatgccgccgcagagagcgccagataatggaacagatacagtccgtagctctttttagaaagccactccgtcttttgcgacgtccggttaccccagcgcttcattcctcccagtactgccagacacaccgtccagccgtacaaaatggaaaacggactgtttaccaccggctcctctgcataattttctccgaaataataccgcacataaaaaactgccagcaccacagccgcggctgcaagcggaacgctcacgcgcgccagccggtcggtcactttttcatgggaaaagacatagtagcccagaaggaagcatatgccgtatattccgaaacgatacacacagatcaccggcgtattcaagatctgggcagctccccagacgggaatcacaagcagaaaaaggacgggcagcacagctttttcaccaaacacatacaaccggtctttttctattttgcgaagcagcaccagcaataccgacaatacccagagcacctggatgtaccacaagatcccgactccggataagaccatgatcagatacccgaccgccttcggcactttctcccacgactggtcaaacacatggctgaatgccatgttgaaatacccctgtatccaccagaacacgaacaggccgatcgtcgagggcaccagaagctttctcgttcttcccgcaagaaattcccggtcggtatgtccttccagataatatctggcacacattccagacaccagaaacagcagcaccataaaccacggatacagcaggtactgcacggcatcctgatactgtacctcccaaaacggcccgatcactcccgccgtcaccacgctgttatacataaaaatcacatggtataagaccacgagccccaccgtgatccagcggatgttatccagatagtgtcttctcatatttttcccacctttgctctatattttaactcaagtataacaaaaatggaatggctgctccaccgcgcttccattccattttttatgctttctgttaaaaatcgttgcatttctcttatcatctgttgtacagacagaattccgtcagggattacatctcttgcacggatcatatccggctgcaatcagttcctccctgcttccggagaatgccgccttgttttccggcgacatctgcgcaacactcgagcaggatggccggtgaaacttctttgtgttcgtgttgagcacgtattctcctgtcacatccgctgtgccgtccgcggcagtctctcccccggatgatgcctgtgccgcgcttcctgcggtatctgctgccacggatgcctgcgccgcgctgtctgcggtatctgccgtcccggatgttcccgtggtgtctgtgctgcctgccgccgcatctgttaccccagctcctgccgtcccggatgttcccgtggtgtccgcagcacctgccgcgacctcatccccgtcccggtaatcctgcgtcgcgtccacgctccagctaagggaggttccgtcacttgtgaccgtgatggtcccctgcagatccgtccggtagagcgctgccccgcacgccttcacccggtccagtactgtgcgcgtcggatggccgtaagagttccccgcgccagcactgaccacgaccgccgtcggcgacacggcgcgcataaacgcttcggaggaagacccttcactcccgtgatgacttgccagatacacatccgaatccaacgtcacgccggagtcaagcatcgcctgctcttcggcttttccggcgtcaccgcagattaaaaagctggtgttgccgtacacaaggcggattccgacggagttatcattatcctccttcggatcatagacttcggggcagaccaccgtaaaagaggcatcgccaagcgtgtaagtgtctcccaccgccgggtaggcaagtgcgatatcctgctcctttatcacgcgctcaaacgactcatagactctggtatccgtcacgtaatcgggagcaagcacctgtccgcaggaaaatgcgtgcagggcgccgaccacaccgtttaagtgatccgcatcatagtgggaagcgatcacataggcgagttcttccacgccctgttccttcagatagcttaccacaaacgaggagtaatccctgttgccgccgtcgatcagcatatacgctccgctctgctccactaaaacggcattgccctgtccgacatccaaaaacgtcaccgacagcgttccgtccggcatctgctcttctctctgtccttccgtccctgccgtcgatgcttctccgttctcctgctgctctgccatctgctgctccgacatctgcccgtcctgcaaggctcccccggacagtgctgcctgctgccttaccgcctgcccgtccgatgccgctccgcatcccgacagcaaaagaagcagggccgcacaaagtgccactgccccgcttctgattctattcacgttgtatttcttatttttctgctttcccgctgtctgcatgttctttttcctcttccataaaatacatgcgcgcagcaaaatcctgaaaataccgcacctcattgttgtatccggttccgccgaacgcctgtttaagcttcactccatgatacattaacatatctccggctgcatggcaatcctcgatctccccgtccatcttcttaaatctggcgatcagatccagcgccagcgaatcctgcttaatgtgtaccggggagacggtattgaccagatccccgaaatccttgatattgtattttaagctgcggttatagaaatggtaccgcgcatcgggttttaatcccttcgcgtgatagctgtgatactgggtattcggtacgaccagcttctgcatgagcataccgaccgcacgggtctggtcttccgacacacaggtccactccatctggttccccgcactctgggagagtacactttcatgtgccccctctccgaatgtgcgtccgcggtaaaaccgtcccttctgcaatacctcccgccactgtttgtacagtgcgatctgtgcctttaccgccgcaaaatcctcgcgggacagatcgcagaaattgcactcatagccgcagataccgaacactgccacagcgaaccgtgtctcaagcggcgtcacgcggagcgtctggtggttcgggcacgccgacacatgggcgctcacaacggacatcggatagccgtaggaatagccggtctggatctctgcacggcagagcgcatccgtgtcatcggacgcccagatctgcggaaaataggataaaattccgagatcaaaccggttgccgcctgcagagcatccctcaaagagaatatccgggaaacgcgcggtaagttctctcatgcagcggtacagtcccagcacatagcggtgtgccacctctccctgccgctccggtggaagcgctgcggaatagtaatccgtaaacgtccggttcatatcccatttgacataggagatctccgccgaggaaaatacctttgtcatcgtctcgatgatatagtcctgcacttccgttctcgtaagatccaggatgcgctgattgcggccttccgcatgcggtttccccgggatctcgatcgtccagtccggatgcgcctggtagaggtgactgttcacattcaccatctccggctccacccagataccgaaatccagcccaagcgccttgatctttcttccaagtcccgcaagacctcccggaagcttcttctcgttggcttcccagtctcccagggaatgtgcgtcatcattgcgctcgccgaaccagccgtcgtccatcacaaaaagttctacgccggcttcctttgccttcttcgccagagcaagcagctttctctcattgatgtcaaagtaggcagcctcccagctgtttaacagcactgggcgcaccttgtgcttaaacgccccgcgcacgatgtgctcccgcacaaatgcgtgcatgcactggctcatgccgttgtagccatcgcaggaatatgccatgactgcctccggcgccacaaaattttcccccggagccagcagccaggaaaatgactgcggattgatgccggcagtcaggcgcatcttgccgtagccgctcacttccgccgcctcatagtggttgccgctgtagatgaggttgcatccgtaacactctccggtatcctccgtcgtatccgtctttgcaatcatgacaaacgggttggcacggctggaggaggttcccgtgtaggacgcattgacatgttttcccgcctccatgcgcgtatcggaacggtgcatctccctcgcccacgcaccggtaaaggttgtgaacacatactctgccggatcaaagtcgatctgggtactcatcaggcgattcagacgaatcatctccttgctctcattgaagagaacggcgcttcgcacaatcgcatcgcactctgcgtagacgtcataatgaagttctaaaacaagatcataggagtggtcgcacagccttacgctgagacgctgcgcctcccctttctcatcgtaagctcccgggagatctccgttttctgtctccgccgtcttttccatgatctcataactttcatagtgaaagtccgaagtggtactgccgtccgcgtgcacgatctccacaaacggttcgcggatgtccccttttccgtaggaggacatctcaagccgcatatcctccagggagaacgccggatgctccccgtcgcagaggtttgtatttcccggcgcaaatgtatgcttctccaccagcggagcaacatcacactccgccggatgctccggcagagtcaagcgtcttccgtaatacagatgttccaaatgtcctgtctccattctccggaaacagtatgtcgtgtatgccgtctccagcacaaaaatatgtccgtccgcttttatcatttagtatgcccctttcttgacctgctctgcgatctcggcaaccttctcctccgtcagaatatactttttgtggaaaataaaaatgccgcacagaaggcagatcatcggaagaatcgtcattgtcatgcgcagtccgaccaccgaagatgcggcagccgtcgcaactgctgcggtatctgtcgtatcgttgctcagattgcagatctgtaagcagatggatgcaatcagtgccgccacgccactcgccagtttgaccacgaaggtctgcatggaaaagatcacgctctcgtcacgtctgtgatttttcagctgtccatagtccacggtattggcgagaaacaccgtcgtcaacaccgtcagcacaccgtttgccccaaagatgaagaagcccgggataaacagcagtaccacattggacatattggtgaatgccagtaccaaaagcaccacataaccgatgatcgccatggcaaatcccgtgtagaacacctggatggttcccatgaatttgcgcagcagcgggaataagatcatcatggacagaatctgtaccgctccgccgaacgtattaaacagtgtgtagctgttgtaccagccctcgccgccgaaatcgtatttaaagaaatagatgacaaggtttgaggttgtatagaccgcacagttgatgagaacgatggtgatcacgactgtcatcgcctgatcgttctgaatcagtgcacggaacatctgtcccacggacggggaatccacattgacggtggatttttccttgacattgacgcaggtgatcgtcgtaaagagtacaaataaaatcgcaatgatcagtgcaaaccacttgaatcccacgcgctcatccccgccgccgagacggtatacgcataacatcgtgatgattgtgatgatggcagagccgacgcccgcacaggagcgcgccatcgtggaaagtccctcacgctctttgccgccctcggtaaacgccggaatcattgaccagtaagggatatccatcatcgtgtacgtcacgccccagagcacataggtgactgccgcataggccaccagaccgcctccgtcaagtgccggcggtgcagcaaacatcaggtagagcatgatggcatttaaaatcgttccgatgaaaagccacggacggaattttccccatcttgtccttgtcttggcaacaattacgcccatgatcgggtcattgaacgcatcaaatacacgcgctgcaagtaaaatcacgcccatggcaaatgcgctcaccccgagaatatcctgataataatacagtatgtaacttgcggaaagcatgtacaccatgtcttttccgactgctcccaatccgtaggagactttttcttttcctgtcagtttcatgtgatcctccaattctgcgcttttgcgctccccttatctcttctccattgcaagttttaccacgcggtaggctccgtcataaattccggctgccttattcttttcgatacagtcgcacatatcgttaagcagcgcttcctcgtttaagaacagatccagcatctgcaccgtgtgtggaatatctctgcactctaacgtgccgtccccgatctctgcggagtggatggcaccccactgctcatgcccgccgacacgcttgataaacagcttcggcaccgggtagaatgccagctcgctcggctttgtcacaagcacatcgcagcttctcatcagaaggttcgtgcagtagactgcctcgaaaatattctcgtgccagaaaccgtggatgccacttacctcaccggtaagtgcctgtgcggcaaactctgtcgtatccttccaattattaaaatgctccgttgcgaaattcttcattcccgggatctcgccaagcaattcctcccagacattgcggtaatcgccgacattcacatacaatgcggctctgccgtcctcaatcgcagggagcagatgtttgatgatggaagcaaaaatctctctctgtgctcccgctcctccgatcgtgagaaggaaacgcatcggctttttctctctcttgcgcgcacgtctcgcctcacagtccgcctcgatgttgctcaccagctcatggtcgatgtaatgtcccgtatagatcagatcctccttcggcatcgggcgaagaacgtcggctccctgcatgccgtttaaaatgcggtaaccctggtaggcgtaatgtgtctgcacggtgtgaatgcttccctccgataaatgcagcgccatcggccagttgtccgggatcgcgttgaccacatgcttcattcccgcatggattgcagcctgcgcaggccacacatgtgtcgccaccaccggaatctccttcggcacattcgcatagaccggagccatcagttccgcatttttctggtccgcggcattgtaggaaagcttccggaagccttcatagttcatcggctcccagaccagacggttgaacagtctgctcttctgggaaagtcttgagcccagggaatacagatcattctgcgcgccaatgacctttgtgcaggtcgtctgcgggtaggaattcaagtccatccagtacggtacatagcccatggaatgtgccgcggatgcgattgccatggaaatacggtaatgtccgaatcccatgcggatgttgccgacgatgattcccttttccgtgtcaaatcccacgttttctcccgtctctcccacacggatgtcatgtacgcccagcatatcgccgatgtattcattcttcttcacgattgcaggataatctgcccctgcatcgtccccgaatttttttgcatatttctttttcgactttaccgctttccggtataccttatccggcatcggattgccaaaaataacttttgatttttcttccattgcctgtgttccctttcttttcttacaatctctgtcgctctgccgctgccgcaaagtgcagttccaccggttcggtctgtgcattccggatgacaagccgcgcctcgccgcactcacccgttgtctttatgtaggtgccgcccattccgccctccagcgagatgacagacggtccgatcagctccaccggtccgctcacctcaaagcttaccggctcattgaagaagcttagcagattgccgtattcgtccctcgcctcaatccggacggctgccacatcgtaggtgcttttctcctgaagtcccgtatgatccgcccgtgccagaagccgtaccttcgtcatcggctttttgatgagttccgcggtcacgccgccgtccgacaccgcctcaaaccggtatgtcgtggaagtaccgccccagtctccgatatagcggttatagagcaccaccgcatcggtcggcttcatgtgataaaggagcagcatcttgagcgccgttacatacacggatttcggaagatgcgacagtccgtagcgtgcggtcgcattcaacgcatccttgattccctttccctgcgccggagtaaaatgttcgcccttctcgatcgcgtctccgatataatcgtcgaccacgagcggtccgtgcggcagatgtttccacggggaatcctctcttttgtattccttgataaaatggtcgtttttgtacatccgcacactgtctgcgttggtaaaaatgtaggtctcgccgcggttgcagcccgggtgctcccctatgtccatggaagaactcagttccagaaccgtatgctcctcctgctggcattcatagaccttcgccgccagcttcggattgcggaacatatccatcacgccgtggtaacagatgcggtctccgctgccgaaatccttgtgtgtgttgtagtcaaacatacaccagccgaagcttcccgcaatgtcgccctccgctgccgcagcgtcgagcacccgcacatgccgcagcgcgtgttccacgcggtgttcctcccagtcgaacgccttggtcggatacatatgtccgttgtactcgctgatcagatacggctttttcggatcggaagtcacagacgtctttttctcacatccccggtttgttccgtcatgcacaaaatcattgtaagtgtagacatcctccagaaaactgctctttttgtgcgcccgcacaccgcctgtcggtctggagggatcaagttcgtgcgccgccgcgtttgtcctgcggtaaaaatcatcatcgtcctgcgactcattgatgcgcacgccccagagaatgatcgacgtgtggttgcggtactgcatcaccatatcgcgcacatttataaccgcctggttcttccacgcctcatcaccgatgtgctgccatcccggaatctccataaataccagaagtccgattctgtcacactggtcgataaagtaatgggactgcggatagtgggatgtccgcacggcgttgacgccaagctcatactttaaaatatccgcgtccatccgctgcatggattccggcatggcatatcccacatacggatagctctgatgtcggttgagtccgcggagctttacttttttaccgttcagataaaaaccgtccgccttaaactcggcatgtcgaaagcctgtgaccgtcacattttcatccagcaccttttcatcctggatgagctgtgtgcacacctcatagcagaccggatgaacggtgtcccacggcagaacggattccaccgtatagtcgagcacaagctttgttccggtcagttcacattcgcccagaagacggtagccgctctcgccgcatcttttgatcttctgtctgacgctaagattctccccgccgccgtccgccgtaatctcggagatcagtctgccggagtcaccggaaagatctccccgcacaaacacatccttcagataggttttctccttgatgtcgagccacacctcacggtagagtccgccgtatgtcatatagtcaatcacaaatccaaacggcggtatattcacgctctccctgctgtccaccttgaccaccagcgtgttgcggatgccgtagacggcatcgtcgctgatgtccatcgtgaatgccgtgtagccgcagtgatgttccccgatcttcttcccgttccagtagacttcgctctcatgcgccgccccgtcaatcgtgagcagcagacgttttcctttccattcttccggaatatagacatctctgcggtatccgctgaccatctggtaaacagattcgtcaaaatagtgaagcggtgtctccttcaccgtgtgcggaagccgtaccggagtcatatttcccacgtcgaagccatcgcccagcatttcttccgtaaattgttccgaaaacttccagtcgtcatttaaatatactctgttctccatgttctaccttcgcctgccaccttcctgcattgccacgtgtttatcccgccgcctccggaaccacgattccgtttaccagaatcgaaaccacctcatcgagcgcttccagataggaaagcccgctctgaatcaggatatctctctggaaaaactgttctaccgtagcttccagcatcatcttcacaatcggaatgctgaccttgcggatcacgccttccgccattccctgctccagaagctggatcgttgtctcccagccggtctccagtctcttttccacctgtttgtaaattaccggatacttgtcctttaacagataaagctgtctgaaatccacatcccggtaactctccgggatcactccgagaatccgtctgatcttctccaccgtagatagcgcatcgtcctccacgatctgctgttcactctccttaatggaatcgaacatgtaatccaccatcgcaagaaacatcgactccttgtcgcggaatacggtatatatggtctttttgctcattccgaggatctttgccacatcgtccatggtgaacttcaggcctttctcattgaacgccttgatcgttccctccaggatcacttctttctgctgcatctatgtcacctccctcttttggaaactatttttctttttctggtttcctttattctatcacgatttccaggttctcacaagaaaccgaattcacaaaatcagtttccattttttgtataaatgtactaaattccgggctttcaagcgcctgcgcgttcttgcaatcccgccgtacaatgggtataatatggttaattacagacatggaggacatcatggaaaacgatcatatcagaacgattcttaataatattgaaaacggaacgctcaccgcgagcgaagcctacgcgcagttaaagctggctccttttgaggatctcgggtacgccaaggtcgatcatcaccgcgaagtgcgtcagggagcgccggaagtgatctacggagcctccaagaccaaagaacagatcgcgggcatcacgaacagtctgctcgcccactgtccggagaatatcttaatcacgaggctttccccggaatccgctgcttacctctccgagcgttttacgctgttctacgatgaggcgtcccgcatcggcattgtgaaccgtacgccgcatatcacagcggagggaaccatcgtcgtagccacaggcggcacgagcgacattcccgtcgcggaggaggcagccttaacggcagaagtgctcggcaacaaggtcgtacgcgtctatgacgtcggcgtcgcgggactgcaccgcctgctctccaacatggagctgctctcatccgccaatgccatcgtcgccgtcgcaggcatggagggcgctctcgccagcgtcatcggcggtctcgtggactgccctgtcatcggcgttcccacaagcgttgggtacggcgccagctttcacggcatttccgcgctattgtccatgctcaattcctgcgccagcggcgtatctgtcgtcaacatcgacaacggcttcggcgcgggctaccttgcaagcatgatcaaccacatcggcggctgatcacaccatccatcactctaacaggaggtttcttctcactatgaaaacaatttatctggaatgtaatatgggtgctgccggagatatgctgatgagtgccctttatgagatctgcgatcaaaaagaatggtttttgcacaagatgaacaccgtctttgccccttatcatatcgtgctttctccggaatccgccgtaagctgcggtatcaacggaacccacatgaaagtaacggtggacggtaccgaggaggtctctctcgatgtcaaggcgggacatgcccatcacacgcatgcagagagtccggatgcatcctttgcccacgaagcgtccgattctgcggaggacggacactcccacacgcacaccacctacgccgccgtctgcgaggagatcgcatcccttgatcttcccgcagaggtaaaggacgatgcgctcgccatctaccgcctgctcggagaggcagaagcaaaagtacacgacaccacgttagagcagatccattttcacgaggtgggaacactcgacgcactcgcggatgtggtcggctgcgcgcttttaatccgcacgatcgcaccggagcagattctcgcgtcgccccttcacgtcggaaacggctttgtaaaatgtgcgcacggcgtactgccggttccagccccggcgaccgccgagcttctgcgcggcattccgttctacaccggctccgtgaccggcgaacttttaaccccgacgggcgctgccatcctgcactattatgtgctgcgctatctccccatgccgaccatgaccgcatcagagatcggctacggcatcgggtcgaaggatttcggcatcgcaaactgtgtccgcgctttcctcggcgacaccgcctcctatcttgctgccgaagaggaaccgtactcctgtgacgataccattttatcgatctcctgcaacatcgacgatatgaccggcgaagcgctgggacttgcaacggagatctttatggcagccggggcactggacgtctttacaatcccgatccagatgaagaaaaaccgtcccggcattctcttaacctgtctgtgtgagatggaggaacgtgaaaaatttacagggctcttcttcctgcacacttcgaccagaggcgtgcgctatcaggtgttcgagcgcgcaaagctggaatccacttttgagacgcgcaagacctcgtacggcaatattcgcatcaaaaaaagttccggctacggcatccagaaggaaaaagcggaatttgaggatttaaaatccgtggttttaaagaaccactgtgctctctctctaaatgaagtcgaaaaatccctgcactaaaaaacgtgcgggaggctgcatattctgtagtctcccacacgttttttctgtaatgtaatgaatcccagtctacaggttttcctcttcgatcgtaagcatcccgggtcttaccgcaagttccacaccggggcacttttccttgtactgctccatcaaaagcagccagagctggtgaatgtgatccgcaagcaccgccgacatctccacactgtacggcagtaaggtgtgaaggtcgaaaaagcggattccctccggcggcagaaagaccagattgcttgagcgctccttatccccggatttcttgagcagctcataggtaatcatgcagaattcttttccgcggtagttacagctgtaagacgcataacactcatcaatcgtccactttgttccgtgctcctcctcgatcggcttctcggaagcatcatttccctctgtggtctgtacttccagtctccaggaaagcttctgtgcttttgtctccgcaatcatctccgtcagtttacggcataattcttcctgtttcatttctctacctccgtattctcccagcggactgccttcgccttctgcaatgcttccggccgctgtgccgctaccgccgcttcatccgacgcatggcggtccagccagtctgcataatacccgacagcctcttttgtgctgtcaaactgatacagcaggggcttcctgccccagtccgccacatagacccggttatagtccagatacgccgccaccgccgtctcaccggtgtcacggtgcctgtaacactgttccatcaccggttcgccctgcacttctttcagtccggcgcctttgatcttctgctcgagttcttccaccgaatcaaacagtgaaaataactcaagctgtccctcaacattcttccctgccatagccttcctcccgcacaagcccggatcagccccagattacgctctcacatagatctcggacaaattgtccagaatctcgcccgcgacatccggcttattcatagtatagatatgtacgtgattcacgccgttggcaatcagatcgataatctgatccgtcgcgtaagcaattccggcctggcgcatcgccgccggattatccccgaaacgatccacgatcgccaggaaacgcggcggaaccatattgccggaaagcgacacgatcctcttgatctgcgccttgttcgtcaccggcatgattcccgcaaccaccggcacatcgatgcctcttgagagtgccttgtacaggaaattgtacagaatgtggttatcaaaaaacatctgtgtcgttaggaattcacagcccgcatccactttttccttcagatgatccagatcctcaaaaatggtgtccgcttccggatgtccctccggatagcaggcgccgccgatgcagaaatctccctgtgctttgatgtccgcgatcagctcactcgcatgacggtactggttcggaagcgggaaatccgcattctgcggaatgtctccccggagcgccagaatattgctgatctgcttctcttttaactcctcaatcacggatgccaccttttccttcgtggaggaagcacaggttaaatgtgcaagcgccggaatctgatgcttttccacctcgctggcaagttctaccgtatagtcggacgtaccgccggtcgcgccgtaggtcacgctcatatatgccggcttcaatgccgccatgtccgcaacgatatttttgtagttggcaagctgcgccccctgtttgggtggaaacagctcacaggaaatcgtaacctgatcggtctttaataattctgtcagtctcatctgctctatcctttcttctgcgtcatgcctaaaattttctcagcttgtctgttccgtcatccacggtattctcgatcttgcggatcgtgacaaaataagaataatcatcgttgacccgcacttccacgcggtctcccacccggtgtccaagcagtgccttgccgagcggcgactcattgctgatcaagttcttgagtgaattgccgcgcacggtggtgacaatcttatagacttcttcctcatcgtcctcctcgaaatacacggtgacggtgttattcattccgacttcgtcctccgcggaatccgtagatatgatcttcgctgtcttgatcatcttctccagatagcggattctgctctcgttctggttcttgtccttttttgccgcatgatattcaaaattctcgctgagatctccctgggctctcgcctccttcacagcttcaagtgcttccttgcgcacaaccagcttgcgatactcgatctcctcttccattttcttgatatcctgctctgtcagttcatcgtacatgatctatcccatcctttttggctgatgaatttattatagtgattttaggaaatgccgtcaaataatttccgcagatcaacgttctccacaggacaccccgtgatgggatgtcccgcgcagaccgacaatacatagccttttaccggcacttctgtatacagataaaactgcccggcatccgcttccctgaccgccgcctctgctgcaggcgcagtccttcctgccacctgatcctccagcacatcaaaagaagaaagcggcaggtgcagtccttcccctaccgctttgcaatagctttccttgcgcgtccagagtcttaaaaacgcatccggtttgctccgcagatacgcattctccgctgccgtaaactgcctttgcataacattcacattcacgcgccgcgcccgttccacgtcgatgccaaccgcgccgtcgtcaaataccgccgccgcatagtctcccgcgtgggacaggttaaaatgcacccccgtcccgccggaaagttccggctttccgtgggcaccgcgcaccagatgcaccgtctctgtccctggcaccagcggaagcagggaacagccaagacttcgcagaccatactccagcaacaaacctgcgccaagacttctcctgcgatcctcctgcttcccgcagcgcgctattttctcctgtctctctgcgggtacataccgcagaagctcttcgtacaatgccgcatcccgcagcggcgaaatattggttatcagaaccctcatgccgtctcctttaacagggtattcagcctgtctctcgccgccagaagttcgtcgcaggcaggtaaaagtcccgccgtctctcccgcacgcagcggttccacaatccgcaccacaatatcatataacggggtcagtcccatattggcaagcattccctttaatgtatgcgcacattcaaatgcacgccccatctcccctgcgcgcagcgcctccggcagaagttcaaaattctgatcccccgccgccgtgtgcaggcagctgcggtacagctccctgtcgccgatgaaccgtgccagtgcgccatccacgtcacagccccagtttttcagggaatcaaacagttcctccattgtccgtctctcctttatcctttcctccggcaacagacatccgtttcaacagtctgccagcgcccagaacattttccactctgcgcatcgcaatctccggcacgaaaggcttcacgatgtagtcctctgctcccagctgcaacatctggatctggtgtccggtcgtgtcgtccgctgtgatgataatcaccgggattcccgcaaggacggcatcctgctgctttcgctttaggaattccattccgtccatcaccggcatcgcaagatccagcaggataatatccaccttgccggactctctgtttaagacctcaaaggcatccgctccgttttccgcttcaaggatccggtactgttgctcaaaaatgcacttaagcagtccgcgatttacctcctgatcatccacaaccagcatcgtccgctctgtctgctccgctgccagaagtacctgacggtatttctgcagttcctgatccatcatccgctgttccgtaatatcggtaagcgtaccgacgataatgtgcttttcgcccacgctcgtgatgtatttcagcttcagatgtacccagatcgagcgtccgctctttgaagtgcgcaaaaattcgcaggccgcggtctccttcgactttgcaatgtcctcaaacgtgtcgatgagaatcttcctgctctcgtctgagagctgtttttccatcacaagcccaccagaggaattgatatcctcgtatccgaacatgtcatagtaggcgttgttcacgcgcagcgtatcaatccggttctgctctttctcatattcatagatgaccgccggctccatcatgccggagaacacgcttcccatctgtgaagtcgcgttccagagcatatccctgccgatctcgtccttctgatatttctcctgcagttcgtcctttttctcggataccagcttttcataatcggacaccggcatcggtctcgcaaaataaaatccctgtacatactcacatccgacgctgtgcagaaagtccacctgctcccttctctctacgccctctgcaatcaccgggagattcagccattttgccatgcgcacaaccgacgcaagaatattctggctgcgcccctcctgatccgtatccgacagaaatttcatatcgatcttgagcacatccacggcgatatcctttagcacatttaaagaagaatatccgcttccgaaatcgtccatcagaatagaaaatccttccttctgcagacgttccattgtctccttgatcgccttcgggttcgtcgtgtaggcgctctccgtcagttccagttccaacagttcccgggggatgtggtagcggtccgtcagtccgcagattgcctccaccagtcttggattatagaggctgaccctggaaatgttgaccgacaccggcgacggctttttcccctcggcaatccatcctgcaagcagcttacaggtcttctcccagacgtagtaatccagcttggtaatgaatccattgcgctcaaagatcggaataaattctcccggcgagatcatgccgccttccggctttgcccaccgcaccagcacttccgccccacagatcctgttgtcctgcaggctgtacttcggctgcaggtaaaggacgaattcctcctcgtccaacgcatgccgcatatggttgacaatctgctgttcccgcacgatgtcttcccgcatctcatccacataaaacgcatagttttcgatgtaattgcctttgcactgcttggcagccagattcgcccggtcatacatcgcatcaacggagagatcccgctcccggatcacatagattccgattgccggcaccacatcaaaagcgagctggtactgtccgagacgcatgcgcatgtagcgcacaagctctaacatcgtctcctcgcccctgtacggcatgcagatgccgaaaatatccgcctcgattcttccgtaggcaatctgttccgtatctcccgcaaatttccggatctccttcgcgatatactgtaaaagtccgtcaccgctgctgcttccgaagaaagaattcaccagttggaacttttcgatgtcgagacgtaaaaacgcatacgtctcttcgggatgtctcttaagcagaacacgggttgcttcaaagaaatgcgtcttattataaattccggtgagcatgtcgtaatctgcacggtatctcaattctctcgaaagctgctgttcactgctgcgcaccgcattttccacccggaaccgcacgatctgcggatcatacggttttcctataaagtctcttgcccccagtgccagacatgccttttccgtcttgacatcacgctccacagacgccacaatgaccggtatccgacgataagaatccaccttgcggtattctcttaaaaattcaaacccatccatctgcggcatgaccagatccagaatgatcgcagatatcgcgtcaaactccttctgcgattccagaatccgaagtgcacctgcaccgtctactgcctctacaatctcataagcatcctttagcatctttttcaatgcgatccgatccagctctgaatcgtccactatgagtaccttatctctgctgcccatactcttaccccggtttcttttattctcctggttcctatccgattcgtcctatattcctaatctgcattcgtcatcaaacgcatcataacctcacttcatcatagcaaagttaccgccgcatttcaatacttcgggcaaaagaagtaggaaaaaagccctacccgctattgcggcttctctatgacagcaatcgcctttttgaactggaagaaaaacagaacaagcgtaaagcttaccgcgatcacatccgctgccggctctgccagatacacgcccatggtctgatttttcaccagatgcggcagcagataaataagcggcagcaacagcacaaatttacgcataatcgccacaatgatcgaagcccccgcattgccaatcgagataaatgtcatctggcatgcaatctgcgccccgaaaatacccatggcggcacagtagatgcggagcgcccacttcgtgtatgcgatcagctctgcgttggaggaaaaaatcattgcaaacatctgcggaaacagcatgattaaaagccataccgccatcgaatagcacaggcttgtggtcaacagcagacggaatgtccttttaacgcgctccgcatttctggcgccgtaattgtagcttgtgatcggctgggcgccctgtccgagtccctgcatcggaagcatggaaaactgcatcgcactggatagaatcgtcatggctcccaccgccacgtctcccccgtatttgagcagcgaggcattgaagcagaccgtaatcacgctctcgcttgcctgcatgataaacggggcaagtccaagcgccagccccggaagtaccacgcccgcttccatgcgcagatactttttgcggatttttaatacagtcttttttcccgtcaggaatgagagaacccagacggtcgataccgcctgcgagatcaccgtcgcggtcgccgctccgcggactcccataccgaatccatagatcagaaccgggtcgagcacaatattgcagcccgcgccgatcataacgctgagcattcctgtcctggcaaagccctgcgccgtgataaacgcattcatgccgagcgtcagctgcacaaagaccgttccggccgcatagattttcatataatccgaagcaaagccgatagtattctcacttgctccgaacgtcagcaacagcggtctgtaaaacagtaacagcagaaccgtgagcacggcggagatgacaatctgcagcgcaacgctgttgccgagaattttttctgcctcgtcgtagtcgccctttcccatcgccatggaagccctcggtgccccgccgttgctcacaagtgcggcaaatgccgacacaatcatgataatgggcaggcagacgcccacccctgtaagcgccagcgctccgtcttccggcatatgtccgatatagacccggtctaccaggttatataacaggttgatcagctgtgcaacgatcgctggaagcgacatgcgccacagcagtctcccaatcggatctctcccgagaaaatcatttttttgttccatatcaacggttcctcccatcatctgtctgtatcaaaaaacatctcgtccaaatataattcgttgaatttcgggtgcatggcaagcgaaagttcctgtgcgtgccctgtgatagacgcaagcctctgttttgccgccgtcctgtcgtcgagcagataccgctgtgctcccgcaagcgcactgttgccaatcatcgtgatatgtccccggaattgttccgggaacagtccgatccggatagtctgctcctcgtccatcctgcagccaaaacctcctgcgatcaggatttcttcggggtctcctccgccgtattccgcgagcagcgtctcgatccctgcgcggatcgccgccttgcccatctgcacctgtctcacatcctcctgccggaaccggaatctgccctccgcgaccggcatgccgtccgtaaaccagggttcctcaaacgtcccgttctcatcgatgagtccgagccgcacggcttctcccacagcgtcaataatcccggttccgcataagccgatcggtgtctcaccagcgatggtgcttaactccacggttcttattcctcctatggcggcaggatctctctccagaaccaggcttgtcacggctcccggaacgcccgcaacaccgcaggatatattcccgccctcaaagaccggtcccgccgctgcggaagtcacaagaaatccatccgctcccccggctgccatctccccgttggtgccgatgtccagcagcaacgcatttttcttccggtccatttccaaggcatagattcccgccacgatatccgctccgacgaaagcagagattccgggcaaaatggtcactgacacactccaccggtcagacagtgcaagctctgcaccgctcccctcccagagagagagatcctcaggcgtaaaaggcgccgccccaagccccgcacaggataatccgcgcaggagatgacacatggtcgtatttccgacaatcacaagttcctccacagcatcatccggtatcccggcatccgccacgagtcccgcaagcagcgcatcaatatcccggcagatgctaaggcgcagttcccctgccgccccctcgtttgccgcctggattctggacagaacatccgcgccgtatgcccgttggtgatttaccgaggatgcggcggcaatccgtttcctctctgtaaggtcataaagcgttgcagcgagcgtggtggtaccgatatccacggcagcgccgcagcgctgtttcccggaatgcccccatatcttggctgcaccctctctgttgtgcatcgccgcgcaatctctctcaccagggatggctcctgccgtctgaccggggataccttcatctaccgtccgactggggatggctccgtctgctgcatccgccgtgaccagcacatcgatctcctgctcccggcttacgggaagctgcaggctgcatgcctctgccacgcgcacttcacacgccaggcgcacgccactgcttcgttcttcctctgtgagcagcctccgctcatttgccgtcggctgtggtgcctccgacacaaagcgcacgcggcatcttccacaggttcccttcccaccgcagggcgcatccacataatatcctgctcttatcagacgcatcagcagcgtctctgccttcccgcccgatcccgccggaagttctatcacttcttttgcatattgaacgttcatcctgtcattcctccccgcgttatggcgtgtagtccacgcctgcccgcctcgcctgctcttcctgttcctcctccgcgatccggtatatccggttccctttccggaaaaaagtgccggtccgcaaaaagcggaatgcaaccccgcagttcacgcactggttcatcagttccagcacccaggcaaaatcgcatacacgcgcgtctgctccctgttcgccgccgcagagaacctgcgcaatctccccggtctttagatacgcatccagcaccagtttttcaaggagcggttcgcagagaattcccttatggcgcaccggcagttttaaaaatgcaggaatccggtcatccgcgcgtctctgaatctccaccgaacagagaatcgtcacgttttcatagccgtctccccagtcgccgggcagtgctttaaaaaagcggtgctccctctttgtctcaatcacaaaggaaagatcctgccgctccttgatcatcgcccacgcctcgctccgccattcatccgcctccggcaggaaaaaatccgacgtcatgcacacatagaccggttcctcctgtggcagcagcttgtattctcctctccggttcttctttaccggcagatcaaaattggctgtccttcggatcacggacgcatttttgccgtacatcgcatctttttcatatacataacagttgtcgcaccctgcactgattttcttgcagccatgccagggattccagaccgccatacgaaacgcgcctccttcttctttcctttttgtccgccggatggtatacttatcacaaatctggaaaaagtaaaaccgctgccacatccgggcagccacagaaaggaattgtctatgaaactgatctcatggaatgtcaacggtctgcgcgcctgcatgcagaaaggcttcgcagaattttttacagcaagtgatgctgatattttctgtatccaggaatccaaactgcaggaggggcagattgattttgcaccggagggctattacgcttactggaattatgcgcagaaaaagggctactccggcaccgccatttttaccagaaaggaacctctgtcggtgcattacggcatcggcattccacagcacgataccgagggacgtgtgattacgctggaattcccggatttttatatggtcacctgctacacgccaaattcccagaatgaactggcaaggctctcctaccgcatggagtgggaagatgcatttctctcatatctaaaaggtcttgaccggaacaagcctctgattctctgcggcgatctcaatgtcgcccacgaagagatcgaccttaagaatccgaaaaccaaccggaaaaacgccggttttaccgacgaggagcgcacaaaaatgacggctcttttatccgccggcttcaccgatacgttccgccatttttatccggataccgagggcatctactcctggtggtcctaccgctttcacgccagagagaagaacgccggatggcgtatcgactacttcatcacctcatccgcactcgatgaccgccttgtggatgcaggaattctcaccgatgtcaccggctccgaccactgtccggtaacacttaccgtcgatctgccattctgtccatagcactatttctgccgatagacatgacagtaaagcacgtcccgcatggtctcaaattcatccgccaaaagccgcttcggataagacatgatccgaagcgggatggcatgtctgtcctctcccatcgccggctgcatatactcaaacggattcatcacgaatccgtttctctcataaaatgcaatccgtctggcttccagttcaccggtcggcagttccacctccagtataaccggctttctgctctgcgccgtcagctgtgtcagaagtaccgctccaagtccgccgtttcggcatgattttctcacggcaaagtgctccacaaacaggaatgtatcaaactcccacactgccagaaacgccatcagttccccatgtgcacggtacccgtacaggtgataccatgagacatccagtatctttctctgcgcctctctggatcgtctctcgtcccgcggaaaactctcctccataatctcccatacgctatcaaaatcccgttctgtcagtgtctctaaactctgcatgttctctctcccgactgattctttcttacttacttttataccataaaataagattatagcacaaatttcctatggaatcaaaccgcgctgttttttgcctgcgtctcaccctctccgatcctgatggtgcggaagccctctccatgcacttcattggactctaatataatcataaaggatgccgggtctgcctccttgatggcatgctgcagcagatacatctctttgttgttgcacacgcacatcacaatctgtttgttgtcacagcggtaaccgccctgtccctgtaatatcgtagagccgcggccgcagcaggaatcgatcacatcgcagatctcctttccatgctccgtcacgacaagtgtcatctttccggaattgatgccgtacatcagcttgtcgaccacgattgccagcagaaaacttacaatcattccgtagataattccatccacatcccgaagcagaaatccacccagaagaatgatgatcacatccgtcacgaacgaaattttcccgacagaccagtacggtttcagattcttgactgccataataataaagtcggaaccgccggtcgaagaattctgcatgtaaatcaccgcatatcccagtccggcaaacacaccggtacagagtgccgcaagcagacggtctcccgagtaaaccgggaacagtggcgcgacatagtcaatcatcagggaagaaatcagcatacagcgcagtgagctgaagaaaaagtgtcttcccagcagacgatagcacaatattgccaccggtatattcagcagtatcgtggaaaatccgatcggcacgccgaacagctggtataaaatgatcgagataccggaaaatccggtcatcgggaatcccgcctgcaccgcaaaattataaatgccggcagcaataaacgcacttcccacaacctcccagaatatctgttttaaaaatacttctctatctttttttttcattttcatccatccttcctttgcatgcgggtgtctccacaacacaaaaaaagagcaccagcagattatacgaatataatatgctaacgctcttttccgtatcctattgtagcaccggaatccggaatttgtcaaatatgtttctctttacaatcaggatgtgtcgtgttaatatgcttcatatatgaaccattcatatatgaagcatatgtatacaagacatctcaatatgaatattccatacgtgaagtattattttatcccattgaaaggagcatttacctatgaataccggtattgaatttaccatgaagctatcggctgcctacagtgctgtatgcagacctttgtgccacgaactgaatctcccgcagaccgcgttcgatattctgatgtttctggcgaacaacccggaatataccaccgcacgcgatattgtggaagtccgcaagatcaaagccaacctcgtatcgatcaacgtggacaagcttgtcggcgaaggttatctgctgcgcgaggcggacgcagacgaccgccgaaagacccatctgctctgcacagacaaagccggcgctgtcatcgaacaggggcgcacccttcagaaccgctttatggacagtcttctggcgcatatcgatgatgctgccagaaaacaactcacagaaagcatccatcagatggagcaaaatctggatcacatgttagaggaggaacactgatatgacattattattcacgatactcgtcaccttttttgccggcatgggcgccggactcggcaccggcttcgccggaatgagcgcagccgccgtcatcagcccgatgttaatcacttttctggatgttgacccctatatggcagtcggcatcgccctctcctccgacgtgctcgcaagcgccgtctccgcctacgtctatggaaaaaacaaaaatctggatatccgcaacggagtgattatgatggtgagcgtcttaatcttcaccgtcatcggaagctacatctcaagccttgtcccgtccaccaccatggggaatttttccgtcttcatgacgtttcttctcggcatcaagttcatcgtaaaacctgtcatgacgacaaaagaatccatggctcaggtctctgcgaaaaaacgtgccgtccagtcggttgtctgcggcgtgatcatcggatttatctgcggtttcatcggtgccggaggcggcatgatgatgctcttaattttaacctccgtgctgggctatgagttaaagaccgcggttggcacgagcgtatttatcatgactttcaccgctctcaccggagccgtgtcgcactttgccatcggcggcgctcccgactggacaatctttcttctgtgcgtggtgttcacgttcctctgggcgagaatcgcatccgtattcgccaataaggccacaccaaagacgttaaaccgtgcaaccggtgtcattcttgtagtccttggcatcgtcgtgctggcgttttccttgttgtaaaatctgtaaaatagcagataaccagaatatgcttacaaatatgccgatcggacgctggcagcttcccaccgccgccagcgcccggttccccgcaaatctcccggtcacagccatacctgcctgacatctttaaattcggtgccgatcatccagtctctcacaattcttggaattctccatgcataggccggtgtaacaacaaaaagatatcgttctacagggcattataaaacctgagacatacaaatacaagagtgtgcaacgccagcttttgtacaatccataatcattttctcacacatctcataccccagcctggagctgttcatagacagtgtataattgcctgccattccccatttctgctccgtgtaaaaacgataatttgtcatacgccttttatcaatatccgccatcatttttactgcttcggcttcggtgacatggtacagcctgcagatgcgctgcactttttggggcatatcgccgtgtataaatacattcagcacatcctctctgtccttcaaaataaaatctgcatttcttcctataatgacgcagctctccttttctgcgatctccagaatcacctttctctgtgcttcgtacaccatatcttccacggattttccggtaaggtcgcgtccggcaaaagcatagccaaacaaacctttctttggagagagctccgcattttcctttatgtactccgtagaaaatcctgacttctctgcaatctgaccgatgatatccttatcgtaataggcaattccaagcttctttgccacttcttcgccgataaaacgaccgccgcttccgaattctctgctgattgtaatgattctttttgccatctcaattcctccctaacttaaacgctccactttattttttctgattctctttaaaaatacatagcccaccagacacgctatcatctccgtgatcggaaatgcccaccagatcagtgagatgcccatctgaccgtttcttgcaaaaattgaaaaaattcctgccagcggcaatatgatgacaagctgtctgagcagcgaaatcaccagtgactcgatacctccgtccaaagcctgataaatgccctgatatgccacattgattccggcaaagataaagctgatggagataatccgcatcgctccaataaaatattctctggattgcccggcattaaacagtgtcgcaaatgctcccgggaacacttccgtgataatgataccaaaaatcatcagcgccgctgtatacaggagaccgtattttattccgtccttgattctctttttgcttcccattccataagcaaaagcaataatcggtgtaattgcatctctgagtccgaatgctaagaacaacacaaactgctggactttatagaacagtccgtatgcggtctgtgcagaagggctgaacttcagaatcaggttcatcacataaaccatgatcgacatcagcgcctgcgcaatgattgccggaagtccgatcgcataaatttctcttatgataccggcatccggcttcatgtactccactccatgctcaaattcctgattcaatttcatatggaacataaacagcaataccgcggatgccacctgaccgatcaccgtcgcatatgctgcgccttccactcccatttcaggaaccggtccgataccatagatcataatcggatcaagaatgatattgatcacggctcccacaacctgaccgatggtcgaatatagagaacgtccggttgcctgcaataacttttcaaataaagaaaagaaaataattccaaaggaaatcacgcagcatattctaagatagcttgttcccatcgaaattactttcggatcaaccgtctgtgaggaaatatatgccttcactccgacaattccaaacaacagacatactgcataaatgattcctccgaggaataaactgttgcctgcaaccttcgctgccttttttgtatttccctgcccgagtgtccttgccagaagtgcatttgttcccacacccgttccgattccaactgccaccataagcatttgaaccgggaacaccagcgtaagtgcatttaatgccgcctcactccccactttcatgtttccgacaaaggcgctgtccacaatattgtagacagcctgcaatgccatggataagatcatcggtattcccatctgcaccataagcttctttaccggcatttccttcatcttgttactctctgtcatataatcctccttgtttttccgcacaaaaaaaatgtgtacctatctcataagctggacttacgctgataagctacacacttctttatggcatactatttattttaaaaacagaaaaacgagtagcaaaactggatttacgctagtctgctactcgtttgatccttattatatttctcattttagaaaaagtcaatatagcaaaagcgcaaaaggacagccacacacatacatgtgtgactgtccttttccctatctatacattaccttctcctaaaaataacgcatatgatttatttgtttgcgattgctgcctgtgctgctgcaagacgagcgatcggcacacggaacggtgagcaggatacataatccagaccgatcttgtggcagaactctacagaagaaggatctccgccgtgctctccacagatacctacatgaagcttcggatttaccggcttgccaagcttgattgccatatccatcagcttgccgacacctgtctgatccagttttgcaaacggatcgttctcgaagatcttggtatcatagtaagcatttaagaacttacctgcatcatcacgggagaaaccgaatgtcatctgtgtcaggtcgtttgtaccgaagcagaagaaatcagcctctgttgcgatctcgtctgcagtcagagctgctctcgggatctcgatcattgttcctacttcatactcaagctttacacctgctgctgcaatctcagcgtcagcagtatcaacaacaaccttcttcacatactttaactcttttacttcgcatacaagcgggatcatgatctccggctttacagtccagtccggatgagccttctgtacgttgattgctgcacggataacagcctttgtctgcatctttgcaatctccggataggtaactgcaagacggcatcctctgtgacccatcatcgggttgaactcatgcagagaagcgatgatgttcttgattgtctcaacagacttgccctgagcttttgcaagcttctcgatgtcagcttcctctgtcggaacgaactcatgaagaggcggatccaggaaacggatggttaccggacagccttccagtgcttcgtataacttctcaaagtcaccctgctgatacggaagaatcttatcaagggcagcttctctctcctctacggtatcagagcagatcatctcacggaatgcagcaattctgtcttcctcgaagaacatatgctctgtacggcaaagtccaataccctcagcgccaagctcacgagctttcttagcgtctgccggtgtatctgcattggtacgaacctttaatgttctgtacttgtcagcccatgccataacacgtccgaactcgcctgcgatggtagcgtcaacagtcttgatctcgccatcatagatattaccggttgtaccgtcgatggagatccagtctccctcatggaactctttgccggccagtgtaaacttcttattctcctcgtccatagcgatgtcgccgcatccggatacacagcaggtacccataccacgtgcaactacggcagcgtgagatgtcataccgccacgaacggttaagataccctgggaagccttcataccagtgatatcctccggagatgtctcaagacgtactaatacgaccttctctcctcttgcattccaagcctccgcatcctctgcagtgaatacgatcttaccgcaggcagcaccaggagatgctccaagacctttgcccatcggtgtagcagcctttaatgcagcagcatcgaactgcggatgaagcagtgtatcgaggttacgcgggtcgatcatcaatactgcctcttcctctgtcttgtgtccctcatctacgaggtcgcaggcgatctttaatgcagccggagctgttctcttaccgttacggcactgtaacatgtagagcttcttgttctctactgtgaactccatatcctgcatatcatggtaatggttctcaagagtctcgcaaacctttaagaactcagcgtatgcctccgggaactcctgctccatctgagcgatcggcataggtgtacggacacctgcaacaacgtcctcgccctgtgcattgattaagaactcacccataagcttgttctcaccggttgccggatcacgggtgaatgcaacacctgtaccggactcgttgtttaagttaccgaataccataggcattacgttaactgcagtaccccaggaatacgggatatcgttgtcacgacggtatacgtttgcacgcgggttgtcccaggaacggaatacagcctcgattgcaagctttaactgctctacaggatctgacgggaaatcagttcccagctgattcttgtactcagccttgaactgctctgccagagtctttaagtcagcagcggtgaggtcgatgtcgtactgaacacccttctcctctttcatcttgtcgatgagctgctcaaaatacttcttaccaacttccataacgacgtcagagaacatctgaatgaaacgtctgtaggaatcatatacgaaacgctcgaatgccggatccgggtttcctgcgatcattgctgctactacgtcatcatttaatccaaggtttaagatggtgtccatcatacccggcatggaagctctcgcaccggaacgtaccgataccagtaacggattcttcagatcaccgaatttcttaccgttgatctcctccatcttcttaacgccttccatagcctgagccatgatctcatcgttgatcttacgtccatcctcgtagtactgcgtacaagcctctgttgtgattgtgaatccctgtggtacaggaagtccgatgcttgtcatctctgcaaggttggcacccttaccaccgagcagattacgcatggtcatgtcgccttcgctaaacatataaacccatttgttcgccattttgctaattcctcctaaactatacttactatgtaactatgtcagagccaacccctgccataattccgcaaacgaatgtgcgtctcccaaaacgcacacatctataatatcatacttttgctaaatagcaacaattattttcgtctctttttgctgttttttgtcacaatttcacaattcaaaaccttgttccatgatgtggaacaattttatgttacgtctgtggaaagtcaaaacgtaaaaaggcagaaccgcaatctccggttccgcccttctttttccagtccgattcagttgataaaaaacccacgctgcaggaaatcaaacagatacgttgcctgtttcaagaaatctctagccccgaagctgtcgagctttgcgatccagaggatcgacacgacaaagatccagggatgcttcttcatcctgccgcacatattttcacacgcgtaaaccatcgccgggtctcccttcgccgcatagaacagaaacataaaaatctgcatggcaaagagcggcgcaaaatgtctgccccagtccgtgtggatcacgaacatcggcacaaaacacagctggcttagcagcatgtaaaaatacggcgatgcataccacttcgcattgctctttttctgccagccaaagacatcccggtaaatctgaaaacaccacacaagcaccggcagcagcaacagaagaaccaacagcgcatgccggatcggtgcatcatatttgtaaaactggggtgtaatctccttcaactggtaatccattttcagaaaatattcaatatcaagcgcatattccgaaatggtgaggttcgttctcccctccagaaatgtcacaagttccttcgcactgtcaaaatggatactgctgaaaaactgaaaatataccgctaccgccacattgataaggccggatacaaacgcggcggcaaacctgccggcatgcaccctgttttcctcaaacacgtcatataccatcaccgaaaagacaatcggataatacaaaaatgcaaatccctggtgaatggcaagtcccacgacaccgagcacggtatagcagacacacttcacatatgtattcttaatcgtaagaccaacaagcagtgccagcagtgcaaccaacagcatgtagacatccagtctgcctaaattctgatcgttccacacataggcaatcgaaaacggtgcgacaaggtacagcgccaccgccccaaagacggcgtgccggatctgatcgttcttagtgacggcaagacggatcattctccccagcacaatggcaagcaccagtatcgtgagcatcgttcccacggcgacgtatttgtatgccaccgtgtaatccagatactctccgtaaaacaggcggtaaatgctcccgatgagaagccttgatcccgttcccatggaatagtccatcgcattccatgccgatgaccagccctgcaggtctaacgccctgcctgtcagaaaccagacgatcaggccggctgcaatcacaacctcatacgatacggcattccaaaacttttttatcttctccatctgcctaccacgcaaacttctgtgcaaagtaagcatccagttcctcgatcttgatgcgctcctgctccatcgtatcacgatcacgcacggtcacagcaccgtcgttctcagactcaaaatcgtatgttacgcagaacggagttccaatctcatcctgtcttctgtatctcttaccgatattgcctctgtcgtcaaattcacagttatatttcttggagagctgtgcgaaaatcttttctgcgccctcgtttaacttcttggaaagcggaagcactccgatcttaaccggagccagtgccggatggaaatgaagcacggttctcatatccggcttctcctcggtaccgatgttctcctcatcgtatgcagcacataagaatgcaagcaccacgcggtctgcaccgagagacggctcgatgacgtacggcagataacgctcattcttctcgtcgtcaaagtaggtaagatcctgaccggacgtctcctgatgtctgccgagatcatagtcggtacggtctgcgatgccccagagttcaccccagccaaacgggaataagaactcaatatccgttgttcccttgctgtagaatgcaagttctgccggatcgtgatcgcgcagacgcatctcgtcttccttaatgccgagggagatcagccagtcacggcagaagcctctccaatactggaaccactccagatcggttcccggctcgcagaagaactccagctccatctgctcaaactcacgggtacggaatgtaaagttacccggcgtaatctcgttacggaacgactttccaacctggccgattccaaacgggatcttcttgcgggaagttctctgaacattcttgaagtttacaaaaataccctgcgctgtctccggtcttaaataaaccgtattcttcgcatcttcggtcacaccctggaatgtcttaaacatcaggttgaactggcggatgtccgtaaaattgtgcttgccgcagctcggacacggaacctggttctcctcgatgaagttcttcatctcctcctgtgtccagccgtccaccgaactctgtaaggtgatgcctttctcctccgcataatcctcgataatcttatccgcgcggaaacgctcatggcactccttacagtccatcagcggatccgagaaaccgccgagatgtccggaagccacccacgtctgcggattcatcagaatcgcacagtccacaccgacattgtacggattctcctgaataaatttctgccaccatgctctcttgacgttattcttcagttcgacgcccagattgccgtagtcccatgtatttgcaagtccgccgtaaatctccgatcccggatatacgaaacctcttgattttgccagcgccacgattttgtccattgatttttccattctaaattcctcgcctttcttaggttatattgtgatatgtttatttgtaaacaatgaaagtatatacgtctgtctcgaacgagccgtcgccggacgtgctctctgtctgctcggtatcatccgtatgcacggtctccccggtcatttccgcctgttcggttcccggaagctgctcggtgccggtgttctcctgcccggtcacatccacggatgccgtcacacttccggtttcaagataatatccctcacggatcgatacgctgtcggttccagtcagcttcacattctgacaggagacatagcagatctcaccgtccactttcacatctgtattggcacggataatagccactttcagatcatcctcagagtaaatatcctgctttgtggcagctcccacaaccttgccttcctccacgcgggcgaactccccgtcatagacgtatcctgccgccagagaggcaacgactttcccctgatagagttcaattccgttaaacgcggtataatcctccggtgtcttgtacttcatcttaagcttcgccacaccgtcttccaccttaaggctctccacctcgacagcatttttgccatgctccgcggtgtaatcttccacctctgcatccacataggacttcagttccgtctcatcgtagtaggactgatcgagcgactccacatccagcgactctatcacgcctttctttcccacgtacacgacactttcctctccctccagcgaggtaccgcatccggagagaagtcccacacacaacagtacactgcagaccgtgcacactaatctcttcatcacataatctccattctttctgaaaaagtatcggtgatattatactattttaaaaacatgatttcaaccttttccgcatcctcaagtatctttaacgacttgaaggcgtgtcccacgtacacgccaaaatagctgcgcaaaagtctggtcagttcttccagcacctgcccgctcacggaaaacgtatataatttttcaatccgcgccaagatcacgtactgcatggtatagacggtggattcattcaattccaccgcatccggcgcctcattgcggcattctgcacagagaatcccgccgcgcttgacggaaaaccaggtcagatgctccctgctgccgcaggaaagacaggaaaacacattcggagcctcgccgtttaccgccagcgccttcagttcaaacaccgcgcgcaccagccggttgtcgtaggcactgctcgcaagggcgcgcagcgactggtacaaaagctttagcatctcgcgctcatcgttattttcctgacaataataatccgcaaactccagaaaatagaacccgtaatatgtagcatcaaaatccccggtcagttcccggaaatagttctgaatcgtcgctctggcaagcgtgtaagcacttcttccctcgaacagctcgaactctccgaagcaaaacggattggcagctgcgagaagctggctgttcggccgcctcgctccccgcgcaaatgctgtgatcttccctctttcttttgtcagcagtgtaatccgcttgtcatattcgccaatcggcattacctgtaagaccatcccggtcaccacaatattgtttcccatccggctgttcttcccccgccaaaatattactgctctcctgcacatccactgcattccggtagcgcaggtaatcagtcactcttcctgatactaaaaagtctctccaggcttcctccatcggcatatcctccgtttctttgacgcttcccgtctctaagattaggttctccgatggttccgccattataccagcaaaaaattggcagtatcagatatcgtctttattgtacccgaagttcttcatcatcagttcgctgtcgcgccagtccttgcgcaccttcacccacagttttaagttcacctgcgtatccaaaagccgctccatctcgtagcgggcgttcgatccgatcttttttaacatcgaaccgccttttccgatgataattcccttgtgggaatcgcgctcgcagacgatcgttgcatcgatgtcgatgatgttctgccctctccgttccttcatccggtcaatgtagaccgcgatgccgtgggggatctcatcatccagagcatgaagcgccttctcacggataatctccgcgacaatggcacgttccggctggtctgtaaccgtctcctcgtcatagaacatcggtccgtacggcagatacttgaaaatcacgtccacaaccgtatccagattctgttcccggagcgccgatgccggaacgatctcagcaaaatcaaacaccttgcggtaagcatcgatatactccaggatcttttcccgctccacggtatccaccttgttgataattaagatgaccggcgttttcgtcttctttagctgctttatgatatgctgctcgcctgccccgataaatgtggacggctccaccagccagagaatgacatccacctccgagagcgtgtgctccgccacattcaccatatactctccaagcttattcttcgcctgatgaatgcccggcgtatccaaaaacacaatctgtccgcgctccatatccgtatacacggtctggatgcggtttctggtcgtctgcggcttgttcgacgtgatggcaatcttctgaccgatcagatgattcatcagcgtcgattttcccacattcggtcttcctataatcgtcacaaatccggatttaaaattatctttcatcgttctcctcgtttctgtactgttttccccgccccgcatcaggtcaggctctcaagtgtctcaaacatctgtttttccgatgtcagcacatcttcattgccgatcacacacaggctgccgtctgagagcaccgacgcaatcaaaggcttcaatgcgcggatgtccgccggctgtgccccgataatctggctccgctccttagaaagcgtctcgtaatccagctcctgcagataggctgtcatcgaacgcgcacccttcgcgctcgggttcatcggcgtgtccatatcgctgatcgttccgatgatatatcctgtcatctcgcgctcatcggcatcaaacttctcaaggtacgccggaataccgtcataaatctcattcgttgcagagagattcggatcccggtaggacacaaaatacgtatctccgttcctcatatatccgttcatgcagccataagcgccgcccttgacgcggacattgatccacaggtaatcgtatcctaaaattacttttaagatgcggagcgccccgtgataggaaaagccgtgtgcggcataatttccggcacgcgccacatactgcacctgggatgcgtccataaatccctcgttcttttttgccagcggataggacggcatagagcgattcttacccggctgatccggcacatacaatacatttttcaatgcagccgacgcctgcgtcaccgccgggatctccgactcctcacaggttgcactcaccagcatacgctccgctgtaaaaatggttttcacaagggaggacagcttctccatcagctgctgctttttctcctcaaaatgctcctcgtaatccgcgatcacacggtagcaggcaatgcccgccgtcgcgtcctggcagtaggcagccgccgaaaaatacgacagcgctctcgtatatgccacggaatgtccggaagcgctcagtcccgcctgtaatctcgactttaactgtgccagtatctcatagagcctcttctcatccgacagatgcgaggtcagaaggatctccttaatcaagcgcattgcatccggcaatcttgacgcgagcaccttcgtgcgcacctcatagtaaagtccgatttcgccctgctttttgacgttcgggtagatgccgatgctgctgccgattcctccggtgtacatattgatctcattggcaagcgccgcgtaggaatgattgtccgtatccacatatcccagcactgcctttaagataccgagataaggcagatcttccggcagaatatcgcacacatcaaacagataggtcaggtaatcaatgccgttcgtgtccatctcatgcgcaatgatggaaacgccctccgtctcaatctcacggttaagaagcggcgccgcctcttttttcagatccgctctcgtaaggcgcggaatcttctctaagtcttccttcggcgacggctcttcctgatactgctttaagtgcttcgtgtctgcgatcagcttctttcgctcttccctggacaatcccgctttgtattcggctaacttcttctccagcgcggcatctctctttgcgcccagcccctgctccggcaccgtaatcactaccgacgcatgcggattgtccagaagatatgtctttaccagttcctcataatatccggttccgatctgatccttcaaaaactgataggtgtccagcgcttccagatgcataaacggctgcatatcatcgaacagccagctgtccagacactggattccgtagagcagtcccttcggaaactgtccaaaatccgcctcccggaaacggaattccgagctgttgattccggccaacaatgcgttttgatcaattccgtctgccacctgtgcctgcagcgtctcacggatcacctgcaaaaactgctccttctgctccggattcgcattttttgctatcacggaaaataccggctgcagcgtgctgttatcatagccgccgccgatgtccataccgattcccgcatcgatcagcgcctgcttaagcggcgctcccggcgcagaaagcagtgcgtagtccaaaacgtcaaacgcctggtataactttttgtccagaacggttccgaccaccacattgtaagacaggtagctgttgtccgtaagcggctcccccgatgccaccggataaggctttacgatctccaccggcgcggcgaacggcttctgcttccggattgcggaatccagctcaatctgctcgtattttccgaggtattcctcatccatccagcgcagcttttctgcaacgtccatatccccgtacagatagatataggaattgcacggatgataatactttctatggaagttcagatactgctcataggtaagctccggaatatgctccgggtcgccgccggattcgtttgcgtaagaggtatccgggaacagtgaatttaaaatcaggcgctccaacacatcatccggggacgagaaagcgcccttcatctcgttgtataccacaccgttgatcgttaccggcgcatcttcatcctccagctcgtaatgccagccttcctgctcaaagatctctctgtgcttgtagatgttcggatgaaatactgcatccatatagacactcatcaggttctgaaaatccgcattgttgcagctcgccaccggatagatggtcttctccgggtacgtgatcgcatttaaaaatgtgttgagcgatcccttgaccagttccacgaacggatccttgaccggatatttgtccgatccgcagagcactgtgtgctcaatgatgtgcggcacaccggtcgaatcctccggcggtgtgcggaagccgatgtaaaacaccttgttctcatcgtcgttggagatcacggtgattctcgccccgctctttttatggcgcagaatatatcccatcgaatggatatcctttaactcctgctcaccaagcagctcatatgccgtcaattctgaaagcttcataaatccataattcctttcctgcccggtcatcctgtatgcccggtatttacactgtgttctattataacagcttttcccattctgcaaaagagtaaactatctatagattttgtctggaacactctgcgaacggtgtccaaacgcaaaaaagaggctgcctgaatgcggcagcctcctcccatgtcttcacagatatattctactgataagaactccctatgcgatgcgtgtcacattcgctgcctgcggtccctttgcaccctcagtcacctcgaactcgaccttctcgccgtcctttaactccttgaatccatccatattcagtgcggaaaaatgtacgaatacatcgttgccctctgcatctgaaatgaagccatagcccttcttggcattaaaccactttacagtaccctgctgcataattctaaaaaccctcctcaatacagttctgacattacagactattcctgtctgtataaaccaacaaattgaaattagcacattttactttttttgtcaatctttttctatcgttattgtttaatttgcacatcaatctgctggtatgggatagaaattcctttcgcatccagcgcatacttgatattttccgtcatgcgccagcgcgccggccagtaatccccggtcttaacccagaccctgagtccgatgtccaccgaagatgccgccaggttgtccacatataccacaggcttctcctccgggattctggcttcctccttctccgccaccgcatagatcacatctttggctgtgcggatatccgcttcataggcgatgcccaccacgagatccacacgccgtctgtccttgttggtcacgttggtgaggctgctgttggaaagcgtaccgttcggtatcacaatcagcttgttgtccacggtaagcagtttggtataaaaaatcgaaatctccgtgaccgttccctcattattatgggaatgttcaatgatgtaatctccgaccttgaacggctttaacagcaaaatcagcacgccgcccgcaaaattcgacaggcttccctgcaacgccagaccgaccgccacacccgccgatccaagcaccgccaccgctgatgtcgtcgcaattccaaacaatcccataatgataaaaatcagcactacatacagcgaatacttgatcaccggtatcatgaactgcttgacgccctcatcggttcccgcccggtccatcgagcgccgcaccagctttgtgatccacttgatgatcctgcctccgatcacatacacaagcagtgcgatcagaatctggaatgcgaagtttaacagatccggcaccagcccttccagccatgtacggataatccccggattctttgctacctcctcaattccctcctgtgcatggttcaatgcctccacggtctccgtggtcgacgggaatgcatctgtctgtgccgccagataccttccctgttccaaaagtgccgctatcccgttcactctctcgtcctccatccgactttataatctttcttaaatttcatgaataaacagaccgctccttagcttcggctcgaaccaggtcgatttcggcggcatcaaaagtcccgcatccgccactgcgaacagctccgcaatggacgtcggatacattgcaaacgccaccgcgcagtcctgctcacagcgccgcaccagttcgtccatgccccggattccaccgacgaaatcaatgcgtccgtccgtcttcggatctctgatgccgagcaccggttcaagaagcttattctgcagtatggaaacatccagatctgcaaccggatcttccggcgtgcggtcctcctgccggatatggcaggaaaaccagtgtccttccatatacatgcaaaaggttccccgctccttaggtctggtatcctctgccccggtaatctcctcaacgtcaaaccgcttctcaacttcacggtacaatcccttaaaagaatacccgttcagatcgcggatcacacggttgtaatccataatcatgagttcatcatccggaaacaataccgagagaaaatagttaaactcctcctccccggtataacccggatgttccttccggcgcttctgccctacttttaccgcggacgctgcccggtggtgtccgtctgcaatgtagatgctgtcaacgcccgcaaacgcttcgtgaattgcggcaatatccgcatcctcgcggatgacaaacacccggtgtctcacgccgtcctccgatgtgaaatcatattccggctctccctgcttcgtcttttccacgatacgccggatcccttcattcgcgcggtacgccaaaaagatcggtccggtctgtgcgttacagacatccacatggcggatgcggtcgacctccttctccgcgcgggtattctcgtgctttttgatgatgccgttctcataatcatcgatggacgcgcaggctgccactcccgtctgcactcttccgttcatggtgagttcgtagaggtaataacactttttatcctccgtcagaaacgtgccgttctccacccattgccagagtgtatcatgtgcacgctcatacaccttgtcgtcatacatatccactgacagcgggaactgcgtctccgcgcggtcgatgctaaggaaagactgcggatgccgctccacttccttcgtagcttcctctctgttataaacatcataagggagggcagcaatctctgctgccttccctctctgtggtctgatgcttacaaatggtctgatttctgccattgttctcacacctcgttattttactttccgtacttttagtactccatccgtctgctccagctttgcgagcacatcctccggcacgttcgtatccacatcgatcagcgcatatgcatagtcgcccctggacttgttcgccatgccatcgatattgattccggcattgccgagaattgttgtaaaatggcttaacataccactctcgttcttgtgcagaataccgattcttcctgccgtcatgcaagcgcccatgctgcagtccgggaagttgaccgaatgtacgatattgccgttctcaaggtaatcgcggatctcgcgcactgccatgagcgcacagttgtcctcggactctgccgtggatgcgcccagatgtggtgtcacgatgcagccctttgcaccgactgtcgtggtgttcggaaaatcggaaacatattttttgatcttgcccgctgccagtgcgtccaccatcgcctcctcatccacgagaagatctctcgcaaagttgagcacgatcgccgtcggcttcatcattgcaatcgcatccgcgccaatcatctttctggtggaatccaaaagcggcacatgaatcgtgatatagtcgcactcgcggtaaatgtcctccacgttgctgatgtgcttcacgctccgggaaaggctccatgctgcactgacggaaatatacggatcgtagccgtacacttccattcccatgtgggtcgccgcattggcaaccagaacaccgattgcaccaagtccgataacacctaacttcttgccggaaatctcggttcctgcaaaatttttcttctgcttttcagcagttttggcgatattctcgtcgttctgattcgccagacaccagtcgatgccgcccacgatatcacgggacgcgtagagcattcccgcaaacaccagctccttgacaccgtttgcattggcgcccggggtgttgaatacgacaattcccttctccgcgcatttatccagaggaatgttgttcacgccggcaccggctctcgccactgccgcaagtccctccgggagttccaggtcatgcattgcggcgcttctcacaagcactgcctccgcatcctttaagtcttccaccttctgataatcatccgaaaacagatccagaccgaccgctgcgatcggatttaagcaatgatacttatgcatttgcattctcctcctcgaactttttcataaacgcaaccagcttctccacgccctctttcggcattgcattgtagatggaagcgcgcataccgcccacggtgcggtggccttttaagttcacaaagcctgcggctgtcgcttcttttacaaacttcgcatccagctcttcgttgccggtcacaaacggcacattcatgagggagcggtcctccggaacaacggttccgtggaacagtttgctctgatccaggaaatcataaaggatcttcgccttttcctcattgcgctccttcatcacggaaagaccgcccatcttctttaaccacttgaataccttgccgcagatatagatgccgtagcacggcggtgtgttgtataaggaatccgcatcggcgtgtgtcttgtattttaacatggtcggtgttcccggaagggtatcttccgtgatcagatcctcgcggatgatgacgatgacaactcccgccggtcctacgttcttctgcacgccgccgtagatcacaccgtattttgtcacatccaccggctcagacaaaaagcaggaggatacgtccgctaccagcgtgtgtcccttggtattcggaagcttcttgtattttgttccgtagatcgtattattctcgcagatgtacacataatccagatcttccgggatatccaggtcggaacaatccgggatataggaaaacgtcttatcctcggaagatgcaagctttactgcctcgccgtaaatctgtgcttcctgataagctttcttcgcccactggcctgtaacgatatagcctgccttgcggttcttcatcaggttcatcgggatcatggcgaactgctgggatgctccgccctgtaaaaacagaactttgtaattgtccggaatgttcatcagatctctcagatcctgctctgcctctttgatgatgttgtcatacaccttggagcggtggctcatctccatcacagacattccgcttcctctgtagtccagcatctcatctgctgcttcttttaagacctcttccggcagcactgccggacctgctgaaaaattgtacactctgctcattttctaattcctttcctttctcttttattacggcagttccctacgctgccgcctccatgccccctgtaacaaaacatatacgcatgttatgactgcgctgcggctaaatcctccccggtaaatgccgtactgatgtccgcacccggagcaaccatcggccataccttgtcatcgcagccgatcacacaatcgatcactaccggcgtctttgcagcaagcgctgcttttaacgcctcattaaatgtctcgcgggttgtggcgcggtacccagtcgcccccatcgcctccgcaagcttcacatagtcgacgccgtcgtctaaaaccgtcgctgaatagcgtttttcgtaaaacagatcctgccactgccgcaccatgccgagcacatgattgttcacaatcacttcgatcaacggcagcttctgccggactgcggtagcaatctcgttcatattcatgcgaaaacatccgtcccccgcgatattgatcacctgtttttccggatttgcaacctgtgcaccgatcgcagcgcccagtccgtatcccatggtgccaagtccgccggatgataaaaacgtgcgcggatttttatatttataatactgtgcagcccacatctggtgctgtcctacttctgtcacaatgatggcgtcgccgtctgtctggcggtaaatctcctccaccagataaggtccggtcagtcccggctcctggtatgtgagcggatattttactttatagtccagaatatgcgctatccacgcttcatgccccagctgcggcagttcctcgttgatccgctttaaaatttctttcaggtctccgatcacagccgcatcgacacggatatttttattgatctccgctgcatccacatcaaactgtaagatcatcgcctgctttgcaaacttcttggcattgccgagcacacggtcggaaaagcgcacgccgacggcgatcagcagatcacactcgctcacgccgaggttggacgtcttggttccgtgcatgccgagcatccccgtgtagagatcgttcgtcccgtcaaaggctccctttcccatcagggaatcgcacaccggtgcgtccactttatgtacaaattcttttaattccgcgctcgccccggagatcacagcaccaccgcccacaaatatgtacggtttctctgccgcttttatcatcgcaagcgccttcgcaagatcctcttcccgtatcgtgtccgtcacacgcgcgatcggctctgccttgcagaattcatactccgtctttgccgccgtaatatccttcgggatatcgacgagcaccggccccggacgccccttctgtgcgatccggaatgctctgcggatcgtgtccgcaagctttgtgacatcctttacgataaaattgtgctttgtgatcggcgtcgtgatgcctgcaatatcgatctcctgaaaactgtctttgccgagaagcggcacattgacgttgcatgtgatcgctacgatcggcacggaatccatgtatgccgtggcaattcccgtcacaagattcgtcgctcccggtccggacgttgcgaaacagactcctacttttccggtacttctcgcataaccgtccgccgcatgggaagctccctgctcatgtgaagttaaaatatgccgaatctcctgatgcttatataattcatcgtatacattcagtatggctccgcccgggtatccgaatacggtgtccacaccctgttctttcagacattcgatgacaatctgtgctcctgtcagctccatgtcgtataccttccttttctatcctactgttcttccgggagcgccagtatcgctccacggttgcccgaagtcacgagcgatgcgtaccgctttaagtatccggtcgtcaccttcggctctctcggctgccattttgcctttctggccaaaagctcctcgtccgatacggcgagttccagctttaactccggaatattgatcttaataagatctccctcttccaccagtgcaatcggtccgccgaccgctgcctccggcgatacatggccgatcgacgcgccgcggcttgcaccggaaaaacgtccgtctgtaatcagtgccaccgaagatccaagccccattcccgcaatcgcggaagtcgggtttaacatctcgcgcatacccggtccgcccttcgggccttcatagcggatcacaacgacatccccggcaacaatcctgcctcccttgatcgctgcgatcgcatcctcctcacagtcgaagactctcgccggtccctcgtgcaccatcatctcatcgcagactgccgagcgcttgaccacgctgccgtccggcgcaagattgcccttcaatacggcaagtccgccggtcttgctgtacgggtgatccaccggacggatcacttccggattcttattcactgcatccgcaatattctccccgacggtctttccggtcacggtcatgcactccgtgtgcagcagtccgatgtccgccagttctttcattaccgcatagacgccgcccgcctcgttgagatcttccatataagtcggtcctgccggtgccaggtggcacaggttcggtgtcttctcgctgatcggattggcaaatgcaatatcaaaatcaaatcccacttcatgggcgattgccggaagatggagcatgctgttcgtcgaacagccgagcgccatatccacggtcagcgcattcaagatggcttccttcgtcataatatcacgcgggcggatatttttgcggtacatttccatcaccgccatacccgcatgcttggcgagcttgatgcgctccgaatagactgccgggatcgtgccgtttccgcgaagtcccattcccagcgcctcggtgagacagttcatggagttcgccgtgtacattccagaacaggagccgcaggtcggacaaaccttctcctcgtattccctgacttcctcctccgtcatcgtgccggctgcataggaacctaccgcctcaaacatggaagagaggctgcgctttttgccctgtacatgtccggcaagcatcggtccgcctgacacgaacactgtgggtacattgatgcgcgctgcagccatcaaaagtcccgggacattcttatcgcagttcggaaccatgacgagcgcatcaaactgatgtgcaagcgccatacattccgtggaatcggcgatcagatcacgcgtcaccagcgaatatttcataccgatatgtcccatcgcaattccgtcgcagaccgcgatcgccggaaataccaccggcacgccgccagcctccgcaacaccaagctttaccgcgttgacaatcttatccaaattcatgtggccgggaacaatctcgttgtaggagctcacaatgccgaccatcggcttgttcatctcctcctcggtaaatcccagcgcgttaaacaaacttctatgaggtgcctgctgcatccctttttttacattatcactcttcatctatcttaactccgtttctgtcattctatctgatccgctcgcagatcagatctcccatctgtgccgtgccgacctgggttgccttttcctgctgcttctcctgcggcatgatgtcgatcgtccggtagccatcctttaagacctgcttcaccgcctgctccactgcatccgcctcccggtccagatcaaagctataacgcagcatcatggctgcacttaagatcgttgcgatcggattcgcaattccctttcctgcaatgtccggtgccgaaccgccgctcggctcgtagagtccgaactttgtatcgtttaagctggcgcttgagagcataccgatcgaaccggtcaccatgctcgcctcatccgacaaaatatcgccgaacatgttctccgtcagaatcacgtcgaactgcttcgggtcttttaccagctgcatcgcacagttgtccacgagcatatgctcataggtcacttccgggtaatcctgcgccacctcctcgacgatctttctccagagtctcgaggaatccagcacgtttgccttatctacactcgtcacctttttgcgccgcttcatggcaatatcaaaaccgcgcttagcgatccgtctgatctcgttctcattgtaggtcagcgtatccgtcgctgtcagcacaccgtccacttcctcggtcttgcgcgctccgaaatacagtccgccggtcagctcccgcataatcatcatgtcaaatccgtccccgatgatgtcgtcccgaagcgggcatgcggcttttaattcttcatataaatatgccggtcttaagttggcaaacaggttcagcgccttgcggagctttaaaagtcccgcctccggtctcttctccggcggcagctgataccacggcgaagtcgatgtgttgccgccgatcgatcccatcagcaccgcatcggaagccttcgcggaagcgatcgccgcatccgtgagcggctcacccgtcgcgtcaatggagcagcctcccatcagaatctcttcatagcggaacacatgtccgtaggtctttccaatctgatccagaactttctttgcctctgttacgatctccggtccgatcccgtcgccggaaatcacgcctaccttatattccatctctctaatccctcttttcttcctgccgtgcaggaatccgtcttgtattgactttagtacattactaacagacagtatataaattctataataatgtatctcgggaaacaatgcaacctctgaatctatttttctttttcatactccctataaccgggtcttatgaaaaaggagcagcctgccttttgtgtccgctgctcccttctgccgtctcattccgtctgctctaacacaacgctgttcagtccaaaatagacgcgcatatattcatttctccagtcgcttttctcctctgtaatatcgtcgaggaaaagcatccacggctttgcggtatacgcctttaacaccacgtcttcccccgcagaatcacacaaaacggcgtagcgctcatcagcctccgccgaatattcctgtgcctcgccgctgcggatcagcaggtatgcctgccatgcggtcatattttccccgcatccgattatcattcccaccgcaaggacagcagccgtgatcaaaaaactgcccggaaattctcctgcagccccggacagtgctgccgccccggacgcctccagtcttgtgaccgcccatccgcacagataggcttcatttaacacaaacagccaaacgaaggaaaaatataccacgttggtcagccggacgtcccccggcgttcccatcgcgtagatgggcgggcagaacattgcgcacagccaggcgaccgacaacacaaagacaagcagcggatagcggaacgaaaatccatactgtccgcgtatcttctttaccaggggaagaagcaccggaagcagcaggaccgccgtgacaatgactgcaagtcccatccagctgttgatgcatgcaattccggtttttaccgcggtaacaatcgttcccgctacaccgggtctgtcggaaaaatacgactgccggattctggtgcccggcgacgtcacattaaaaaggaatcccgccaccatagccgcaagcgttatgacgcagcagatcaggttctgccgccgcttttttaccgcagcaaatattccaaatccgacaatcagcagtatccccataaatgcggtcacgtgattcccgccggcaagcagcaccgcaagcagcaccgcaagcaccgccctgcctgcttttctccgcgggtgctccccggcaaggctgagcagcacacacaacaacaataatagcaccgcatggaagaatacataattcatcgcgccgttataccagtacaatccctgcagagcggagggcatccattcgatcataagaaacgacatgacacagccggcagcaaatccctccagtctcgggcagccgcatttgcggtgaaagatataaaccgtacccgcgcagtttgcccccacaataattgcgatcagcaagattccggtcagcgcgtaatatttgtcgccgaaaattcccggttccagcgccagcagaaccgccgatgcataaagcccctgccacttctgatagaactccgctgatgtggcaaacgcttcttttatcacattccagaaagaatgtgtctcccgccagatctggaaggtgcggtaggcataaccatagtcatcccccgactgatgattgtacttcgagagtacggctaacgggatcagcgcgcaaaggctcaataaaatcagcagccacaaatatactttttttctcgcttgtaatttttccattctgttacctcagatccatcttaaatatatcgtatacaccaccggaatcacatagacgaccagcagaaatccggcatagaccaccacaaaaatatctgcggcggcacagccaagtccggcatagattttatccaggacactttttctccgaagcagacgtgataaaacgccccagccagccagaagcatcagtgccatgctcgtcaccgccgcgccctttttcattccccgcggcacataacaaagcgtaatctcattcgtaccctcgtcaagcggcacgagcatcagattgcccgcgagccggcttatggcccgctcctctccgtttaccgtacaataccatccgctatccgtattgaccggaagcatcagatactccgctcccgccgattccacagtaagcttacaggaatcccgatccagttcatatgtaaccgcccttcccgctgcatccaccgcctccagcagttcctgcggatcgaggaatccgaagaacaccgctctctctgcgccgctgtccccaacagactgacggatttccaccgtgatgtcttcgtccgaaaaacacccgagggagaggattccctgattgccggttgccgggtagctctcattgtacagatcattgtaatccgggacgtagagcctctccccgtttaccgtaatttctgcctgctgcagatcctttccatagagatataagatctgctttccatccgcgtaaaaccggtacgataattccgctccggtctgatcatccagataggtctcttttttccagtcgatgggagttgtgtgaaaaagcagctccgacagccggttctggttctcaaacacattttccgtgtacgcttccgtgactgcatacgcttcatagtccgcttttgtgataaaaaatgccctgtccccgacgggcgcattttcccacagcgtaaacttttcggtctcagcaagcggccaaagggaatccgccgccgtgtcttttccccacgatcccgccttagacgccacataataacggtaccccagcatgatgtcggacgcgagcgttccgcccgtgtcacttaatctggtccacacctgagaatacccgagcagtgtgttcatcctgatctgctccgacgtcatcagatgcagataattggagtaggaggtgctctctgcgatcagcggatagttgttgtcaatcgctccgtccgccagctttgccttgtggaaaacatcggtttttccagcaagcggctgaccgatttccgtggcatccccaacaaaatccgtctcgtccgtgtgcgtttccggctgtatcaaagaaatgccaagcgccaccatctgcacgcaccagattcccaggaacgcatataaaatgttccgccgcacgcggctatctcccacaaaatccggcacgcgcgccgctgccatacaaatcacggcaaacaccagcatataaccatatcgcatcgggaagcacacatacgtcccgcggtgccagatgagattgaccgcctcgaagaaaaccggcagcaccatcgccgccaccagataccactgccagatgtgctcccgcttccgtctgccagaaatgacgaagaacagcagcggaaccgccacgctgccaagaatcacccatttccacaccgcgtccattccgtcctgccgaagcagcagaaaatagccggagattccccggtactcctcgctcgacagccggtaggaaccaagcattgccctcgctgccggcagaaatattaccgccgcaattccaagcgacagtaaagaagtcagcccgaattttaaaatgccgttcttttttagcggctggtcctgtcgtttcaggaaaaaatatcctcccgcaaacacgatcaggaaaaaacacatcatgtacgcctgcggaatattgatgaggaataccagcgtcaggcagacgatatagccgagcgtatttttcccgagacgccagtccccttcccgctccgccatcctgcagaagaaataacacaatagcggcaggatcgctgccacatccagccagcccatgccatagtacaaaagcgtatagccgtttacggcataccccacgcttcccgccagaatgtagattccgtaacgctcttccttaaggatctgctcttttaaaaaccagcgcatgccatagcccatggcaagcagcttgattaaaagaaacacgatcatggatttttcaatccagcttcttttcacaaagaggaagaacaggttaaacgggctgaacagagaaaactgcgcgctcactcccgcaaaattattcccgccgccgactctccagtcaaaaaaggcgctgccgtctccgtgcagcacgtcccatacatggtaatatgccggaatccactgggactgaaaatccacagtgtcaagcgtggcaattccaaacggatagatgccctttatgatgcacaacagcagaaaaatggcagttgtcacgcagccgacggcggcacgtgaaacaaacgtattttttttacttttcatccggacaatctctcctcgctctccgaaatactctctcaaaaagaaaagggataatacattttatatactatccctcttaaaaatcttcttattcagttacatcttccggcttctcaactgcggagatggccgccttctgcatcgggatgcggcagttcttgttgcttccgaactcaacgattactgtatcatcagcaatatcgatcacggttccataaaaaccgcttgttgttaagatcgtatctcccactgcaagttctgcaagcatggagttcttcttctgctgttccttcttctgcggacgcaccatgaagaaatacataaacgcaaataaaataaccagccacaccaccatactgatccagccagcggatgacgcactctctgttgctaagattgaaaacatctgatatcctcctaaaatcataaacttgtccgaagtcatccgacttcattaaagagtattgtacacaaaacctcgccgtttggcaagccttttcccttttacttttactttgccatttccttttcccggttgatctgtcccatgccgtatagcttttcttccttgtaggaggcaaaatttccggcatccagcgcatcccggatctcttccatcatcgtgttgtagaagtacagattgtgcagaacgcataagcgcatgccaagcatctcttttgccttgagcagatggcggatataggctctgctgtagcggcggcaggtcgggcacccgcagccctcctcgatcgggcgcatatctttctcgtacttctggttgaacaggttgatcttgccctgattcgtgtatacatgaccgtggcggccgttgcgggacggataaacacagtcaaagaagtcaatgccgcgctccactccctccagaatattggccggcgttccgactcccatgagataggtcggcttgttcaccggaagatacggcacggtctcatccagcacatggtacatctcctcatgtgtctcgccgaccgcaagtccgccgaccgcatagccgtccagatccatctcggaaatccgctttgcatggtcgatccggatgtccgtgtagatggctccctggttgatgccgaacagcatctggtgacggttcacggtatcctccagaccgttgaggcgctgcatctcattcttgcagcgctccagccagcgcgtcgtccgtgccacggaatcctccacatatttccgctcggcaagcgccggcggacattcatcgaacgccatggcgatcgtggagccgagattggactggatctgcatgctctcctccggtcccatgaaaatctttgccccgtcaatatgcgagtggaaatagacgccctcctccttgatcttgcggagcccagccagggagaacacctgaaatccgccggaatccgtaagaatcggacgattccatgacataaacttgtgcagtcctcccacttccttgatcagcttgtctccggtgcgcacatgcagatggtaggtgtttgacagctccacctgacacttgatctgctctaaatcttccgtggagacagctcccttgatggcagccaccgtacccacattcataaataccggcgtctggatatctccgtgcaccgtatggaaaacgcctctcttcgcgcgtccttcctgctttaataattcatacatctgtttttcgtctccttttattgcctgtagttcttctttattttctctggttctgcgctttttccgctttcacttccaccagccttgtgcagtccggcatcttgtcagccttccaccgttttcccagtcagttcgcttaacacggtaaaataattttcaaacgtcttgcggcagcacgccgggttctcaatgacaatcccgtcggttctaagtccgaccagggaaaatgccatcgccacgcggtgatcgtcgtatgtctccacgcttccgccgtgggggctgctgggatagatcgtggcagccgtctcttcctcctcacaccggatgccaagcgctgtcaggttcgtctgtatcgcgtgaatccggtcgcattcctgcccacggatatgtccgattccctctatgcgcaccggcgcgtcggcaaacggcgcgatcgccgccagggtcagcgcctgatcggaaaaatcgttcatattgactgtgatgccccgtagcgcaccgtccgccggtcccgttaccaggatgccctccggcgtatcgtccgcggtacatcccatgtgctccaacacttccaggaaacgcagatctccctgtgtgttgtccatatgcacatgccgcacaagcgcccgtccgccggtcatagccgcagccgcataaaaatagcaggcagccgacatatccggttccaccatataagtctctttccggtaggaacttctgcacggcacctcgtagtctcttccgtcaaaagcgacactcacgccgaattcctgcatcatcttccgcgtgatgcggatgtatgagccgtccgtcttctcactggtgatgtggatcttcatcccttccggaaccatcggcgcaatcaacagcagcgcgcttaaaaactgtgtgctcttcgtaatgtcaagagagagctcccgcggcgtctcccctgctgtcttatccgcccgggcgtatctgcatcctgtgatgcgcaccggaagatgcccttcctcctcgaggaatgtaatcttcgctcccgcaccggaaagcagatcgaacagctccgccatcggccgccgcttcatctgcgctgagcagcggatctcatagcacccgtccgaaaatccgagcatcgccgcaagaaaacgcgccgctgtcccggcgcttccgacgtcgattaccgcctccccgcggggaatcctgccgccgcagcccgtcacggtcacgcactttttttcttcctctatctccactgtaaagccgagcgccacaagacacgccagaaagtgtctggaatcatcggaaaacaggactccttccacgcgcaccgtccctgcggacagcactgccataagaagcgcgcggttcgtcatgctcttcgatcccggcacggttaccttccagtccaccggctctgttatctttttcacaaggtatttctctatcatgaaatattcttctcctcgcctgctggtacttctgctccgtcaaatcataacatatttctgttgcggcgcaaagtcaaatcttttataatcgagaaagatcattatgtaagcaggagggaatcacatggcagggtctactttgggaactctttttaaaatcacaacctggggggaatctcacggaaagggcgtcggcgtcgtcatcgacggctgtccggcgggactttctctctgtgaggcggatatccagaagtttctcgaccggcgcaagcccggtcagtccagatatgcaacgccgcgcaaagaggacgacgccgtagagattctctctggcgtgtttgaaggaaagacgaccggcaccccgatctcgcttgtcgtcttcaaccgcaaccagcagtccaaagactacagcgagattgcctcctattaccgtcccggtcacgccgattacacgttcgaccagaaatacggcttccgcgactaccgcgggggcgggcgctcctccgggcgggaaaccatcgggcgtgtcgccgccggcgccgtcgccgtcaagattctaaacgagctcggcattacctttatgacctacacaaagtccatcggcccgatcgccgtatcttccgggcgctttgatttttccgaggtcacaaagaatccgctctatatgccggacgccgaagcagccgagaacgctgaaaattatctggatgcctgcatgacggagttaaattcctccggcggcattgtggagtgtatcataaaggggatgcccgccggcatcggagatccggtcttcgagaagcttaatgcgaaccttgccaaggcggtcatgtccatcggtgccgtcaaaggttttgagatcggggacggatttgacgtagcaaaagcgaccggcaagaacaacaacgatgcctttgtcctcagtgaggacggcaggattgccaaagcaaccaaccatgccggcggtatcttaggcggcatgagcgacggaagcgacatcatccttcgggctgccatcaagccgaccccttccatcgccgccacacagcgcactgtcaatcagtccggggaggagatctcggtcaacatcaagggacgccacgatccgatcatcgttccgcgcgccgttgtcgtggtggaatccatggcagccatcacgatcgtcgacgcacttttttccaatatgagtgcacggatggatgcgctaaaagatttctactcctaaaagaaagaaaaaggtgatacttcttctccgccggctggcggaatcgaagtatcacctttttctttttcatactttctagctcatccgaatatgctgatgtgtaaacagatgatcctgacagtattcgtaattgccctcgcacttggagcagaaacggaattccagcgtcggatcgtcaagttccgtcctgccgcagacagcacacttgtgcttcgcaccgcccgcatatccctgcggtctgcgcatgtctgccttaaacttctggcgtctgtgcacctcgtgcggcgtatagcgcttgaggtttctggtggagaagaagaaaataataaagttgagaagcgacataaaaatcgcgactcttcccgcccatccggtctcaaagaagcttaaagcaatcagaacgccgtacacaaccgccatccacttcatcttaatcgggataatgaacatcagaagaacctgcatatccggatacatacatgcaaacgcaaggaagatggacatgttgatgtagcttgtgctgaagcttgttccaatcagaagcatctccgtcgtcacaccgccgttcaaaagatacatgataccgtacagcagaaacgctccgatgacggtaaacagcatacctccgaaaatatagacgttaaaccggaaggttccccatgtgcgctccagtgccgttccaagctgataatagaaaagcgccataatgagaagatacaccagattcgtgtctgtgggcataaacacccaggtaatcaggcgccagacctgtccgtgcaggatgtgatacgggctcaacatcaaaagtcctatgatcgatgggttcacctggtagaggacaaatccgatcgtgtaagctccgatcagccacacgatcagattgggaaccgcccagttgccaaatttacgttctaatttatttaaccagttcatacactctgttcctgacctttccaaaaatgacattacgttgttcagtatatcggtcggggaaatctttgtcaatcagagggattcttctttacaaaaagtttatacttttccggcaaaatgcacattgtcttttgacatatcctgtcgtataatgtagagtgtttatcgccagattggcactatttataataagaagaaatcttttacatattttactctgctaaagtatttactttacgagaaacagccatggagggaattatggaaaacaatacacttcataaattgggaatcgacatcggttccacaaccgtcaaggtcgcaattttagaccaggaggatcatctgctcttctctgattatgagcgccattttgccaatatccaggagaccttatcctcccttctccagaaagcttacgatgcactcggcgactttgctgttgcaccgatgattaccggttccggcggtctgacactcgccaagcatctcggtgttccgtttgtccaagaagtgatcgccgtgtccactgccctgcagcattatgcaccgcagaccgatgttgccatcgagctcggtggtgaggatgccaagatcatctattttgagggcggcaatgtcgagcagcgtatgaacggcatctgtgccggcggtactggttcttttatcgaccagatggcatccctcatccagacggatgcgacaggtctgaatgaatacgccaagaattacaaggccatctacccgatcgctgcgcgttgcggtgtctttgccaagaccgatatccagccgttaatcaacgagggtgctaccagagaggatctctctgcctccattttccaggcagtggtcaatcagacgatcagcggtcttgcctgcggtaagccgatccgcggtcatgttgcctttctcggaggtccgcttcacttcctttccgagctcaaggctgcttttatccgcaccttgaatctggacgacgaacacgccatcacaccggagaattcccatctgtttgctgcgatcggttccgctttaaattacaagccgggtgagacgaccacgctcgtctctctccgcgaccggctctcaaacggcatcaagatggaatttgaggttgcccgtatggatcctctgtttgccagccaggaagagtacgacgctttccgtgcgcgccacgacggacacaatgtcaggtccgcagatctctccacttatgagggcaactgctatctgggcatcgatgcaggttccaccacgaccaagattgccttagtcggcgaggacggttcccttttgtattctttctacagcaacaacaatggaagtccgcttgcaacggcaatccgttccatcaaggagatctatacgctccttccaccgaaggcaaagatcgtccactcctgctccaccggatacggtgaagcgctgttaaaagccgctttgatgctcgatgacggcgaggttgagacggtggctcatttctatgcggccgcgttcttcgacccggaagtcgactgtatcttagacatcggcggtcaggatatgaaatgtatcaagatcaagaatcagacggtggattccgtacagctcaatgaggcttgttcctccggctgcggttctttcatcgagacgtttgcaaaatccctcaactactctgtacaggattttgcaaaggaggctctttttgccaaaaatccgatcgatcttggaacccgctgcaccgtatttatgaattccaaggtaaagcaggcgcagaaagagggcgcatccgttgcagatatttctgcgggtcttgcgtactctgtcatcaagaatgctttatttaaggtaatcaagctttccgatgcaagccagctcgggaaaaatatcgtcgtacagggcggtacgttttacaacgatgccgtactgcgcagtttcgagaaaatcgcgggtgtcgaatgtgtccgtccggatattgccggcatcatgggtgctttcggtgccgcactgatcgccagagagcgtcacgaggcaggctaccagacctccatgctttccatcgaacagatcaatgcgctgaccttcgacacaaagctggcaagatgtcagggatgtaccaaccactgtctcctcacaatcaaccgcttttccggcaaccgccagtatatcaccggcaaccgctgtgagcgcggcctcggcaaggagaaaaataaagacaacattccaaacctctacgaatacaagaacaagcgcctgtttgactacaccccgctttccgccgaggaagcagcacgcggcacagtcggtattccgcgcgttttaaatatgtacgagaactacccgttctgggcaactttctttaagaagctcggtttttccgtggtactctccccgcagtcgacgcgcaagatctacgagcttggaattgattccatcccgagcgagtccgagtgctacccggcaaagctggcacacggtcatgtgacatggctgatccaccagaacgtcgattttattttctacccgtgtattccttatgagcgcaacgaattcccggattccaacaatcactacaactgtccgatcgttacctcctacgcggaaaatatcaaaaataacgtggacgagatcacttccggtcaggtgaagttcttaaatccgtttatgtctttcgccagcgaggagacgctttcctcccagctgattaagacctttggccagtcggagttcgggattccggaatccgagatccgcgacgcggttgccgaaggctggaaggagcttgccgtctgccggatggagatgcagaaaaaaggcgaggaagtcttacagtatttaaaggagaccggaagacgcggtatcgtcctcgcaggtcgtccgtaccatgtagaccctgagatcaaccacggtattccggagctaattacctcctacggcatcgccgtgctcacggaggattccatctcccacttacagccggtggagcgcccgctcatcgtcatggatcagtggatgtatcactccagactgtacgcagcggcgaactatgtcaagacaagagacgatctcgacctcatccagctgaattccttcggctgtggtctggatgctgtcacgacagacgctgtcaatgatattctgacaaagtccggcaagatctacacctgtttaaaaatcgatgaggtcaacaacctcggtgcggcgcgcatccgtatccgttccctgatctcggcgatccgtgtccgtgagaagaagcagacgaagcgcaccatcgttccggcgaattacaaccgcgtcgtcttcacggaggaaatgcgcaagaattacaccatcctctgcccacagatgtcaccgatccattttgagctgttggagccggcgttccagacggccgggtacaaccttgttgttccggatgtggacagccgcacctgcgtggatgtcggcttaaagtatgtcaacaatgacgcctgctacccgtccctgatcgtggtcggccagctgatggcggccgtgatgtccggcggttatgatatgtcgcgcaccgcggtcttaatctcccagaccggcggcggctgccgcgccagcaattacatcggcttcatccggcgtgcactggaaaaagccggctatccggacgttccggtcatctcgatcaatctgagcggtctggagaagaacccgggctttaagctgacactgccactgatccagcacggactctacgcgctggagtttggcgatatcttcatgcgctgcgtctacgcaacgcgcccttacgaggcggttgccggatcaacggacgagttgcacgagaaatggaaaaaagaggttatcgcctttatcacccagaaaaagatgctctcccacggcaagttcaagaaaatgtgccgcgagatcatccgcgattttgacaaccttccgcgcaaagacatcaagaaaccgcgcgtcggcgttgtcggcgagattcttgtcaagttccatccggctgccaacaatcatctggtggagcttctcgaatccgagggtgcagaggccgttgtaccggatctgaccgatttcctgctctactgcttctacaatacgggctttaaagcagacaatctcggcatgagccagaagtccaagaagatcggccgtctgggcatcaatttctttgagtggctgcgcagcgctgcaagagatgaattcacaaagagcaggcactttactgcacctgcgcacatcgatgatcttgccagatatgcaagagacattgtatccgagggcaaccagaccggcgagggctggttcttaaccggtgagatgttagagctgatccacaccggaacaccgaacatcgtctgcacgcagccgttcgcctgcctgccgaaccatgtggtcggcaagggtgtcatcaaggaactgcgtcaccgctatccgggttccaatatcgtggccatcgattacgatccgggtgccagcgaggtaaaccagctcaaccgtatcaagctgatgctctccaccgcgaacaaaaatctggcaaagcagaacgcaccggagcagaaggatcaggctgcagggtgacagatacagagaaaggggctacgcatcaaatgtgcagccccttttcgtgataagtaatattatcaaaagatcacaccgtgggatttcagatggagatacagagggaaatttggttcaaaaaatgtggcatttctaaccagccggatgtttgcatcttcgatgatccgtgtctttccaagtttggagcactccgcgggtcatgtccgcatcccggaagacaatttgtaggacttttgtgtgtgtcccttatgacacctctaaacaaaacataaccgcgcgaagccgatgtctgagtcggcatctgccttattttcaatagcagatgccggcga

SEQ ID NO: 11496 - DNA, 4721 bp, Unknown
  gut microbiota DNA sequence
atgtaaaagtgttataatgaactctgtcgagttcatattagaagtttcaatgaaacttcggatgcgcaaaaagaagcgcaaacagaagagataatgaactctggaaaacaaaacgtaccaaatgaacagggtaataaaaatttaaaagaggtaatatatgagcagaataattgcaatcgcaaaccaaaaaggtggtgttggtaagacaaccacagctatcaatttatcatcctgtcttgcagaagcaggaaagaaagtgttgaccattgatcttgacccgcagggaaatatgacaagcggattaggcgttgataaaaacgaactggaaaatactgtatatgaattgatgctggatgagtgttccatcaaagagagtatggcagataccgtagtagaaggaatgaagattatcccgtccaatgtgaatcttgccggagcagagatcgagttacttggtatcaatgaaaaggaatatattttaaaaaatgccgtagattatatcagggatgattatgattttatcatcattgactgcccgccgtccttaaatatgttgacaatcaatgcgatgacaaccgcggattcagtgctggttccaattcagtgtgagtattacgcacttgagggattgagccagctgatccacacgattgatctggtacagcagagactgaatccagatctcgtcatcgacggagttgtcttcacgatgtatgatgtgcgaaccaatctgtccaatcaggtagtagagaatgtaaaagaaaatcttgataccaagatctatgagacactgattccgagaaatatccgattagcagaggctccatctcacggacttccgatcaatatgtatgattcaaaatcagcgggaacagaaagttatcgtatgttggcaaaagaagtgatggagagataaggaggagaactatggctgctgcaaaaaaaggtggactgggaaagggaattgattctttaattccaaacaaagtaagtgccacaaaaacggaagcaaagaatgaaaatgtgaaaaacgataaagtcatcgagggtgttctggtaaatatcaataaggtagaaccgaatcgggaacagccaagaaagaattttgatgaggatgccctgttggaattgtccgagtcaatcaaacagtttggtgtgttacagcctctgcttgtacaggacagaaaaggatattatgaaattattgccggcgagcgcagatggcgagcagcgaaacttgccggattaaaagaggttccagtaattatcaagaatctttccaaccaggaagtcgtagaaatctccctgatcgaaaatatccagagagaaaacttaaatccgattgaggaagcaatcgcatacaagcggttactgacagagttcaatctgaaacaggatgaagttgccgagcgtgtatcgaagagcagaaccgctgtcacaaattccatgcgactgttaaaactcgacgagagagtacagcagatggtaattgatgacatgatctcgaccggacatgcgagagcacttctcggtattgacgatcaggaaaaacagtatacgacagcacagaaaattttcgacgaaaaactgagtgtgcgtgagacggaaaaactagtaaagaagatccagcaggaaaaagatcagccggaagcaaaggaagaggtaaagatcgatccgaagatggaagcaatctgccgtgatctggaagagaagatgaaagtcattcttggaacaaaggttgccatcaatcagaaggataaccagaagggcaggatcgaaattgaatattattctatggatgaacttgaccgtatcatggatctgtttggatccatccgaaaatagacagagtaagattctgataaaagtcatatcagaataaagagagaggaagcatatgatttcacagtatttaggttttgattccgattatattattatcggacttagcgcagtggttctgattctattgattcttatcattgtaaatatagcgcagatgcggaagctgaaaaaagcatacaaagtatttatgagcggaaaaaacggtaagaatctggaagataccctgatcaagcgtctggatcaggtagatacacttcttgaggcaaacaatgagaatgaaaaaacaatcaaatcattgtttgaggccatgcagctgacctatcagaagatgggactgataaagtatgatgcgttcaacgagatgggaggaaaactcagtttttctcttgccatgctggatgtaaggaataacggatttatcatcaatgccatgcacacacgcgaaggctgctatacatatatcaaagagatcgtagatggtaattccattatcgtgttatcggatgaggagcagaaagctctcgacagagctatgggaaaaacagaaaacaacgaatgaggataatgtatgagaatacaactggtaagaacactgcaagggggggagaaacttgcagggccggtcataacgaaggaaaatgaaattctcatttctgagggaacaacgctgaaaacggaatatctggatctgatctcctttctgggaatcgagaccgtgtgtatcgaagacccctatgaggaagatgaaacaccacatgatattatcagtaacgaaaaacgggaagaatatattgaaaaaataaaatctattctggaaaagcatatttatcacaggggcagttctcttcgggaaattgaatacgtcgcagaggacattattcaggatgtcatgcaggcggatgaaaatatggtaattgatcttttggaacgcgaaggtaatttgtacgaacatacacttgtagtaacaaaattatgtattatagtcgcaaaaaaaatgaagctcactgcggagcagatttacagacttgcactgggagcattgctgcatgatctgggactccgctacattacggtgccgtatatcaactgcgacatcaacgaattgtcagaagcagaggcttttgaataccggaagcatccgatccttgcgtactctgttctggaggaagaaaaatggatggatccttttgtaaaaaaaatggtacttgtacatcatgagagaagagacggttccggatttccgttgaagcagaaaacgcgggatacggaatgtggaatattacaggcatgtgatgcgttcgactgttttatcagcgggatggaatgcagacgtatgagcatccagcaggcacttgagtatctggtggaaggtacggatattttttatgacaggagaattgtgcgtgtgatcgagcggctcgtcgcacgctatccggtcgggacgagagtccggctcaataccggagagtccggcatcgttttaaaacagacagaaaattccatccggcctgtaattagaattttggataaagaggaccggttgacggaaaaggtatatcagttaaataagaacaagaatgtatctattcttcaggtcgaaaactagaaacagaaagaggtgaggatagaaaatgcacaaatttctaagagccatcgggttcagtcatattacaaaagaacagctgcagcatatttttgcagatattataagcgcaccgacggttcagaagtctgcacttgattcggagggcaatgaatttgcagaactgtcaaaggagtacggagattttttcggaatctctgtccggggcgtgtataacgaagatgatacctttgagatggaatattactatccgtatttgtgtggaaagaacatatccacaatagaacccgcagaagtggaaaaacatgcggaaaaagaatcctatgcggggatatgtgatgaagtccgcattggagtgacactcattttttatcttcagaatgtggtggattatcttgcggtcagcaagagcaaaggatatatgaatctggcagacggcgtcattttagctgcgctgtctacggagggaaagattttattcccgatcaataaggcggagaaaaaagtgcctcatgcgccaaaggagggaacagaccggaatcatctgattgccgcggcaagagacggggatgaggatgcgatcgagaatctgacgctggaggacattgatacctactcgttgttgtcaaaaaggatcacacatgaagatgtgcttagcattgtggatacctactttatgccgtacggtatcgagagcgatcagtattcggtgctcggcgagatcatggatgtgacactgctccagaaccgtttcacggaggaaaatgtatattccatggaaatcatgtgcaatgatattcttttcagcgtctgtatcaatcaaaaagatctgctcggcgaaccggaagtgggcagacgttttaagggaaatatctggatgcagggcagcgtaaaataccgggattagtttgtgattttactatggttttttatcggataatatggtaaaatgaataagctgtatacagaaaagtctgtatacagcaaatatatgtttccttagttaaatggatatagcagccccctcctaaggggcaactaagtgcagaccatttagtgagacacaactggattttagagtttgcaaaaagactaaaatcaatatataataacagaggcaattcatcacgcaagtgattggattcataaacattgcagccggagccaaaaaggctgaaaagcccgaaaatacggcatttgttcccttagttaaatggatataacggggtcctcctaaggttgcgttacaacggacacctcaaaaaaaactaaa

SEQ ID NO: 11497 - DNA, 1194 bp, Unknown
  gut microbiota DNA sequence
atcccatggaatgggtatgtcactgcaacatactaaccttgattaaacatacttgattttacagtgttttggggatgttacagtagatttttaccaacgatttaccaaagctatttgagtaggggataaactactcaggatcagcccgcatttgaaagaaggtgaccacaacgaaactgtttaagaaaaaaattcccgaacagacttatgataaagccagccaaaagccggtgattaaggcgagcatctgcaacggcgggcagattgccggtttcaaggatcttcatacgggcaagatcgaggaagtgatgctgattaaggggccggcggatctggaacggtttaagaaaatgtatggcattgaggatgagatcggaaaggagtattgatatggcgaaaaggaattgcgggaactaaacgaggagtatcgcagccgggagaacatggaagtatcggaagattacagataaaaagtatggacagccggaacatggagtaccggacataaggcagagcgcggcagggacagccgtgcatggcagaaagtaagggaagaacgccggcggaacatgcagagaggacagagatacgggatgaacagtatttttcacagaatcagcgttagaaaatatcagaacagggacgtggagcaggagaaaatcgagctgatgttaaaagcggcgatggcggctccgtccgcgtgcaatcagcagccgtgggaattttatgtggtgaaggacaaggcggtgatcgggcggctgtcagaggcttcgccctatgcaaaatgtgcgagggacgcgccggttgtgtttgtgccgtgcttccggtctaaggggattgcgccggaatattttaatatcgatatgagcgcagcggtggagaatcttctgctggaagcggacgaacttgggcttggcgcggtctggatgggaatatcgccggatgaaggtagaatgaaagcggtgcgggaagtgctggatattcccgagggtcttcatgcgttcgcgctgattccctgcggttacccggcagaggagagagcgcaggaagaccggtatgaggagagcagagtgcactatattatgaagtgatatgcaaatattccgagagcagaagatttgcaagcacagctgtcacgctaaaaaacggggctgcagggaaacgtttctctgcagccccgttttcgtgtattca

SEQ ID NO: 11498 - DNA, 8263 bp, Unknown
  gut microbiota DNA sequence
ttgacgacacatcagcggtgcagctcctgacagcgtttccggtactcggacggtgtaacatccgcgacttcccggaagacccggttaaaatgtgtcagattggaaaacccggtttctctggcgacttcggtgacattccggtccgtttccatgaagagccgtttggcgttcatgatgcgggtctgcttgatatactccacgatcgtgcgcttggtacttttcttgaattcccggcagaggtaatattcgctgacataaaaacgctcggagaggtctttgagtgtgatatcttctgcgtaatggttatggatatactgaatcactttggtaacccgggtctcgcggaggatgccggtgctctcctgattcatgcgcagaagctgcaccataatcaggttcaaaagagactgcatacattcgtcgtggcagtccagatgcgaatgctgctcctcttccatggcatagatgatgcgccgcagctggtgaagctcctgactgtcaggacggtaaaccacctgcgagtggagaagcttatgaagaagatccgccgaggtgatcgttttcgggcggaaatacagcaccacccgcgaaaatgccatatcctggtcaccgtaggaacggtgcatcgtctgtggagggaagagaatacagtccccggcctgaagcttgaagagcttgtcatccatcagatgatagcgctccccgctgtcgagaaaatacagctcaaaataatcgtgatagtgagactgtgacatattgtcattgacgccggttacctgggcgatggcgcaggctgcaccggctgccatacttgtctgtgcaacatcaatcataaggcacctcatagaaaataaaaaactctgtttctatggaaattataaagcaaaaacgcaacaagtgcaagatatgtaaaaaaaagtgcgattttgaacaaagtctgtatagttattgaacctgagtttttgtaagatgatgacagaaggaaaacagatctgaatgaaccggatatagacaataagaaaaagagttacaaaaccaaaggaggaaaactcgtgaaagtatgttacaaagcaggtgctgtcacagcacagaatcattattattcgattgctgcagacgcagtggagattcgtgtatggttccttacggatgatatcatccgtatccgggcgggctttgacggagactgggatgaagcgtcctacagtctggtaacaaccgcgtgggaatcccgcacagatgaactgatgaaggattaccggaagcggattcccgtggcggaatctacactggtggatggtgagaccagggcagtgattaccggaaaaaagctccgtgtggaagtggaaaaagatccgttccgcatctgtgtctatgatgcagaaggaaccatgcttcatgcggatattccggagcttgcgtaccgtgaggattctaacaggcgccgcattcataccagccagatcgaggatgacgattatttttacggatttggtgaaaaaggcggcgagatcaataaagcagagaaatatatgaacatggctcccggagatgcgatgggatacaatgcgaaggagaccgattctctgtacaagcatattccgttctacattaagctgcagcgcggcacgaaaaaagccgtcggatatttttatcacagcacggcagaatgtgacttcaatatgggacgcgagaagcggaattactggcaccgttattcttccttccgtgcggatgcaggcgatgtggatttatttctgatcgcgggaccgtcgatcggggaggtcattgagcgctacaccgatctgacaggaaagtccgtacttcttccgaagtctgcattcggatatctgggatcgtcaatgtactatccggaactgccggaaaactgtgacgatgcaattctggaattcattgacaccaccaaggaagagggcattccggtggatggtttccagctttcttccggatactgtgccgtcgagacagagcaaggcatcaagagatgcagctttacctggaattataaaagattcaaggatccggcggactggtttgcaaagatgaagcaggagggcatcgttgtctccccgaatgtaaagccgggaatgcttctcgttcatccactcctggaggagatgaaggaaaagaagatgttcgtcctcgacagcacaacggatgagccgggaattggtacctggtggggcggaaccggaattttcgtcgactttaccaaagaagaaaaccgcaagaactggaaggagtatctgaagcaggggctgatccagtatggctgcgagtctgtatggaacgataactgtgaatacgattccatggtagacaaggatgccagagtatattttgagggaaaaggcagcacgattggtacgatgaagccggttatgagcaacctgatgtgccagctgtccaatgaagcggtgacggagtacaatccatcggttcgcccgttttccgtgtgccggtccggacatgccggaatccagcgatacgcacaggtgtgggcaggcgataacctgacctgctgggatacgttaaaatacaatatcgcaaccattctcggaatgggactctccggagtcgcaaaccacggctgcgatgtcggaggtttctatggtgtttctccggaaccggagcttttcgtccgctgggtgcagaacggtatctttatgccgagattttccatccactcgaccaacaccgacaatacggtaacggaaccgtggatgtacacggacaagaagcagtatatccgggacgcaatcaagttccgctaccgcatgattccgtatctgtattctctggagagcagagcgcatgagaccggtcttccgattatggagccgatgtttatggcatttcagaatgacccgaagacctacaatgaaggcgtagattttatgtggggcgattcactcctggtagctaatgttgtggaaaaaggagcaaagaccagaagcatttacctgccgcagacgggggatgagaacgttcgcttctatgatttttataccagagaagagtatgcgccgggacagacaatcgaggtgccggtcgatatcagttccattccgctttacatcaagagcggtgcgattattccgatggcggagaatcagatctacaacctgatgcatgagacggtaaccggacttcatattcttatggcgccggacgtagattctgaatttaccgtatatgacgatgacggaaagaccaatgagtaccagaacggggcatatcttaagaccaatattaaagtgacggcaggagtcagaacctgtgtggacttcacttatgaaggaaattatgagaataccgtggacacgatgtatctggatgtggtacacagggaaaaagcgccgttctatgttcagattgacggtgtggaagttccgcattttcttcacagacgcaaatttgaagaggcgcagaccggctggtattacagccagagcttaaagtcggtacaggtgaagtacccgaatccgaaaaaggatcatcatgtgatgatttcgtttgaggtattcgatatgattggaatgtaatttaaattaaaataaaaaaggaaaaggagaacaaaagcaatgaaaaagaacatcgccctcattttggcggcagcgctcgttctgccgaccgtaattgcggcaggcggctgtggcgcaaactccggagtttccaacagtgcagaggcaacggcagagaatccgatggtattgactttggcacacggtctttccgagacgcacaccgtacataatgccatgacgcagtttgcggatgaggtaaaagagaagaccgacggacgcatcattatcaacattttcccgaacggacagcttggttctgagacagagaacttagagcagctgcaggcaggcgtaatcgcaatgaccaaggtttccgcaccgggtcttgccacctacaacgaagcctacaatacgttcggccttccgtacattttcaatgataccgaagacttctacgacattatggattcggaggacatgcaggatttcttcctttcttccgaggaagacggatttgtgacgatcacctacttcacatccggcgcccgttccttctataccaaggacaaggcaatccgtgtaccggaagatttaaagggattaaaaatccgtgtacaggatatgaagtcgcagacggatatgctgacagcgcttggcggaactccggtggcaatgtcctatggtgatgtttatacggcactttccaccggcattatcgatggtaccgagaacaatgagacggcattgaccacaggtaagcacggcgaggtctgcaaggtgtactctgttgaccagcacgcgatgattcctgacgtgatggtcatgtcagcaaaagtatggaacaatattgctccggaggatcaggaaatcatcctgcaatgtgcgcacgatgcgaccgaatggcacaaggaagcatgggatcaggctgtggatgaagcaattacggaagcggaagatatgggtgtggaatttgtctacgatgtagataaggaagctttccgtgaagcgacggcggaaatgatcgatgaataccgcgaagaatatccgggagttgcggatttgctggatagaattgatggaatcagagaagaggaggagtaaaaaatggctaagaccttaggcacgattaagaaatatatgaacaaagttctcgcggcttgctgcgcagtccttctgacgttcatgaccttcctggtattgtggcaggtatttaccagatacgtcctcaacagcccggcggcatttaccgaggaactggtaaagtactcgctgatctggaccggctttatcggcgcggcctatgcattttccaccagagagcatatggcactgaccctggtaagagataaactgaccggaagaccgcatcagattctggttatcttcattgatgcgctgattctactccttgcaatctttgtaatcacgattggcggttataagctggcagtgtctgcaagggcggaattctccgcacttctgggagttccgagaacgctggtatattccatcgcaccgatttccggcatctttatcatcatcgcacagattattaatctctacgaagacattaccggaaacaaagtagaagaataaggagggaaaaaatgaatatcgtactaacaactatcattttgtttgtcgttttcggcgtactgctgttcatgggtgttccgatttctgtaagtattattgtatcttccatcgtaaccgcaatgtctaccctttcctgggatcagattacgtttattaccatgcagaagatgaattccggtatcgaaagtttttccctgctggcggttccgctgttcatccttgccggtaacatcatgaacaatggcggtatcgcaaagaggcttgtcaattttgcacagcttttcgtgggaaaacttccgggaaacctggcacaggccaatattcttggaaacatgctctttggagcgctctccggttcttccgtagcggctgcatctgcaatgggtggatgtatcagcccgattgaaaaagagcaggagtatgatccggcttactcggcggcggccaacattgcttccgcaccgaccggacttctgattcctccgacctctgcattcatcgtttactctaccgtagccggcggcgtatccatttccacgctgtttatggctggatatgttccgggtatcctcatgggtcttggctgtatggtggttgcattcatctatgcgaaaaaaatgggcatcaaggcgaccggccgtgacaaatccatcagtgttgcgaagaccatctgggatgccatcccgtccctgctgctgatcattatcgttatcggcggcatcgtatccggtatctttacggcgacggaaggtgcaggtattgcagttctttactgcctcatcctgtccatcatttacaagagtatcgatttcaagggatttatggagattctcttgaactccgcaaagacttccggaatcatcctgttcctgatttctgcttcttccgcgatgtcattcgtgatggcttattccggaatcccggcagcaatcagcagtgcgctgctctcggtatccacaaacaaatatgtcatcttcatcctgatgaacgtcattctgatgatcatcggtatgttcatggacatcactccggcaatcctgatttttacaccgatcttcctgccgattgcacagagctttggcatgagcgacatccagtttggcgtaatgttaattttcaatatgtgccttggaaatatcacaccgccggtaggctccgtactttttgtcggatgtggtatcggacatgtatcgattgaggaagtaactccgaagcttattccatacttcctggtactgattgtgatgcttcttctggtaacctttgtaccgggactctccctcggggttccgagcctcatgggattagtttaaggatagacctgtggaattgccgcaataagcatagacctcttttgggttgataagtaatattattagaagatcacaccgtgggatttcagctggaaattcagatggatattcggttcaaaaaatgtggcatttctaaccagccgaatgtttgcatcctcgatgatccgtgtctttccaagtttggagcactccacggactgtgtccgcaaatcatgagacaatttaagaactttcgtgtggcgcttttgccgctgctgaataaaacataatcgcgcgaagccgatgtctgagttgccatctgccttattttcaatagcagatggcagcgagtttcggttcgcgcgattttataatgtctatgaagcagcggcattagccgccactagaaagttcgcccattgtctctgatttgtcggacacactccgggagtgtccaaacgtggaagagacacggaattcgatgcaaacattgagcaggaagaaatgcacacatttttctccaacgaatattccatccgcatttccatctgaaatcccacggtgtggtcttttgataatattacttatcaaagcaaagagcgatatgcttattgcggcagttcctttgtgtaagaggttatcttacaaagagatatgccgtgtaggcgacgtataataacacgcagacggctccctccgcacggctcatggaccgtttggttctcgcgaaaacaaacagcaggataccgctgcagagaagtaggacgcagtcgatcacagattcgccgagtacgtgaagcggcgagatggcagcggacatgccaaggataaacaggatattgaagagattcgatccgaccgcgttgccgagtgccagaccgctgtctccttttctggttgccacaatcgaggtgacaagttccggcagggaagtgccgatggcgatgatggtcaatccgataaaattctggctgactccgaagtttgcggcgatgatgcaggcgttgtcgacgaccagatcgccgccgaagatgacagcggcaagtccgccacccataaagaggatacttttcggaagcggcaataccttacagacctcgccttcttcacggttgcgcagggcggaacggatcatgcatgtgatgtagagaaccattcctgccagaagaagaaaaccttcgacgcggccaagcgttccatcgagaaacatgaggcacagaatcagcgtgaccagaatattgacgggcatgtcccgctttaagatctccgcgttcgtctgaaagccggacaaaaaggcgcagattccgaccacaaccagaccgttgaatatattcgatccgacgacattgctgatggcaatatcgttgctgccgccaagcgcagcgttgatgctgacggacgcctccggagcgctggttcccatggcaacgatcgtaagaccgatgatgacgctgggcacctttaagattttggcgagcgaggaacttccctccacaaagaaatccgcacccttgactaagagtacaaaaccgacgagtaacaatacatattccatacgtgttcctttcctgcgacaaagaaatgggtataaaaaaagacctttatcgcatcaaaaatgagtgataaaagtctcgttacttacaataataaccggccttgcggcgtgatgacgattattatttcagcttctgcgcgcagcgtctggcgcatccgaagatgaaaactactcccttttattaaggctattttaggacggggcaaaaaagatgtcaataaaaatgtcgctatttgtcgaaatccaaacgaaatccaagcggaagccaggcg

SEQ ID NO: 11499 - DNA, 7109 bp, Unknown
  gut microbiota DNA sequence
atgaacctatccatctgtatcattacaaaaaacgaagaacagaatatcgaccgatgcttaaaggcgcttgctccgtacggtctggagacgattgtggtggataccggatcgacggaccgcacgaaacagattgcggcgcgttacacggacaggctgtatgatttcccgtggtgcgacgatttttcggcggcaaagaattttgcgatagaaaaggcttcacattcctatgtactggttttggacagcgacgagtttgtagagcagctggatctgtccgcgctggaaaaacagattgtcgcgcatccgggggcggtcggccggatccgcaggcggaatgtgtttcacagaaacggggaggagcaggagaaccgggagtggatcaaccgcatattcgcaaaagaatattttcactacgagggcaggatccatgagcaggtgacgccactgcgtggcgcagagagcggttatcggacgtatgagacgccggttgtgatcttgcacaccggatacgatctgccagagcagcagaaaaaggaaaaggcggagcgcaacatccgcctgctggagcaggaattaaagcagctgggctgggatggaaatgccggggcaaaagacggcgtcgcaaaggcagagacagccggaacagatgcgaatgctcgttggagcgggcagattccgtatcttctgtatcagcttggcaagagctattacatgatgggagaatacggcgcggcgtgcggctggttcgcgcaggggctttcgtttgacctaaatcctgcactggaatacgtgattgacatggtggagacgtacggatatgcgttaatcaacagcgggcaggagcagacggcactgttttttgagaatatctatgacgaatttggaaaaagtgcggattttcagttcctgatgggattgatttacatgaaaaacgcacggttcacagaggcggtgcgcgaatttgagaaagcggccgggcatgcagagtgccgggcacagggagtgaattcctatcgggcagactataacatcggcgtcatctacgagtgcctcgggaaaaaggaagaggcgcttgcctattaccggaagtgcggcggctatgcgccggcagaggagcggatacgcgagctggggcggaggtagaagaaaaagctatgacaacgagagaagaagcattggaatacggaatgtcatttccggatgtctatgtggatacaccgtttcacgatccaaactgggtgctggtgcgttcccggaaaaataagcgggcatttctctggacttatgaatatcagggacagatgcggattaatgtcaaggcagatccggagtggattgatttctggcggaaagcgtacgaagcagtcattccgggttatcatcagaacaaaaagcactggaatacggtcatccttgacggcagtgtgccggatggagatgtaaagcggatgatagcggaaagctacgatctggttaggtaagggtagtgtcgtgctcgtgcctggatatatgaggggatgcaaatagagttgtatttgaggctacagttggatttctactatgtttgacagggatcgaggcgttaagtgtaatgggactggcattactggcagtggggattttatccggtttaaaggcttatatgcagagcgtaggaaaagcagcacttcaggctattctgggagcaggtacatcggaggttgtgaaagagttattgactctggtgctgcggaaaggatgatagcgatatcgaaaatgcttaaaagaagatggcagggacaacgggaaccctgccattttattcgtgaatattttggacagatagatcgggtttataatttacataacagatccggggtggaagcctacattaaatccttgcatgtgatataaggataagaacatataaggaaataactgggaagtaactgggaaatgacgttgcaatttcccacccacgggcttataattggggcagttaggggagggcatgcaatgcaatatatgacatccagacagaaagctacagaatggtctgtcacgaagcgtatggtaaattactggtgcgcaaacgggcagattgaaggtgcatacaaagaaggcagccgctggtggattccagtggatgtagaacgtcctggagaagaggagtgtttgcggcgcatgagagcgtacaccgttcggattacaggcaagaagagcgttgcggttggcattcaggattttgaggcgttaagacgtgatcagatgttttatgtagacaagacggattttattcggcagtggtgggaatctggcgagacgactacgctgattacacgccccagacgttttggcaagacgttgaatctgagcatgctgaactgctttttttccgtgttctatgaaaatcgtgcggatttatttgaggggttgaaggtttgggaagagaaaagctatcacaagctgcaagggcgtttccccgttatatttctgtcatttgcaggtgttaaggggacaacgtttgaggcggtgcttcggcagataaattatggtattatagaggtatatcgccgctttgagcggatacttgacatgtcgcggttcacggaaagggaacgacaggattttggcagaatatcatgggacatggatgcgtccacggctgcgcagtccgtacggcttctgacggatttgctctatgtgtattatgggcataagcccattattttactggatgaatatgatactccgcttcaggaagcttactttaatagcttttgggatgagatggtttcttttgtgggggctttttttaataattcctttaaaacgaatccatcgctggggagagcattgctgacgggcattaccagaatatgcaaggaatctatcttctccgacctcaataatatagatgtggtcacacaaacgagtacgaaatatgagacggcatttggctttacggaagaagaggtaaaggtgggacttgccagagtaggtctgctcgattacagggaaaaagtaaaagaatggtatgacggatttacatttggacagcgcagggatatgtataatccgtggtcgatcacaaagtttatcgatgcagaggggatctttgatacttattgggcgaatacaagtaataataaactggtgagctcgttaatccgaaagtcttcaaagaatatgaagatggcgatggaacagcttcttgaaggagagatgttacatgtggagatggacgagcaactggactttgcacaattggagtatcgggaatcggctattttcagccttctatatgcgacggggtatctacgcgtaaaccaaaagaacgatcaggaatatgtgctgatgctgacgaacaaagaagtggagattatgtttcgacgcattatacgggaatggtttaacgatatggatactggctatggagatttcagaagagcgttgctgcatgataatatagaagagatgaactactatatgaatatggtcacgctatccaccttcagttactttgacacaggcacagggcgtggtaatattgatgagacagagcgcttttactatggctttgtgcttggattgctggcagatttatcagatcagttttcaatacggtcaaacagggagagtggtctgggaagatatgacattattctccgcgcgcgggaagaaaacggcaattcttacattatggaatttaaggtttttgaccgggagagagacgagaatatgaaagcgtgcgttgcaagggcgttgcagcagatagaagagaaacaatatgagacagagcttgtggcagacggaattgcgagggagcggatcagaaaatatggatttgcatttgacgggaaaaaggttctgatcggctcatagaaggagagtatcttgaagcataccattatctatttcatcggtgtatacgacacacttgatttatttaccggaaaattgcgggaagcctttgagacgatggactatgcgtcctttgtatatgacgcgcggctgccgcagagcaaggatgccctgctgtccctgcttgcggagagtacagcaccggaacgtgaattttcgtgtgtgacatttaataatctgggatacaatctggatatggaggtgcctgcgccggcacagagcgtacgggagaacgatgcgtgtatacaaaagggtgggaccagaaatgtctgggaatattacggcatcccgtatctcaacattctgatggatcatccgtttcactatgagaagccgctgcgcctggcgccggagacgtcggttgtgctctgcacagaccggaatcacgtaaaatatatccgcagatattttaaaaatatccatcaggtggattttcttccgcatgcgggagtggagctgggaagccggcacaagccgcttgcggagagagggattgacgttctgtatgccggagcgcttccgatttatacggtggcaaaaatgataccggatctgtcttccatcccggaagtggacggacagctgatggcgggggatgtgctggcggaattggtgcaccatccggaccggacgacggaggaagtcattgaagagtatcttaaagaccggcgaagcgatatcccggacaagcgcgtgcaggagatcattgtgcagatgcgttttatcgactcctacgccacttcgtttttcagggagcaggcggtgcgtattctggtggaaaacggaatccgggtcacggcgtacggtacgggatgggatcagtgcgagtggagcggcagcccgtatcttgattaccgtggaaaagttcttgcgccggagatccttccgtctatgaacgatgccaaaattgtgttgaacacgatgacctggtttaaggcaggagcgcacgatcggatttttaatggaatgctggcgaaagcggtggtggtaaccgacgattctacctatctgcgccgcgaatttaccgatggcagggaacttgtgatgttccggcggcaggagcttggaacactgccggagagggtgtttgatctgtttggacatctggagcgggcacaggagattgcagattgtggatatgctgcggcgagagacggtcatacgtggaaaagccgtgcggagtatctgaaggagtgctttctgacctgacgaatgcacatgggcgaagatgggagcggtaaatgtaagcttctgcgcgcggtaaggcgaacaaaggcggtaagtctctgcgcgcagtactgcaaagaaggcaatatataggatagaggaatggacagctatgcacatattgatgtaccgatggaaagcatataattacagagacattgagcagacttttttgctgcttggacatacggtggacaatatcgaacaggaactcggaagctatgacgtaagtcctgaatttgagcgggtgatcgaggagaagatccgggggacgcattatgatatggtatttacggtgaactatttcccattgatctcgaatgtatgtgagcgcacaggcgtgaaatatgtttcctggacatgcgacaatccgctgatcagtatgtaccatgaatcggtgttccacgcctgcaattacatttttacgtttgataagacgaattacctggagttccgcgggatgggcgtaaaacatatctggtatctcccgctggcggtagatacggagcggatggatgcgctgctcggggcgccggaaaaaccggaaagacggaatgccacacaggattcggagatgcggaaataccgcggagatgtggcgtttgtgggaagcctttatgaacgcaattcctatgacaagatcaaaaacaggctgccggagtatttaaggggatattttgacgctgttatggaggcgcagcttaacatcagcggagcaaatatcgtggagccgatgctgaccacgaacattctcgaacagctgcaggaatattttcagctggaaaaatccgagggatctttttcggatctggggctgattttccagacgaccgtgcttggattcaagattgcagagatcgagcggagaagagcgctgattgagctgtcaaagcattacagggtcaatgtttacagcaacagcgatgtcagtgatctgctgcggattcagtattgcgggtcagtggactactggagtgagatgccgaaggtcttccgcatgtcgaagatcaatctgaattttacgataccgaacatcaagagcggcattccgctgcgcatctgggatgtacttggctgcgggggctttcttctgacgaactaccaggcagagattccgtactatttcaaggagggggaagacctcgtctgctttgatggtctggaagacctgtgtgagaaagtggggtactatctggaacacgaggaggagcgtaagcggattgcatggaacgggtaccacaaggtgcgggagaagcactcttatatagaaagaatccacaccattctggatacggttgcaggtgaagacgcaaaataaataggtggcggcgcactgccggaccgcgctaattaaaaggaactgccgcaataagcatatcgtgctttgggctgataagtaatattataagaaacagatacttaaaagttccagataaccatgcggcggcaaattctgatcgcaaaatccggtatttctaaccatgccgcagctggcatccgtgatgatccgtgtctttccaagtttggagcactccacggactgtgtgcgcaagccagcagacaattttaggacttttgtgtgtgtcccttgcggcaccagacaacagatggcataaatgccatctttatgtcgaacaaaacataaccgcgcgaagccgatgtttgaattgccatctgccatatttttaatagcagatggcaacgagtttcggttcgcgcggttttatattgtctgtgaagaggtgccattagggacaccagaaagtccgctcattgtctgtggcttgtcggacacactccgtgagtgtccaaacgtggccaagacatggaatgggatgccagccacggcaaggaagaaatacgtgaatttttcttcaaagaatttcccgccgtctgtttattctggaacttttttgttctctggtatttctgtaataataattatcaccccaaagcagtctatgcgtattgcggcaatt

SEQ ID NO: 11500 - DNA, 1356 bp, Unknown
  gut microbiota DNA sequence
aacaataggtatcaagcatcagaccggaatacaccgaagagtgataagccgccgcaaaattgtgccccggattcttgtaggcaatcaggactttgctgacatagctgatcgggtcgatggaagcctgggtggctttgcgttgaagaccgtttttgaaattattcagggtatgaaaactttcgcgcgcgtctggtgcggaaacggcgtcggtcaacaggctcttgtcaatatggatcgatccgtcctgctgcagatttagcccgatggattccaactcgttgaaataggactttgcaacgctctccatatcgtggagaagcttgccggactcctgactgccgtggtaattgtgaccgagctgtatcatgttgttgtagacgttgaccagcgactgcacattgtctgcgatcgcatccgtatccgctttgaagccgatcgttgcggtttccccgccagcactgggggctttcagcgtcagttcaaaagcgttgttgacggtaaatgtgttggacagtgacgaatgttcggtaccgtttaacaaaaagagcgaattgaccggcatttccgtgatatcattgatgccaagcgtgcgcatggcacgtatggaaccgctgtccggcgccggcataatctcaaacaggtactgctcgttatcgctgagaccggtctgctgcgacgtgatggaaagcgcattctgtccgcggtcgttggagaccagtgtggcgtttaagccgatattggcattgttgatcagccgcatgatcttgcgctgcacggtctcgttggtgtccctgccgctgattgtgtactggaattcataagaactcagattggtattcaagtcgaagctgtaattgcccggcacaaagtcgcttgcgcccggggcaagatagacgccgcggttgacctgcggtgtggcgagacgttctaccgtcacatcgaactgcttggagttgtccgcgtccatgttcgagccgatgtactgcacactcacagcgtcctcatcagaagactgcgcaattttccgggaaaaagcgtgttccgcattgtcgtccggagcattgtttgaaagcgccgcgataaaattctcgatcgagcgggcctgctccttgatgtcgatggcaaaacggccggtatccctggtaaaattgattttgtaaaggggggaatctttattaactttgacaatattattgtatacggcgcgcagctggctttttttgtgcgtgtcgtagcgagacgtgccggaaccggcataagtgctcaggtaatactgataggcactgtcgatgactgccattggaatccctcctttcttccatgaaatcatatgccttcgcatatgcagggatataa

SEQ ID NO: 11501 - DNA, 40078 bp, Unknown
  gut microbiota DNA sequence
gtccgcccattgtctccggtgtgtcggacatgcacccgtcggattgtccaaacgtggaagagacacggaatctgatgcaaacattcgaccggaagaaatactcacatttttctctaacgaatattccatctgcatttccacacgaaatccgcaagtgtgtttcttataatattacttatcactcccaaagcggtctatgtttattgcgacaattctttgtgacaaaagcctcagcgggttatcccatcacaacctcgacattcacgtccttctttccgtccgcgagtgcgatcggaatcatgccgccggagatcccggatacatcgacatccttgccgtcgacgatcatggaaatgacgcccttctccacatggttcggattcttgacagtcacgtggtaagtcgtaccgcggaaatctcttctggaggtaaagccgtcgagagaggacggaatgcacggatcgatcaccagtccgtcataatccgggcggatgcccagaatgtactgggagacgtcaaggaatgtccatgcagccgttccggtcagccagctgttcttggcttcaccgaagttcctagcgtccttgccggcgatcatctgtgagtacacatacggctcggtgcggtggatttcgctgatgtcctcgatgtaggcaggacaggttctggtgtatacctgccatgcgcggttgccgcgtccgacgaccgtctcagcgattgagatccacggattgttgtggcagaagatacctgcattttccttgtatcccggcggataggaagaaatctcgccaagttctacgtgatatctgtggtaagccggctgcagcaggacaatgccatacttggtgtcgagatacttctcgacagactgcattgcctttaagcagttgccttctttgagaccgatctctgccatgacgcagaagccctgcggctcaatgaaaatcttgccctcctcacactccctggaaccgactttgttcttgtaatggtcataggcgcgcaggaaccattcgccgtcccatccggcgtcaagaaccgttttctccatatcggcgatcgctttctcagcaaccgctgcctcgtcatccatgcctctgtggcggcagattgccgcatagtcttttccgtagcgcacgaacatgccggcgataaagacggactcggcattcggaccttcggacggaccgaacgtctggaacgattctcccggttcggtggagaagcagttcagattcaggcagtcattccagtcggcgcggccgattaacggcaggccgtgcggaccgaggtgctccatcgtataatggaaggaacggcgcagatgctccatgaagtccgttgccttggaaggatcactgtcgtacggcgtcatctcatctaagatcgtgtagtcgccggtctccttgatgtaggcggcagtacatgcgatcagccacagcggatcgtcgttgaaaccgcttccgatgtcggagttgcccttcttggtaagtggctggtactgatggtatgcgcttccgtcctcaaactgcgttgcggcgatgtcgagaatgcgctctctggcgcggtccggaatcagatgaacgaaaccgagtagatcctgacaggaatcacggaatcccatgccacgtccgatgccggactcaaaataggaagcggaacggctcatgttgaaggtaaccatacactgatactggtgccatacgttcaccatgcggtcgagcttctcctcggaggaagagatggtgaagtgggagagcagttcgtcccagtattcctttaatgcggcaagtgcggcatccgccttctcggtggtgtcgtagcgcgccatcagggcttccgccggtgcgcggttgatcacgccgtcctccgggcgtccgatccatttttggtcgatggggttctcgatgtaggcgagaacgaacacgaaagttttggactctcccggtgccagcgacacggaaaggtgatgcgagccgaccggagcccagccgcttgccatggaatccttggaagcaccggtgacaaccacctcgggagcggaattctctccatatgcgccgaggaaggaatcacggtcggtgtcaaaacctgcgatcggagcgttgaccgcatagagcgcatagtgattgcggcgctcgcggtattccgtcttgtggtagatcgcggaaccgtggacctctacctcaccggtggaaaaattgcgctggaaatttgtcatgtcatccatggcgttccagagacagaattccacgtaggagaaaacggaaaacgtctttggcgcgctgccgttgttggtgagcgtgagcttgttgatctcgcagctgtcgtcgaccggaacaaaagcggtcagctctgcggagagatcattcttggaactgcggaaggtggaatatcccatgccgtgatggcactcataggaatccagctcggtctttgtgggcatccatccaggattccagattgtatcgccttccttaatatagtagtaatgaccgttgctgtcgaacgggacgttgttatagcggtatctggtcagacgcaggagctttgcgtctttataaaaactgtatccgccgcaggtgttggagatcagggaaaagaaatcctttgatcccagatagttgatccacggaagcggtgtccgcggagacgtgatgacgtattctttcttcgcatcatcaaaatagccgaatttcatgggcttacctccattcatatcatgtaagcatacgcatttccgaaacgtccgttacgaaaataggtaagtgaattgttcagattgaaataattgcgaaaacgattaagtaaacaatttctacctaaaagtataaactgtaaaaataaaaaaatcaattaaaatacgcttaaatacagggaaaatggcagattgaacaaaaaagcgggcaaaatatggaagaaagatacaaagccgttaaaactggaaatatagacataaaaagcgaaaccgtgtaagaatgatagggaaaatacaacttataatagaagcaaaagaaacagaacaagcaaatatgcacaaaaaatcagcaaaaaaagtgttaaactcgccgaaatgacaaatatgtattgcatttttgcaaaagatagcatatagtaaaagtacgaaaacgattaagtgatgtttcgaaagtgtggaggacgcaatggtatcattaaaaacgatagctgagaaatgcggtgtctccactgcaacggtaagcaaggcactcaacgaccagaaggatgtcagcgaagagacgaagcatcggatcaagaagacagcagaagcactcgggtattttcccaatgcggcagcgagagcactcaagaccaaccgttcctataatataggagtcctctttgaggaagaggcgggcagcggtcttacccatgaatatttctcgggcgtgctcaacggtcttaaagttcaggcagagaagcaggggtacgatatcacatttatcaatacctgttttgagaaccgcaagatgtcctattatgaacactgcagataccggaactttgaaggagtcgcaatcgtctgtgccgattacaatgatccggacgtcctggaactgatgaacagtgatctgccggtagtaacgatcgactatgtacatcataactgtacggcggtaagctccaacaacattcagggcatagaagaccttgtgaagtatatttaccagcaggggcaccggaaaattgcatatatccacggtcaggagaattcctatgttaccaaggaccggctggcaagtttttaccggacgatggatgaattaggactggaggtgccggatgaatatatccggactgccgattatcttgagacgaaggaagcggcaaggcagaccagagagattttaaatcttcccgatgtgccgacctgcatcatctacccggatgacaccgccttaatcggcggaaggaatgtcatcattgagatgggacttcggattccgagagatatctccgtggcaggttacgatggaacgcgcatctcacagctgctgcatcccaaacttaccacaatccgtcagaacacagagctgattggaagcgaagcagccaagcgattgattggcacaattgaaaaaccgcgaacaactctcgttgagagagtcgttatagaaggaagcttagtaccagggcaatccgtaggaaaatttttgcagaaataacagcggggcgcaggaaaaggtttcccaaaccaatggcgaaagccagacatcttaaggaggagggttttctatgaagaagaaaatcattagcgcactcttatgtgcatccatggtagcatccatggcagcaggatgtggatcatccgacacagcagacacgacgacaacagacaacacagcatcaactcctgcaacagaggcagcacctgcagcagatgcaggcacagaggcagctacagatgcaacagcatccgatgaaggcaaagtcctcaacatctactgctggaatgaggagtttaagtccagactggaagatcattatccgggctacaccatcgtagacggaaccacaggaaccatcggtgatgtaaccgtaaaatggaacatcacaccgaacgatgacaacgcataccagaataacctggatgctaccttattaaagcaggcagatgcagcagctgatgacaagatcgatctgttccttgtagaggctgattacgcattgaaatatgtagataccgattacacgatggctgtgaaggatctcggcatcacagatgcagatctggcagatcagtatcagtacaccaaggatatcgttaccgattccaacggcgtattaaagggtgtatcgtggcagggctgcccgggcgtattattctacaaccgcgaagcagcaaaggaagttctcggatctgatgatcctgcagatgtacaggaatatgtaaaagactgggatactttcaatgacacagcagcaaaattaaaagatgccggttacaagatcacatcttccgcaaacgattcttaccgtgtatactctaacaacgtatcttccaagtgggttacagacggcaagatcacgatcgatgacaacatcatgaaatgggttgacgattccaaggagcttgtagatgcaggcgagaccagcacagcagagctttggagcgatgactggaagaaaggcttctatccagacggtaaggtattctgctactttggaccggcctggttagtaaacttctccatggcagctgaggacgaaggcagtatcgcaaacctcggcggatggggcgcaacacagggaccgcagggattcttctggggtggtacatggatctgtgcagcaaacggaacagataacccaagccttgtaaaagatatcatgcttcagatgacaaccaacgctgatatcatgaaggatatcgttgttgcagatgatgactttgtaaacaacaagaccacaatggaagctatggcagaagacaccagctactccagcaaggtattaggcggacagaatccgttagctatgtactgcgcaggtgttgacggtcttgacttaagcaacctttccgcatatgaccagggctgcaacgaggagttccagaacgcaatgaagaactacttcgagggcaacgcaacgaaggatgaggcactggatctgttctacaaggcagtagaggagaaatatccggaactgacacactaatcgtggaactgtaatctcagcaactgagagaatgagcatcaatagctgacgcatcgatggatgccagaaaaagatgcgaaggatagaatgacaggagccacgcctgccggccatcaggaaggcgggtgtggctcattctatgtcaaaatacaggtaatctgtgtagaaatgcagagctgacagcaggtctgcaaaaaaaggaagggctgctgtgagctctgtatacaaaggataggggttccgatggatctccgggagcggaagaccagccggaacgcgtatccggcaattataaaagaagggggcaaatgctatgaaaaagaagtcaaaagccgttcggtataataaatggggctatatctttttacttccatttattatcgtgtatgtgatttttcagttgattccgatggtaacaaccatttacaacagtttttttgagaattatctgtcgggactgacgcagatcggaccgaattttgtcggacttgcaaactataaaaagctgttttcagacggtgacatctgggtttatgccaagaataccatggtgatgtggattatgtgttttattccgcagatcttcctgtcactgcttttgggcgcatggttctcggatgtgagcctgaaattaaaaggacagcggttctttaagacagtgatgtatctgccgaacctgattatggcatctgcatttgccatgttgttcttcaccttgttttccgacagcggtcctatcaactcactgcttatgcagattggctttatcgatacaccttacaaattcctttccaatgttggaagcacaagaggactggttgcattcatgaattgcctgatgtggttcggcaatacgacaatccttctcatggcaggaatgatgggaatcgatacctcactctttgaggctgccgaggtagacggggcgacttccatgcaggtattcttcaagattacgttgccgctgctgcgcccgattttggtatatgtgctgattacttctctcatcggcggtttacagctgttcgatgtgccgcagattttgacaaatggaaccggagatccgatgcgttcctccatgacgctgattatgttcttgaataagcatctgtacagtaagaactatggtatggcgggtgcgttgtcagttgtattgttcttcatcaccggtgtattaagtcttgtagtatttaagattaccggcaatgacaagagaaaggggtgagctgtatggaaacaagagaagtacataaaggaatgaatattcatacaagaagagccattgcatatgtggtattgacgattatttcgtttttctgtctgttctggttctacatcctgtttgtgaatgcaacgagatcaaacggacagctgcagtccggattcacactggcaccgagctcgcatcttctggagaactggaagaatctgctcgcgggaacacttccggtatggaacggtatgttaaacagtattatcgtagcaggcttaagcgcactggtttccgtttatttctcgaccatgacggcttacgcaatccacgcatatgattttgggctgaaaaagttcatctatccgttcatcctgatgatcatgatgatcccgacacaggtaacggcactcggatttgtacagctggtcggaaagatgcacctggaggattcttttattcctctgattgtgccgacgatcgctgcaccggttacatttttctacatgaaacagtacatggaaagcgccctgccgctgtccctcatcgaggcggcgcgtatcgacggctccggcgagttccatacctttaatcagatcgtacttccactgatgaaaccggcgattgcggttcaggccatcttcacattcgtaagcagctggaacaattactttacaccggcattgatcttacacgatgacaagaagaaaaccctcccaatcctgatcgcgcagcttcgtgcggcagactggctgaagttcgatatggggcaggtgtacgtcatgatcgcgttctccatattcccggttatcgtcgtatacctgatcctctccaaacacatcgtgcagggtgttgccctcggaagtgtgaagggttaaaaaatgtggcagtcacacggaacgatggcattgtgataagctgcaactgttaaaagacgggaaggctcaagtttcggatgaacccgggcgtgaacattcgttggagcaaaatacgtgaaattcttttctgccgtgtttttcatctcattctgtgtctttgccacgttttgacaatccacaggaggtgtccgacaagctgcagacaatgagcgaacttcctagcgtgccacaaggcacacacgaaagttctaaaattgtctgcggcttgcgaacatctcctcgtggagtgttcaaaacttggaaagacacggatcatcgcagatggcaaacacggcagaattagaaattccgtattttgcgctccgaatgtccacgctccgggtttgatctggaacgttgtcctttccgattttttcagtgtaatatatgacatagccgtccgttcgcgtgacagccttattttgtggagacatcgtcaacatcccggtatctgttgtgcagatattctgccctgtgattgacttttttcagaaaattatgtagtatggagtaagactaaagtacgatagatgcgggatctgggggtgctaagatgaaggcggaagtggcgcattttacgacggaacaaatggttgatatggtagggcttttaagcccttgtatggatgattacctgtatgtgtgtgattttaaggaagattattaccagatttcaccgaatgcggtgaagcgtttttgtctgccggcagatcattttcacaatgtagtggaaatgcacagacaggttgtatatccggatgatcttgatttgctgctggtagagctggagcttctctccacgggcaggaaagtattccacaatctgcactatcgctggatggggaagaatcatgaaacgatctggatcaactgcaggggcagagtattgagcgatccggaggatggatcacccagataccttgtgggctgcatcaatgagatcggggcaaaacagaaggcggacaatgtcagcggcctgttgggagaatatagtctgaagattttttatgagagccgcagtccaaagctgccacagggatttttgctcagaatcggcatcgatgatttcaagaacatcaacgagagccacggcaacgaatacggagattatattttaagaagaacggcacagtgtattgaggaaaatataggctcggaacagagtctgttccatattgtggcggatgagttcgcagttgtggatttttccggcggcagtgtgcagcaggccgaagatcttttccatgagatcaagaaatccatctacgcatttattgagcagaaccagtacaaagcggtgtatacggtgtccggaggtatcgtgaagaacggcgatgtggacaattcctttgaaaatgccatgaagctttcggagtttgcactcagcgaggcgaaggagcgcggaaaaaacagctgctatgtatttgaggaggaggaatacgaagattatctgaaaagccgcacactgctgcggcagctgcatcatgcggtaaataatggatttgagggatttgaggcatatttccagccgttggtaaatgctgcaaacggtgaactgaccggggcggagacgctgctccgcttccattcaccggagggtgggatggtatcgcccggcgaatttatcccgattctcgaagaatccggtctgattattccggtcggcaggtgggtgctgcgccaggcgctggatgcatgcagggaatggcagaagattcttccggagttcaaggtgaatgttaacctgtcctatgtgcaggtgttaaagagccgtgttctcacggatgtgcgcaggattgttgatgagttcggagtcaagccgtcgagtgtctgcatcgagctgacagagagcggttatctggaggagaatgagcgctttgacaaagtctggaacggactcaaagaatacggtgtattgctggcactggatgattttggcacaggatattccaacctgcgttgtttaagcgatttaaagcctgcatatattaagattgaccggtcgttcacattaaaagcgctgaaccgtgaatatgagtaccggcttttaaatcatatcgtggagatgtcccacagcctggggcttcacgtatgcgttgagggaatcgagacagagggcgaacttacaaaggcaaaacagacagagccggattatatacaggggtttctgttcggaaaaccttgcagcagggcggaattcacacagaagttcttcacaaaacaggccggataaaggacttttcatgcgggtgtaaatatgctatacttgcatcaggagtgagattatgccggaagaggtgcggcgggatgtgcggcatctgctgacagaaagacgaggagaaggagaatgacagagacgggttttttgatctttatggggatcttattgctgctggttgtaattgtggtcgtggttgtggtggcttcttcggtagccggaacagcggcggcaattgcggatgacgacgatgaggaagaataagtatcgtaagacagcagaatagacaaacgcagatatgctgcggagaatcgaaagattctcgcgcagcataaaaaatgtcaaaaaccgaccgactggtcggacggaatacaaagtcaaagagaggatacagatgtgatttcaaaatttagtgtaaaaagaccgtacactgtcattgtgggtgtaatcctggtgatcgttctgggagtggtgtcatttaccagaatgacgactgatctgctgccggatatgaacctgccctatgcgctggtaattacaacggatgtgggcgcgagcccggaggaggttgagacggatgtgacggcaccggttgaagcctccatggcgacgacatccagcatcaaaaacgtgagctccgtatcgtacgacaactattccatggttattctggaatacgagcagagcgccaacatggattccattctgattgagatccagcagaagctggaccagctggagggaagtttttcagacagcgtcggaaagccgatgattatgcagatcgacccggatatgatgccggtcatggtggcgtcggcggatgtggaaggcatggatgagtcagaggtgtcttcctatgtggaaaatgaattttcaccggcactcgagagcgtggagggtgtggcttcggtaagcgctaccggcgtgcttgaggaatccgtgcaggtgaccatggatcaggacaaaatcgatgctctgaatgataagattcaggaaaagatcgaggaacagtttgcagatgcgcagaaggaactggatgatgcatccgcagagctggaaaatggcgagaaaaagctggagagtggcaagagcgaactggcaaaccaggtcagtgccgcagccaatcagattgaaaatggaaagattcaggcgtatgtcggcgcatcagaattaaagacgaatatgaccatgatgactgaggcaaaaaagatcatggagaaggcaattccggcactgcagcagctttataatgatggaattgcagccagacagcagctggaagcgctgaagaatatgctgacaccggaacagcaggaggcgattgcggcaggcagcgcacagatcgagcagcaggcaaatgcacagcttgcaacaatcaatgaatcgatcgccgcatggggacagcagctggagagccttggcatcaaagtacagacactcgatgatctgccctatgcaatcgcagatatgacgcagaagcttgccgagatcaatacgggaattgcgaccatgcaggaggcgcaaaaacaggtggacgcaggtaaaattgcgctggatgaagcctccgcgcagctgacgaagaaccagattgagggaatcctgcagttgagcgaggcgacagcgcagcttgccgatgcaaagaatcagctggcgcagggacagagccagctggatgcggcaaaggatagcgcaaaggaatctgcggatctggatcagattctcacggtcgacatgctcggtaacctgctcgcggcacagaatttttccatgccggcaggctatgtcggggaaggcgagaaccgctacatggtgcgtgtgggcgataagctggattccgtggacgaattaaagcaggtggttttgattgatcttggtctggacggaatcgggccagtctgccttagcgatgtggcggcagtggaactggtgaacaacgccggtgagtcttattccaaagtaaacggaaaccccgcaatcatgctttccattgaaaagcagaccgggtactcgaccggggatgtgacaaagcggatccagcagaaattaaaggcgatggaggcagataatcccgcacttcacacggcgatcttgatgaatcagggaatttatatcgatatcattgtgcagtcggtattggaaaatatgatcgtgggcgcgctgctgtccgtcatcgtgctgattctgtttttaaaagacatccggccgacgctcgtgattgcatgctccatcccgctcagtgttatttttgcggtggtgttgatgtatttttcaaatatttccttaaacattatctcgttgtcgggactggcgcttggcatcggtatgcttgtggataactctatcgtggtcattgagaacatctatcgtctgcggagcgagggatattccatcaaaaaggcggcggttgagggagccggcggcgtgaccggagccattattgcatcgaccttaacgacggtgtgtgtgttcgttccgattgtgttcacagagggaatcacgaggcagctgtttgtggacatcgcactcacaattacgtttacattgacagccagcctcatcgtggcgctgacgttcgtgccgatgatggcggcgggactacttaaaaatcccaaagaggtgcggcacgccttctttgaaaaagtgcagcagggatatgcgaagcttttggaactggcactcaggttcaaaccggtcgtgttcatcggtgtgactgtcctgcttgtgacgagtgcgcttgccgcgtattccagaggattttcctttatggatatgaatatggaaaccgatcagttgaccgtgactgtggcggcgaaagacgacgaaaaactgacgtttgaggagctctgtgagcgcgcagatgaggtgacagagaagattgcgggcattgacggcgtggagacgatcggagcgatcgccggaggagacagcgctctgatgtccatgggaggcagcagcgacagtgtgaccatgtatctgcttctggaggaggattcctccgtcacgacgggagagattacagcgcagattgcggagctgaccaaagatatggactgtcaggttgacacggacaattcggcgtcggatatgagttccttcctcggaagcggtattacggtgcagatcaagggaagtgaccttggcaccctccaggaactggcagggaaagtggccggtgtggtggaagcacaggaaggaacggtggatgtggatgacgggctggataatacgacgcagtcctacacgattcatgtcgacaaggaaaaggcagcggaatacggcatgacaacagcgcaggtattccagctggtctatgcaaaattggcgtcccagaccgcggtgacgtcgatctctgccggcgtgcaggattacgaggtgtatgtaaggagcgaggagcaggcgaatgtgtcgctcgatgatattaagaatctcacgttttcctacgaggataagatggcgcagctaagcggcacaggtagcgatgaggagaaagagacggacgaaaaactgtcagaggataccaaggatacaggggatgccaaggatatcgaagacacagaagataccggggataccggggatacggtaaaggagattccacttaccgagattgcgacgtttgaggctggcagcagcttaaacgcagtgtccagggattcccagacgcgctatatcagcgtcacagcaggtgtggatgacacacacaacgtcacgcttgtcgcaaacgcactgatgaaagaactgaataaaatagatctgccggaaggatactcaattgagatgacgggtgaggatgagatgatagcagatgccatgcagcagttgtacctgatgctgattctggcggtcgtatttatctatctgatcatggtggcacagttccagtcattcctgtctccgttcatcatcatgttcacgattccgctggcgtttaccggaggtctgtttgccctgtttttcaccggaaatgagatcagtgttgtcgcaatgatcggattcgtcatgcttgcaggaattatcgtcaacaacggtatcgttatggtggattacatcaaccagctccgcaggggcggcatgacgaaaaaagaggcgatcttaaattcagcaaagacgcgtctgcgcccgatcttaatgacagcgctcacgacgatcctgtcgatgtccacgatggcgctcggactcggtgacggttcggaaatgatgcagccgatggcgattgtgaccgagggaggcctgatttacggtacgcttctgaccctgtttgtggttccgtgtatctatgacgcgttcaacagggagaaaaatatggtggaggaagaattataatgaatgggagatatgaaaacggggcactgccggagaaagtgcggctgctgtatgaggcggtgcttgccatggtaaccgatggctgggatatcaaccgcatgaaggtgtcggacatcacggcgcaggcggggatcggcaaaggaacagcgtacgagtatttttcctccaaggaggagatcattgcgaatgcggtcctctacgatgtggagatgcggcttgcgcacgtactggaaatcaccaaaggtgagggagattttgcaggaaaatttgtacagattcttacttatatggaagaggtgttcgcgaagcggcaggcgttctgtcttctggtacggatcggaactggttcgtatgaggtctctgagtccatgcgcagggaatgtgaaaagagacagcaggctctgggctgccatctggcggataggattgtggagtccctgatgtgccagggcgtgtcggaaggcacgatcggggagacgaatccgtacttgcagaagctggcgttcatggcgcagatgacagcgtttgcaggatacctggtcgatctgggaaaaggagagaagatggcggtaagcagggaagaggcgaagcgctttgtctatgaggcgctggtgaagagcctgaactaaaaatttcttgacaaaacgggacactgcacgtatcattaacagtatgtaaaaggtagagagaaagaggagtacatgcagactcgccgcagagagagagacccatcggctgcaaggtttcttggaaggagatgcgtggaaggtagcttttgaaccggaacacccagaaagcggtacagaagatgtacggcagcaagtgttcacgcccggttcccgttaacgaaccgctggttagagagcatctgaccggagcgaagaccggctgtatacagctggtgaacaaaggtggtaccgcgataagtcgccctttgtatccttgcggatacaaagggcgtttttatgtaattaggaaagaaaaggagagaggacaatgtgccagaattgcagcaaagaacttgccaagacatatgatccgaaggggatcgagggaagactttacaaaaaatgggaggacaacggctatttccatgcggaagttgaccgtagcaagaaaccgtttaccatcgtgatgcctccgccaaatattaccggacagcttcatatgggacatgcgctcgacaacaccatgcaggatattttgatccgttacaagagaatgcaggggtacaatgcactgtggcagccgggaaccgaccacgcctccattgcgactgaggtaaaggttattgagaacctgaaaaagcagggaattgacaagcacgatctgggacgcgaaggcttcctcgagaaatgctatgagtggaaggacgagtacggcagccgcatcatcaaccagttaaagaagatgggttcctccgcagactggcagagagagcgttttaccatggacaagggctgctctgacgcagtgcttgaggtatttgtgaagttatatgaaaaaggactgatctacaagggctcccgcattgtcaactggtgcccggtctgcaagacctccatttccgatgccgaggtagagcatgaggagcaggacggatttttctggcacatcaactatccggtagtcggcgaggaaggcagattcgttgagatcgcaacaaccagaccggagacgctgttcggtgataccgcagtcgctgtcaatccggacgatgagcgctacaaggacatcgttggaaaaatgttaaagcttccgatgacagaccgtgagattccggtcatcgcagacccatatgtcgacaaggagttcggaaccggctgcgtgaagatcacaccggcacatgacccgaacgactttgaggttggaaagcgccacaacttagaggagatcaccgtcattaacgacgatgcgacgatgaaccatttcgcaggaaaatacgaggggatggaccgctacgagtgcagaaaggcattggtggacgacttgaaggagcagggacttctggtaaaggtggagccgcactcccataatgtaggaacacacgaccgctgcggtacgacggtagagccaatggtgaagcagcagtggtttgtaaagatggatgagctgatcaaaccggcagtggaggcagtgaagaacggagatatccagctgctgccgaagcgcatggagaagacctattttaactggacggacaacatccgcgactggtgcatctccagacagctctggtggggacaccgcatcccggcttactactgtccggactgtggtgagatggttgtggcaaagagtgcgccccagaagtgcccgaagtgcggatgcggtcacatggagcaggatccggatacgctcgatacctggttctcctccgcactgtggccgttctcgacactgggctggcccaagaagactgaggatctggactacttcttcccgaccgatgtgctggtaacaggttacgacattattttcttctgggtcatccgcatgatcttttcgggttacgagcagatgggaaaagcgccgttccacacggtactgttccacggactggtgcgcgattcccagggacgcaagatgagcaaatcgctcggcaacggtattgatccgcttgaggtcatcgacaagtacggtgcagatgcgctccgtctgacgttaattaccggaaatgcgccgggcaacgacatgcgtttctactgggagagagtcgagtcatccagaaactttgccaacaaagtctggaatgcatcccgttttatcatgatgaatctggagggggctgcgataaccgagccgtccgcggatgagttacagccggcggacaagtggattctctcaaaggtgaatacacttgccagggacgtgaccgagaacatggacaagtacgagatgggaatcgcagtgcagaaggtttacgacttcatctgggatgagttctgtgactggtacattgagattaccaagacgcgcacctacaacaaagagcaggatccggtttcagcaaatgcggcgttctggacattaaagacggtgctcacagaggcgttaaagctgctgcatccgtttatgccgtttatcacggaggagattttctgcacactgcatcccaaagaggagacgatcatgctggcaaaatggccggagtaccgcgcagactggaatttcccggcagaggaagagatgttagagcactgcaaggatctggtaaaaggtgtccgcaacgtgcgtacggagatggatgtgccgccttcaagaaaagcaaagattttcattgtggcagacgatgccgcactgcgtgagacatttgagaagacaagagaggcatatcagaatctggcaggtgcaagcgatgtgagtgtacaggcagacaagaacggaatcgaggacgatgcggtatctgtcgtaattccgggagcaacactgtatctgccgcttgaggatctggtcgattttgagaaggagaaggaacgcctcttaaaagaaaaagagcgtctgaccaaagaactcgcccgttccagaggaatgctttccaatgaaaaattcttaagcaaggctccggaggcaaaggttcaggaggaaaaagagaagctcgcgggctacgagcagatgatggcacaggtcgaggaaaggctcgcacagatgaaccgctagaaaagagttcgtaaatccctgcgtgttgtatcggaaacgcaaaaagatgtacttgaaaaagtaccatcggactagtatgatagaatgtagatggattgacagtagcaggtgggatttacacagaatggggagcggcggactatggcggaacttacacaacagaaacctattatacgcataacatttgatgagatggaggcctatatgctgctcccggagccggaacagggaacagggtatacggactcccagatccggcaggagatggcagcgagaggaatcaccacaggcatagatgagcagcggatttccgatatgctggaggggcatacatacaatgcagagcttctggtcgcgcaggggaagaagccggtggatggaacggacggttactacgaatacaagttcgacacgaactttgacggcaagccgaagcttctgccggacggttctgtggattactggtcggtacattcgatcgagtctgtgactgccggtcaggtgattgccgtgtatcaccctgctgtgtctggcgaggatggaatgtcggtcaagggcgggctggtgcctgccaagcacggaagagaacagatgccgttaaagggcaaaggtttcgatcgtatggacgatgaggtgacttatacggcttccatggacggtaagatcgagatgcagaatgaccggattgtggttcttccggtacatgaagtctcggggaatgcagagctggcagagggtaatatcgacttccgcggagatattgtcattcacgggaatgtggagagcggcgtcaacatccgggcaaccggatcaatcacgatcgacggtgtcgccgaagcgtgcatgctggaagccggcaaggacatcatcctaagaggcggtatgctcggcggcaacaaggcgtctgtgaagacgaagggcgcgattactgcgaagttttttgagttcacgaacattctgtgtgagggtgatctgcaggcggatgtgctgatggattgttcggtgatctgccatgggcagatacgtctgaccggaagaaagggcagtattatcggcggtaaggtacaggcgatccgcggactgattgcaacctcgcttggcaatgatgccgagaagcgcaccgagatctttgtcggtgccggaattgatgtgtacagccgcctgcgtgtcatggagaagaagatcgagacgacgagggaggaactggcgaagatcgaggaaggattggagaagttcgagattctctccaaggagcgtggcgtcagctacacgaacgatccacgccggacgtcgctgcttcggattaagatcaaggattctgcaatgcttgccagcgacgaggaggaagtgcggaagctccgtattctcgcagagagttccagaggcgcatgtgtctcggtgatccaggagatttatcccggcgtgatcatcaatatggacgagttgaagcttgccttgaaaaatatggcaaccggagtggaattttacaaattaccggacaagatcggaacaagaccgtgcagcgccggtgtcgaatagcagaagtttctgcgtcaaaaatagcttgattattagcaccactatattataatgagaaagtgaataatatagtggtgtttttatattgatgacagaggtgataacagtgatcaattttgaagaagaattaaagaattttaagccgagcctggaagtggaagaggcggagcaggctatctataatcatgaactcacggatatgacggacgtattgcaggagatcctgcaggatatgaagcgcggcatgtagaagcaggcagggtcaggattgataaagtgaggttttccatggaatgttataattgcggggcgaagctgggcaagggcgatatctgccagaactgcggagccaatgttaaaatatacaaaaagatcattatggcgtccaatgcctactataatgatgcgttagagaaggcggcagtgcgggacctgtccggcgcgatagagagtcttaggaccagccttcgtttttataagatgaatatcgatgcgcgcaacctgctcggactggtctacttcgagacgggcgaggtggtcgaagcgttgacggagtgggtcatcagcaagaattaccagccgagggacaacgccgcaagccggtatttaaatgagatccagaacaatccgtcaaggctggatacgatcaaccagacgatcaaaaaatacaaccaggcgctgctgtactgcagacaggacagccgggatctggcgatcatccagctcaagaaagtgctgtccttaaatccgaagctggtaagcggtcatcagctgctggcgctcctctacattcaggagaagaagtacgaccttgccaagaagtcgcttcggaatgcgggaaaaattgacgccaacaacaccacgacgctgcgctatttaaaagaagtcaacgccggattgcgtgagaataacccgaaaaagcagaagaacgaggatctgatctcctatcagagcggcaatgagaccatcatccagccgcgctatctcaaggacaattccgcaatcggaacgatcatcaatatggtgatcggaattgcaatcggtgcggcgatcacctgctttctgattgtgccgggagtgcgcagggagatccagaatcaggcgaaagcggaggttcttgacgccaacaatgccgtggcatccaagaatcagagcatcagttccttagaagcgcagatcgaagatcttacatcacagatcacggatgcgaagaacgaggaggagagcagcgccggaaaggtcaacacttacgagcagcttctgcaggcgtacgtggcgtacaccgacggtgacatcgagaaggctgggacggcactcggcaacgtcaataccgattatctttcggatgactccatgactgtgtacgatacgatcaatgcacaggtaaacgcggagtatatcagcgccgtatataaggaagcaacagatgcttacaatgcgcaggagtttacacaggcaatcgaggattacctcaaggtgatcgaactcgatgaaacctacgacaacggcaatgcgctgtactaccttgcgcagtcttaccgcaggaatgacgacatggacaatgccaagacctattatcagaagtttgcggatctgtatccgggaaccgagcgcgctgccaatgcacagaggtatctgaacaccgaagaataagcggggacaggaagaagcagggtactgcgcaaacagacacaacagtgataagacaaaagaattatgatacaaaagacgtcgaacggagcagtccgtaccggcgtcttttttgtttcataggaaactttgttcctattatacaaaaatgccataaagaaaagaaagggaggaaaaaggatggaaagatattgcgaacaggaaaaaaactgcctgcgggtgtatgtcccgagggaactcgatcatcatgaggcagaccgcctgaaacaggaggcggatttctttattgagaccggtcaggtgaagacgctcgtgtttgattttgcgggaacggagttcatggacagctccggaatcggggtgattatcgggcggagccggaagatgggatattttggcggtgaggtgtatgcggaacatttaagcggcagaatccttaagatttttaaggtgtccggacttcacacgctgatacggacaagcgtacctaagcagcagaaagagcgggaaggggagaatcacaatgcatagtaagaatgaagtggaattaagttttgatgcgcgttccgtcaatgagggatttgccagaatggcggtggctgcatttattacagagctgaatccgacgatggatgaactctcggatgtcaagacggccgtgtcggaggcggtgaccaatgcaatcattcacgggtatgacaatccggaggaaaaggtacatatgacatgcaggatcatgggacgggaagtggagatcatcgtctgtgatacgggcagggggattgaggatgtggcgcgggcaatggaaccgttctacaccacaaagccggaactggagcgctccgggatgggatttgcgttcatggaagcgtttatggatgaagttcaggttcagtctgcgcccggaaaaggaaccagcgtgcgcatgaaaaaatacattggcgtgcaggaaggctgaacgttatggagctttggacggaacagatcagacaggctcacgcgggggacaaggacgcaaggaaccggctggtggcagaaaacttgggactggtgtacgcggtgacgaggcgttttgaacacagaggacatgacagggaggaactgttccagatcggctgcatcgggctgatgaaggctatcgacaaatttgacgtatcgctgcagcttgccttttccacctacgcggtaccgatgattaccggggagatcaggcgttttctgagggatgacggtatggtaaaagtcagcagaaccttaaaggagaacggctataaaatccgcagagcgggagaaatgcttaccagggaactggggagagagccgacgatggaggaactggcggaagccgccgggctggagcgcgaggagatcgtgatggcgcttgaggcaaaccgggaggtggcgtccatctaccagccggtctatgagcgcgacggggaggagctgctgctgatcgatcagatggagggaagcggagggcagagcgcggagcgggaggagccggagaaggaggcggtcctaaaccacattctggtggaacagctgttggagaccgtcggcgagcgtgagcgccgtctgctgcaactcagatactacgagggaaagacacagtgcgaggtggcagaactgctgtcgatgagtcaggtgcaggtaagccgcctggaaaaaaagctgctgctgcagctgcgtgagcgcgtccgcatgtgacagaaaagagagttggattcgtccaattttcaaaaaatgttaaaaattggacgagtttttattacaaatattgcgacagggcgaaaaaaatgatactttagagtaaaagaatggtgtcaaggtgtacggaggaatgacaaatggacaaaagaacgttatctgatatggcgcgctgcaaccggacggctatgatctgccatctggtggaggcgtcgatgattacaattacgtttatcgcacagcttctggtgggcagcaggggactgctgtactctctgctggttgttgtgctggcgatgggaccgcctctgatggagctttttttctggagcagggacaaggaaagcccggcgatcaagcacctggtggcgcagggattcgctgtgatgtacacggtcattttgtttacgacgacaaacaacatgctgtttttgtatgtatttccgatgattgttgtgatttccgtatacaatgacaaggcgtatgccctcaaggtcaatatcggggttgtgatagagaaccttctggttgtgattcttggagcgacaaccggcagattcggtttccgtgatatgagttccggcgtgatccagattctggcggtacttttgttctgcgcgtattcctatatcgcagcggcgacttccgagacgaacagcagggagaagctgcagcaggtaaaggatgcgcagggcgagaccgaaaaggttctcggggatgtctcccggaatgcggatgtgatgagacgcggaatcaatgagatccatgcaaaagtggagcagctgcagtcggcatcggagacgaccaaggacgcgatgggacaggtaaccatcggcgcgacggacacggcggaggcagtgcagagacagctggcacagacggagacaatcggagagaaagtagggcttgtcagcacagttgcatcggatattaccgagcgcatggagaagacgctttctgtgctggaaaaaggaaaagcggatatggataccctggtgggagaggttgaagtatctgtgcgaaacagcgccaatgcagcggataagctcgagacgctgaatcagtatatcagtgagatgaatacgattgtagaacttatcaacggtgtgacgtcccagaccagcctgctggcgttaaatgcaagtattgaggcggcacgcgcaggagaggcaggaaaagggtttgcggtcgtggcatccgagatctcggagcttgcaactcagaccaagagtgcaacgaccaacatcacacagctgatcggcaatgtgtctggttccatcacggaggttgtgacagtcatccgtgagatgattgacggaatcaatgaggaaaaggaaatgtccgaaaatgcatcgcaaagctttggtacgattgaggaacatacctatgcgatccgcgataatgtgacgagactgacggagagcgtttcacagcttgaggcggcaaatcaggagattgcagattccgtgcagacgatctcggcagtgtcggaggaggtatcggcacacgcgaatgagacgcttgcggcagaggaagagaatatgcagcatcttttaacgatcgccggacgctcacaggagctgatcgcgctgacacagacggaagagcagcagtaacacacggagacggattctggtttgatacggggaggaaatgagtatgaaactgacagtcaatgcggcagggtttcacaacagcgtccagatggggacaaaggacggacagagtgcacggacggtaaaaaatgcggtgttcggcggcgcgacaaagctcggggaagatccggtggcaaagcgcagagaggaagcgaggaagcaggcgtggaaggttgtggaaaatgcgtggaaaaatgaccggtcggtggatgataccatacagagccaccgggacagctacgcggagctggagaaccgcaaaaagggagcactggctgcgatcgatgagacgaatcagcaaaaggaagcattgcgggagcagtgcggcgtggatgcggattcccaggaacagcaggatctgctccttctggaaaaagaacaggattataagaacggcgttctggatgaagggctgacggacgaagaatatgacagactggcggagatccacaaaaagccgctgaccgggtatcagaagcaggcgatggaactgaacaattatgcggcgggtcacaagagggagatccggagagccgactacggcatgactgcggagaaacagaacgtctcccgtatcaagctggagcgcttgaagacgcatgcgatggttgacgcacagggagctgcggatgacatcatggatgcggcaaacgacgagattatcggaatgcttgtgcaggaggtaaaagaccagcaggatgagaagatggacgaggcgaaggaaaaagccgacgaagccatgaaggagaaggaaaagcgcgaggaaaagctggatgagatgaagctggagcgcgcgattgagcgcgcgatgatcgagggcaccgatgaggcagtggaagaggcggagcgcatcaagcgccagaatgacagcccggacattcagatgacggacatggtggatctggcggacagcgcagatctgaagaagagtgtggatcagaacctgggcgacatcaagagcagcatgaaagtgcttgaagcggatctgaagggaatcaaggtggatgagaaggcgtaagatagcatgaaccggcagaaaatgcgtgccggcaggggataacaggcaattctgaatattggtcataccagattttgttaataattataaaaatacttgtaattttctaaaaaaagtattaaaattcatttgtggactggtcataccagatacctggcatgacggttcgagggagtatcatatttttaataagacaaaggaggaaaaagttatgttattccagattaacagcatgtggcagctcctgggatgggttctcgtatttgcaggacttgtaatcttaaatgagattgagcgccgcacaaaacttggcggttatggtattttcgtaggagttcttgcaattcttactgtatactttatcgctattcagatcagcgccgcaaacggtggctggggtgcaaccaatgatacctatgtatatatgggtggctggttccattatgcaaagttatatgcagcagcatttggatgcatcggtttcatgttcttaaagtacaagcagtggatcggtaagaccgattggttcaaggtttggccgtttgtaatcgttgcaatcaacatcatgatcgcagttgcttctgattttgagtccgcaatcaaaggcgcacaggcagtcaatggctggtggtattccatcgaggatgtatggctgaacggtggctggtggaactgggtcaatggtatcgcaggtatcctcaacatcttctgtatgacaggctggtggggaatttatgcatccaaggacaagaatcatcaggatatgttatggccggatatgacggtatggtttatcgtggcatatgatctttggaactttacctatacatacaataacctgccgacgcattcctggtattgcggtctggctctgcttcttgcgccgacattcgcaaatgcactttggaacaagggcggctggattcagaaccgtgccaatacgctggcaacctggtgtatgttcgcacaggtggttccgatgttccagatcaagggacgtttctctgtacttccggtactctactctaacgtagagggctttgagtctctggatgcgttctccttaacgacaatggatctgaccagcgtagcaccgaacaccaaggtacagggattcatggcaatcattgcattggttgcaaatgtcatctgcttaagcgtaatcatcaagcgcgcaatcgagcagaagaagaatccttacaagaacgagatctttgcagataccaaggatttcaaggttgcaatcgcacgtgctgagaaataaaacacagatcagaaatgaaaactccgtcccggaagggcggagtttgctaagaacataaaataaagtgtgtaagttgttggtgttaacaaaacttacacactttatttttttgactgagaaatatatgtttggcagtctgtttatttccagattagaggacagataaaaattaggatcaggaggtcagtatgtcaataaaattatgaaaatctgatgcgtggataagcttttctacggtagtgctgttctcaaaatgctccagtaaattagaatagacatatttaaaatccatacgctgctgatggttgacgccgatcatcataataatttgaacatcaaaggttccccagcgaagaggtttttcgttaacgattacaaatccaatatttttttgggtagagcagacgatggaatgtgggattgccactttgttgtcaaaactggtgggggtaacagcctcccgttccagaacagagtcagtaaaagcttccggagcaatacccagagcaaccagtttttctgccatatagcgtatcatatcttccacagaattttcgtaatgatttttttcaaataattgcggatccataaaactaattagtttatcgtggaatattctgcgttttttttcagccagaagttcgttacaggcagattgtatttttttaaaatcatgctctgtaataattgtatttgtttgtatgactctgagattggcctgtggcagaacctgattcgtggcatcgataatcaaatcgtagtaagcaggattaacgtcatccagagtgttagtaacctccgcaattttgcattttccggataatttttgagtaatggattccagagaatgcttattgtaatagttataataattatttactaccagaactgcctttatttcaggatgttcatccattttttttccaagaacagcacctacatgaagagatataaaagtaatttcatctttatttaactcataaccaaaagtagttttaatttcttgtgcaataaaaacggcaatttcgtaaattaacggattctgaataaaaatctcatctgacaagggagtccggatggaaacattgtgcctgcatcgaaatagtgcattggagagatggacagtgaaaaaattaataaaatctgtgtcatataaatcaatatagtaaatggtttttacctgttttataatttcattgacaaactgaataagtgcgctgtccacaatccggggcaggtcaatgacattattgatgttgattgcacttgtttttgtcatgataatgaatgccagctgctgcagttcattttcgttaaactgtatggggcataagtgcgagatctggtcaaagatccggctggcggcacgatattcggcagtgtgaattgtcacgctgtcgtaaagtggcttttccaatagacattccctgattttgatgcgggtcatattgataatgacatgaataataatgcttttgaaagcgtaatcggaggcataaaggttttcggcctgcaaggcctcgtggacaattgcccgcaaagaatctggagaaatattcaaaagcttacagaatgactctaaagtcagatctatggtagaatccagattcgaggtaagataatgggaaaagagagctcgtttatgatgttcttcaccgacaatatcgattgttccgttttggcggtgaatactcagattgaaaagggcgagtttcttttttacccggatcatatctttttcaatggtggaatagctgatgtaaatagagtcagccagatcgtataaatcaaggccggatttggccagtattagcttttcaataatgtaattaatacgctcctccggagtggcgaatgcaaataaagcctgcgatttgttatcaggactgtcaggctcatcgttctttattccgatccagagatagccgttttcatttgcggtaatttgttcaccggcgtttctgagttccttgatatagttacggacggaacggtcggaaacagaaagcaaagagctcaattgccgtgacgaaagcggtgtatctgattgttttaaaactgtaagcagcttttgaaggttattcattattataatctgcctttctgtgaaaggtgccaatatattataaaaccagcagttttttgtattttataaatttaatcttatttattataatataagagattatctatatcaatccattcctttcctagtgggtaggaagctcggaggatagatataagtttgaaaataatggataatgaattcatcaaaaatataacagaggaaggggataatgtaatgaggattttatttatttgtggaaacggcgtatccagcggaatgattgcatcgcggacaggaaaagcaggaaaagcccaggggtatgatgtagacacagaagcctacagttatacagaactgtcggaggtcattgatgactttgatgtggtactggcagcgcctcagatgaaatgtaatgaggagatgattcgtgaaacctgtgaggaacatgggaaaaaatatgcgatcattgacaattatgcatttgccacactggatggaacaaaatgtttcgagcttgcgaaaaatctgatttgagaaggaggagtacagatgaaattttatacgaaattacaggattggctggcaggtccattttcacagaaaatgcagaagtttatgcagaacccgtatatgcatgcgcttcaggtgtgttttacgataattctgcctatgattatggttggttcattggcaagtctggttaatacgtttcggaactttgctccatggcttccggatctgagcctgatcaattctttttcctttgggctgatttccatttttatggcgtttttgattccttacacgattatggaaagcaagaagctccagaagcaaaaaatgataacgggatttgcgtctgtatctgcattgattgcactggcaaatcctcagtatgtggatggaaatctcgtaataaactccggctatgttgggacgggaggcatgacagtagcaatggtcatggggctggtgattggctggctgttttctgcttactttaaacatggtctgtttaagaagaacagttctcttccgtcggtagtggttgtatggtttgagtctatcctgatcatttttgttttgattttagtatgtatcatcattggacagaacgtggatttattttcactgttggaaaaagtgttcagtccgcttgcggcaatcggaaatacttatctgggattcctgcttttctatatgattatggcattgtgttattgctgtggactctcggcgtggacggtttggcccatcgtatgtgcgttgtatctgactaatattgcagcaaatgcggctgctgtggcagcaggccaggctccgatctatattgctaccgatgaattggttttcatgggctggtgttgtctgggaggattgggatgtacacttccactgaacattttgatgatccgttccaggtcaaagaaaattagtaccattggaaaagcggcgattgcttcttctatttttaatatcaacgagccggttatgtatggtctgccggttgttttaaatccggttatgatgcttggatatatgacagtatcctttgttgttcctacgattacctatattgtatttaaactgggactggtgtctattccggcagttgccatgatgatgaacttcctgccacagcctatttccacctttatggtaaacagcgattttcgtggtattattctttgggcggttttatttgtactgacttatttgatatatcttccgtttttcaaagtttatgaaaaacaggaactggagagtgaacaggaagtaaatgctttaagaaaagaggagaaaaatggataacgaaaaattagttcaggtagcgatgaatgtcattatgcatgcgggagatgcccgggattatattcggaaagcaggaaccaaattatcggctctggatttggacggagtggaggagcttctaaagaaagcttctgcggaattggtagaggcgcataaggcgcagacctctgtcctccagaatgaagcagagggagacagcgttcctatgacggtgttattttcccatgcacaggatacactgatgacggttgaaagcgaacagtatatgatttctattctgtatcagtgcctgaaaaatatgaaaaagggggaaaagtaacatgggagagaaaagtttcaaaaagggtttcctttggggaggagcgacggcagccaatcagatcgagggcgcctataatgaaggcggcagagggcttgcaaataccgatttcctgaaatatgtagcaccaaatgagcggcgggcggatgaggctaccttcgagcagacctacgcatccctgcaagaggcaaaagcgcatgaagatacctatatatttccgaaaagatggggaaatgatttttaccatcattataaagaagatattgcattgatggcggaaatgggattttcagtgtttcgtatgtccatatcgtggtcacggattttcccaacgggatttgaagaaaaacctaacgaagagggactggcattctatgacaaggtttttgatgagtgtcacaaatatggtattgagccgttggtcactatgttacattacgatttcccactgccagtctgcgaaaagctgaatggctttgagtcaagagaaacgattacattgtttgaaaaatatgtccggactatcgtagaaagatatcataaaaaagtaaaatactggttgacgtttaatgaaatcaatatgagtcttcagagtctttctacctgctcgggagctatgcgtgatcattcgttaaagggattagacgaagaacagcttacgtttgaggttgtacataatatgcttctggccagtgcgaaagcagtgattcttgtacatgagattgcgcctgaagctcttgcgggaaatatggtatggaagcatgtgtactatccgaaaactgtgagaccggaagatactctgcagcagatatttgatatgaacctcaactattatttctatgatattcaatgcaagggtgtggttccgtattatctggaccggtatttcgagcagaaaaacataaaaagaaactactcgccggaagatattgaaacattgaagaaaggaaaagcggatttcctgtcatttagttattatatgtccaatatttctgagtatcagggcgaacctatgaagtttacggggctgcttcctgatcagagccggaataatccttatctgaagatgacagactggggctggtctattgatccggttggattgcgaatagcattaaatcagctttatacccgctatggacttccgatatttatagctgagtttgggatcggtatgtatgaaagtatggacagcaatcatcagattcacgatcagggacgtatcgaatttgtagaggcgcatttaaagcagataaaagaagccataaaggatggtgtggatgtatttggtgttacttattggggatggattgatctcgtaagttccacaacttctgagatgacaaaacgatatggatttgtatatgtagatgcggacgactatggaaaaggtacttataatcgttacaagaaggatagcttctattggtataagcatgtgattgaaacaaatggaagtgagatttaaaataatttacgaatacgaaaaaaacgcttaggattcacagcctaagcgtttttttcgtaataaagataaatatagaaaaatgatatacagtcccgctttcaaaagaataaaaaaatgtaagatctaacaaagatttccaataccataattattgataaaatttttcaacaatgttattgacaactaactaacgttagattatactaaccaatgcaatagaagtgaaaatgattatcaacaacaagaacgaaggaagaggatgaaatgatgccgttatctatggtaaaagagggagagccgaatatcatcaaaaaagtcggcggtaaggaagaaaccagaaagtttttggagaatctcgggttcgtgaccggtggtacggtgacagtcatttcccagacaggcggcaacatgatcgtcaatgtcaaggattccagagttgccattggaaaagatatggcgaacaagattatggtatagacataggcaatgctatgatgaactatacagagaaggagcagagtatgaagacattaaaggaagttgcctgcgggcagactgtcaaggtgaagaagctgacaggagagggtccggtcaagagacgtatcatggatatgggtatcaccaagggtgtggatatctatgtaagaaaggttgcaccgcttggagatccggtagaggtcacggtcagaggatatgagttgtccctgcgtaaggctgatgcggaaatgatcgaagtcgagtaattttttttgataataggttagcacggactaatcaaaatcggagaaaatgataaaagaaagataacgcagacaaatcgctgcgggaaaagaggagcagaaaatggcagttaaaattgcattagcaggtaacccaaactgcggtaagacaacactgtttaacgcgcttacgggttccaaccagttcgtaggtaactggccgggtgttacagtcgagaagaaggaaggtaaactgaagggacataaggatgtcaccatcatggacctgccgggtatctattccttatctccgtatacactggaggaagtggtagcaagaaattacctgatcggtgagcgcccggatgcgatcatcaatatcgtggatggcacgaacatcgagcgtaacctttacctctccacacagatcatggagcttggtattccggttatcatggcagtcaacatggttgatatcttagagaagaccggtgagaaggtacatatcgacaagctcagccagaagctcggatgcgaggttgttgagatctccgcattgaagggaaccggcatcacgaaggccgcagaaaaggcagtggcacttgcacagcagaagggtgtggtaactccggtacatgaattctcgaaagaagttgaagatgtgatccatgaagtggaagcaaagcttggatcaagtgtagatgaggcgcagaagagattcttcgctatcaagctcttagagcgcgatgacaagatcggcgagcagatgaagagcattccggatgtgtcttacgagatcaagaagctggaggatgcatttgatgatgataccgagagtatcattaccaatgagcgttatgtatatatttcttccatcatcggcgagtgcgtgacaaagccgaagaacagccagaagctgtccacatcggataagatcgaccgtgtagtaaccaatcgctgggctgcaatcccgatcttcgccgtagtcatgttcttagtttactatgtatctgttactacagtcggagccatcctgacagactggaccaacgataccctgttcggcgagtggatcattccgggcgcacagtcactgcttgagaatgcaggttgtgcagcatggctgacaggtcttatcgtagacggtattatctccggtgtcggcgccgtacttggtttcgtaccgcagatgcttgtgcttttcttattcctggcattcttagagtcctgcggatatatggcacgtgttgcatttatcatggaccgtatcttccgtaagttcggtctctccggtaaatctttcatcccgatgttaatcggtagcggatgtggcgtaccgggtgtcatggcttccagaacgattgagaatgaccgtgaccgtaagatgacagttatgacaaccacctttattccgtgtggtgcaaagcttccgattattgcattgattgcaggtgcattcttcgacaatgcaggatgggttgcatggagcgcatattttgtaggagttgcagcaatcgtatgctccggtattatcttaaagaagacaaagatgtttgcaggagatccggcaccgttcgttatggagcttccggcataccactggccgaccgtcggcaacgttctccgcagcatgtgggagcgtggatggtccttcatcaagaaggcgggtaccatcatcacattatcgaccatcatcctgtggttcttaatgaacttcggatgggcagacggatccttcggaatgcttgatttcggcgatctggaaggtgcagcacttgaggcggcacaggctgagtgcattcttgcaaagatcggttccgcaatcgcatggatcttcacaccgcttggatggacacagggcggcaacggctggaagatggcagttgcagcagtcagcggtctgatcgcaaaagaaaacgtcgttgcaacattcggtatgctgttcggtttcgcggaagtggcagaagatggtgcagagttctggggtaacctggcaagcgttatgacaccaatcgcagcatacggctatctggtatttaacctcttatgcgcaccgtgcttcgcagctatgggagcaatcaagagagagatgaacaatacaaagtggttctggtttgcaatcggatatcagtgtggtctggcttacattgtttccatgtgcatctaccagattggtacactgatcacaaccggacattttggattcggtacagtcgtagcattcctttgtgtgatcggattcatttatctgctgttccgtccgtacaaggagagcgagactttgaacgtaaacgtaaagagtgctgtaaaggcaaagtaattcggcagaaagcgggggatcgatatgggaacatttgttgtaggagcaattttggtaatcgttgtgtgcctgatcgtgcgcagcatgattcatgacaaaaagaacggaaaatccctgcagtgcggcggcgattgtaaaaactgcggaggacattgttcttaagtggaacaggacagaagatatctgagaacccagatgcagaaggaaaatatcatacagaagttaaaagagcgcggctgccgcattaccaaacagcgcctgatgcttctggatattatactggaggaggattgctcctgctgtaaggaaatctactacaaggcatccagattggatgacaagatcggtacggcgaccgtctaccgcatggtgaatacgctggaggagatcggagccatcagcagaaagaatatgtaccgcattacctgcgatcaggactgcgagatggaaaatgcatgtacgatcgaatttgacgacaacacgattgtggagctctccagcagcaagtggaatcagatcatccagtcaggacttctggcatgtggctatctgaatggacatcatgtgagaagtatcatggcgaagtcatatgaatagtacaaaatagtaacaggaagttccggagcacattagttaggatgtacgccgggactttttgttatatgggaaaagacatcaattttgctttcgcatactttaaccgttcgcaaaagaaaaatgggcatgatagatcataatgtgataatatgatataaatatagtagaaaacagaattttatagcaaaagcagaagaaaggatgaatctacaaatggaagcaggaattacaggaacacagaccattacagtaacagaagataagacagcgcaggcgatgggaagcggtacgcttccggtatttgcgacaccggcaatgattgccctgatggagaatacggcatacaaaagtgtggcggatgaactggaagagggagcaggaacggtcggtacgctgatgaatgtaaaacatgtggcagccacaccggtcggcatggaggtgacctgcgagacaaagctgattgaggtggacagaaagcgccttgtatttgaggtaaaggcatacgatgcagccggcgtaatcggcgagggaacgcacgagagatttatcatcgacaatgagcgttttctggcgaaggcagaagctaagaagaattagtaaatgagaatagttttcaataagcggtattgctatagaagacggattgtgctatagtaaatgcagttagataaaactaactagccaaccacatacaaagcatacacattgctaaggaggctgtctggcagacgaatcgaggtcgtttgccgacagccttcttttatttgatctttttccagaagttgtaaaaatgatgcttgacaaagtgtatggcagagcatattataaacatataaacagttgttcatatgtttgaaggaaagagggtgagaagttgtctgaagcagaactggaatgttgcgagagtgtggagattcatcaggatcgtctgaagattgtgagcgatcagatgccggaggaagaggaattatatgatctggcggaactgttcaaggtttttggggattctacaagaataagaattctgttcgtgctgtttgaagcggaggtgtgtgtgtgcgatttggcagaagcattgcacatgacgcagccggccatctcacatcagcttaagattttaaagcaggcgaagctggtgcgcagcagaagagaaggaaagtccgtgttttattcactggcggacgggcatgtgaggacgatcatcgcccagggcagagagcatatcgaggagtagcagacggtatgtactgttagaaacgggatatgtacaacgaaaaatatattgtataagaaagaaaaagaaaggaaggataagacgatgaagaaaaaattcaaattagaggatctggattgtgcaaactgcgcggcaaaaatggaagaggcgatcaagaagattccgggcgtcaatgatgcaaatgtcagcttcatgacacagaagatgacggtagatgcagaggatgacaagttcgacgacatcatgaaagaagtcgtttctgtctgcgcaaaggtagagccggactgcaagatcttaatgtaataacatgggcgtgtgcccggcagaaaacgaaagacaattccatgaaagcctgtgtgccggagggtgcgcaggcttagaaaaagagatacatatgaacgaatgtttatgcgtttatgaaaatgaaaagcgaggtgtgtggtatgacgaagaaacagaaacggatgctggttcggatcatcatatcctttgtcctgttcgcagccctgatggtggcggagcatacgggggcattggaaggaatcaatacatggatattatttgtcatctatctggtgccttacctggtcatcggatatgacattgtatataaagcggtgagaaatatcagccacggacaggtgtttgatgaaaacttcctgatgatggtggcgacgtttggcgcatttggcgtgaaggaatactcggaagcggttgccgttatgctgttttaccaggttggtgagctgttccagggctatgcggtcggcaagtccagacagtcgatctcggcgatgatggatatctgcccggagtatgccaatatcgaggtggacggaaaactgacgcaggtcgatccggatgatgtggaagtcggcagcgtgatcgtggtaaaaccgggcgagcgtattccgctggacggcattgtgctggaaggggagtccttcattgatacagcggcgctgaccggagaatcggttccgcgcaaggctgcagccggagatgagatcatcagcggctgtgtcaacggaagcggtacgctgaaagtacagacgaccaaggagttcgatgactccaccgttgcaaagattctggaacttgtggaaaacgcgagcagcaaaaaagcgcgcgtggaaaactttatcacgcgttttgcaaaatactatacgccggttgtcacaatcggtgcggtaattctggcaattctgccgccgctcattctcggcggaggatggagcgactggattcagagagcctgcattttccttgttatctcctgcccgtgtgcgcttgtgatctctgtgccgctgggattctttggcggaatcggcgcggcgtcgaaggtgggcgtacttgtaaaaggaagcaattatcttgaagctgtagctgagatgacaacgattgtctttgacaagacgggtacgctgacgaagggcgaattcaaggtttctgagattctgccggctgagggaagtaaagaggaacttttagagattgcggcgctcggcgaggggtactcgaatcatccgattgcggcatccatccgggaagcctatggaaaagaacttgacatgaaccgtatcacagacgccgaggaagtggctggacacggaatcagtgtcagaatcgacggaagaaatgtgctcatcggcaatgagaagctgatgaaagaaaaagcaattttctatgagctgtgcaagagcatcggaaccgtagtctatgtggcaagagaaggaaaattcctcggaagcattgtgattgccgatacggtaaagaacggagcaaaagaggcgatcgcctccatgaagaaggtgggcgtgaagaagtgtgttatgctgaccggcgatagaaaagaagcggcagagggaatcgcggcagagctcggcatcgacgaggtgcatgcagaactgctcccgcaggacaaagtgtcgcaggtggagcgcctgttaaaagaagagaacgggaaagagaagctggcatttgtcggcgacggtatcaacgatgcgccggtgctcaccagagcggacatcggtattgcgatgggaagcatgggatctgacgcggcgattgaggcggcagatgtggtcctgatggatgacgacatcagaaagattgcgtcgatcgtgcggatttccagaaagacactcggcattgtaaagcagaacatcgtctttgcactggcggtcaaagcgatcgtgctggttctcggtgcgtttggtgtggcgaacatgtgggaagcagtgtttgcagatgtcggagtatctgtcattgcgatcttaaattccatgcgcgcactaaagacggagtagaaataaaaattatagaacctatgaacgaaaaagagggactgtcgcttgaagcggatggtcccttttgtcgtgagaagtaatatataagaaagacatcctcttcgatttctgatggaatgcatctggaaattcggttcaaaaaatgtggaatttctaaccagccgaatgtttgcatcttcgatgatccgtgtctttccaagtttggagcactccgcgggtcatgtccgcatcccggagacaatttgtaggacttttgtgcgtgtcccttatggcacacctctgaacaaaacataaccgcgcgaagccgctgtctgaggcggtatctgccctattttcaatagcagatgccggcgagttcggttcgcgcggttttatattgtctgtgaaga

SEQ ID NO: 11502 - DNA, 31470 bp, Unknown
  gut microbiota DNA sequence
tgacccgcggagtgctccaaacttggaaagacacggatcatcgaagatgcaaacattcggctggttagaaatgccacattttttgaaccgaatttccatctgcattttcatctgaaatcccacggtgtggttttctgataatattacttaccaatccaaagaacgatattcttattgcggcaattcctttttgtctcctttattattccagcagccccagaaagatttctctccgctccacttcttccgcttcctcatttccgtccgccctggcgtgcagcagcggatattttgaccccgtgcgcagcatctccatcaccgacgcatagttggcatattccggcgacaccagaatcattccttttccacgcgacagttcctgctccatcaggctgcacagatagcggaggtttgctccgtgaaccagcggaaacttttcccggatctcctgtaagcgttcgtccggctgcttccagctgccgtagacgccgcggtaaatctgcataaattcatgcagctgttctgtaaaatgctccggaatctttcgccccgactccgcagcaaggaaccacagatattccgaaagcggcatatacaccggaacaaaagcatgtttcctcaccgcttcctccatattctgattcagataagcgctatgcagcacaatcggatcgccggccagcagcagctgtctgtcctccgtcacatataccgcccactcctgtaaaaggcttttggtccactccctgctccaggcatccggcgcggcggtcttctcccggaaagaggcacgcaccttttcccgccactcctcatccaggcagtgccatgcatccccgagtaagagcacctgccacaagatatccgcttcttccgcaaaaagcagctgttccagaaacggtgtcacaagatgcgccctctttccgtccgcatctaagaccgcacgcaggatttccggaaccattccgtccgcctccgcaccctcggtctggaataccaaaaactgtttttcctccccgtccgtttcctgcagccggtttgcaagctgtcctgccgcagccgagaatgtacagtattcttttgcggtgctgtacgcttttcccgcatgaagatcctgcgccgtgtaatccggcagcactgccgtgcgttttcctttctggttcaggtaaagtgccatccactctgtatacacggacagcggcggcagatacaccgtctcctgctgcggttctttcatatctttcatatctttcgtatctttcgtgtctttcgtgtctttcttcccgtcccgaagctgcccggacaatacggctgcctccggcagtatggcgcgctccgtgcagttctctacatgggataagctgtttaaaaacgcctctattctcgttatcactcccaccttggactgatgctcgtccacctctattttcaggtacggcttgtcccccataatttccgcaaaaaggtgggagatcatgccgtccggtccgcagccgtggttcgtcagatagacggcatacagattcggatgctccttaatgatcttcgctcccgacagaatgtgctgcgcaaatggccagtacaaatttggataatgaccggacaaatccacatcatgtcctttcagatgggaaagtgtcaacactctgcaccctctctttaacagttcctcgggaattcccatatttaaaaccgggtctgacacgccgtagtttcttgtaatcagaacgagcaccttgtcctccggtttcaactcgtccaggatctgcgcgcccagtttttcagaattcttctcacagcgcaccatcgccgccgcgcccttcgcgagcgccgccgcacaccgtgccttgtcgcatcccagttcctgacccgctttgatcatcgctcccgcaagctgcggttttcccatatccagatccagaaccgggcagatcagctccacgccgcgttccgaaagccccagcacacttgcgacaatccgcggcgctgtctgcatatagacacagccgtaattgtgcgcaacgccggaagtctcatgccggatcgtatggatacacgggataaaaatgtagtccaccttttttctcgcaagccattccatgtgcccgtgcagtaattttaccggataacaggtctcctccgccgccatctcctgtccgagcgcaatgatcttatcgtccgtctccggcgacagcaatacattaaagccgagagtcttaaaatactggtacgccatcgggaaaaatttgtaaatcatgagcgcacgcgggattcccacagtctttttccccggcagcagcgttccgtcatagcctgccagaaaccatttctggctcttccggtaattctcctcattccagatgctctccttttgggatgtgccaccctgctcttttgccgcgagcgccgctccgtatgccccggtcacatcgtaaaacggcgtgatgtgaagccgttctccaaacacttcatagaaagccgcaacgattccctcgttatgcacgactccgccctgaaggcagatatgttctcccttgcgcttattgccgactaccctgtttaaatagtttctgacaatcgagcggcatagccctgcacagatatcctccttgtccgtgcctgccgcaagctccgctgcaatcttggattccatcaacacggtgcagcgctctcccagatcgatcggcacatttgctttcaaggcactgtttccgatctcctccagcgatacttccatgcggttcgcctgttcctcgacgaaggagcccgtacccgccgcacacactttgttcatctcgaaatcgacgacctggccgtcccggatactgatgtatttggagtcctgaccgccgatctcaaacacagtatccacctccgggcacagatgggcagccgcgcgcgcctgcgccgtgatctcatccaacaccgtgcctgcaccggtcttctccgcgataaagtaacgccccgatcccgtgacgccaatgccttcccacgtgagtgcttccccgtatttctgctttaactgtgccattccctgctgcaccgcgccgagaggattgccgcgcgttctaagatacagatcgtcaatgacggctccgtcctcccccgtcagcacaaggtttgtgctcgtggatcccacgtcaatcccgagccagagcttttccccgccacgtaacggtctggtccggtgaagtgcctccttctcgtagtcatatcgcggcagcgcctttcttttttgctcctcatccgccacctccctgcggaccgggtgtttccagtcgaaggacagcttcccgcggcatgcacaggctgcgattccggcagcagacaccacagctccctcttccccgcagagcagttcttcctcttttaatccgaaaatatcgcagatggcgaggcgcacgccttcattatagacaacgcctcccgtcacaagcaccggcggctgcaccggaagtttccgcacgaccgcagatttaaaattgcggatcacggcataggaaagtccgagcagaatatcttccaccggcacaccttcctgctgtctgtggatcaggtctgtcttggcgaacacgctgcaccgtcccgcaagccgcggcacacttttcgcccgtctgacatactccgagtaggcggacagcggaagtccgagccggtacatctgatcctcgaaaaatgctcccgttccggcggcacattccccgttcatggcgtaggagagcgtctctccctcacggattccggtaaggaagcaggaattctgtgctcccatctctacgatacttcccgcgtccggatagagcattctctgtccttccagaaggctgctgatgcggttgatctgcgcttccttttgaatccccggatacaaacagactgcaccgggattgaccgctgcatacaaaatcctgtcgccgtacgatgtctccacctgcccaagcatgtccacaagattctgatacagttctccgcgatgcagtctgtaatctttgtatatgatgttttcgccttcaacaacagcgatggaaatacttccatttccgatgtcgattccaagtcctgcttctctcattgctttcctccgaaattgcttcttacgcatagttagaatattctaactaaatgtatcacattgcaagagccgtttcggttgcaaaagcaacggaatcagttttctatcagagaaagattctcaaatagttcgatcagtctaacttcaatcctgccagaagcgagccaaggctggttcctgtggatgtgtggtctgtgtatgcctccagatcttccacgccttcggtatctaccatctcctctgccagcgccttcatggacaggctgatcttattgtcgttggtattcaatacctttgccttgaccttctctccgaccttaagcacttccgacggctttccgattctgcgctcacagatctgtgagatgtgcaccagtccgctcagtccgttgcccagatcaataaatgcgccgtacggcatcaggctctcgacagttccctcaagcacggttcccggcacgatcatagagatcttgtgattgcgctcctccgcctctgcctcgagtgcgaccgcctttccggaaagcacgagcttttcgcgctcctcatccaccgtgatgacccggaccggaatctcttttcctacccagctctccgtatcctccacataagcggatgtgatctgggatgccggaatgaacgcgcggatcccctcaagatatgccacaacgcctgccttcacgctctccttgatgcggacggttaccgttgtaccctcctccatcatctctttgagcttctcccatgcctgctcttcattggcttccctgcgggagagaagaatgttgcctgcgccgtcgtctacccggatcacggtcgcctcgatcgtatcccccacacgcacagcctccgccagtgagaaatccggatcgctgctcatctcctccgcactgataaatcccggtgcataatatttcaggtcaagcgtaacgccctcctcgttgacatcgatcaccgtgccggttaaaatatctccctctctgattctgcggaaagaagcttctaactcctccttgtaatcatccattgattccatgtgtcttaaacctccatctctttttctacctgtagtgtaccacatttcagtctgattacaaccttgaataagtcaccgtccacctcgatcgtcagttttccgccctgcgcctcggtaaaacttctggcgatggcaagccccaatcccgagccctccgtaccgcgtgaggtatcgccgcgcacgaagcgctccgtgatctcctccggatcaaaattcagttccgtcgccgacatatttttgatcgtgatctccacgaactcctccggtgcctccccggatgtgtgcacctgcacgtacacgcggctctgcggcatcgcatatttctggatattgacaaacagattttcaaagatgcggaatgtcttctgattgtcgagcaccacgatcactttttcctccggcacatcccagcgcagcgcaagtcccatcgccgcaaagcgctccgtatgctccaccgcaacctgctttaacagattcaccacatcgacttccatcggatgcagcacaatattgttgctggtcgccttgctgacctcaaaaagatcctcgatcaatatttttaaccgctggctctttttatcgagcgtctcaatgtatgacctgcgctcctcctccgtgatgtcctccttctttaacagttccacgtaggttgtgatcgccgtgagcggtgtttttaaatcatgggaaacgttcgtgatgagatccgttttcattcgctggctcttcacttcctcatccaccgccttcttaaatccgtcgcgcaccctggaaagctccaccttcatcggctcatatattcccagatcctcggtgatctccgtgtccagatctccgtccgccatccggcttacactgcgcagcagcgcctgataatctctgccgatcctgtcataatattttttgataaaacagaacacaaagatggagtacacgatcagcgcgccgatgccgaaaaaccacatcatcgagcagagcgacagcaccgcaaagttgatcagcacgattttccagatcgtctttgtggatttttctgaaaaatccacatgcgccacctcatagcggaacgtgttccacaattttttcaaccacggaaaaatctgataaatcaggctgtactgtctgatatattccctgactcccaggaaaaataccggacgcagtatgcgaagcgccgcgtaccagatgccatacaaaaacaggagcggaaccatcatctgtccaagctgtaagatggctctccaggcattgtttccaagtaaaacatccactccttcgttgtaataggaatagcttcttatgatatcgtagaagttttcctccatacatgccatgcagcagacggcaatcaccgccacctccatgagataccattttcccgggcgctgcattggtatgtcttccttccagatgcgtctgctcgtcataagaaacatccatcccgccaccgcagcaaggcttaccagaaacagaatgcttccgccggacgcacggtacactaacaccacctgcacccagtaatttgtcatatcctcatacggatctcccaaggaaatcgtatcactcgttgataccggaagcccgaagatcaccttaaagtccttcggtccctgcagctgccctgcttccacatatccgcccagcgactgtcccaaaagattttcccggtctacattctgaaacgccttgatcagaacgctgccgctgatattttcgtcgtacagcggtgtcacttccagcgcgcccttttcgtcaaaggataaacatacgatgtccgtataatactgctgcagctcatccgtcacagttccatccacgcatgtctcgagcggctgatccgtatttttcacgcagtcagcactgcttttgtatacacagtaatcgatgttccagctgtcactctcaaactggcttttccattcgtcaaacgtagaggttaccgtgtcctttacatactggtaatcttcatcatccgtcggcagattcaaaaacagtccgcctgcatctgcctgcccgctccgctccatctgctctacatacaggacatagctgccctgatagagtgtctgtaccgtatcgttgtccacgctgtccgaggactcgcgcatcatctccgctttctgctgctctttctgtctctcagccgtccggtacaccaccgggaaaaaacacatggtaatgatcgtgatgaaaatgattcccgcgatcgctatgataatccgcttgctgctgtttacggcattgttgttgctgctgttgccggcaccattatttctgctggcaccactgttgctgctggcatcgttatttgcgctgacattgttattgccggcaccgttgtttctattgttgtttttcaattttatatccaacaccccacaccacctttaagtattttggatctctcggattgatctcaatcttgtcccggatatttctcacatgcaccataatcgtatcggtattgatcgccttttcattccacacgcgctcatagatctcgtccgccgaatatacacgccccggtgtccggattaagagcgcaagtatcttgaactcaatcggcgtcatcttcaccggttttccatccacaaacacctccacggtgtcctcattcagttccagtcctccgatcacatgaatccggtcgttcttttcctccttcggactcctgtttgcaaactgcgtataccggcggagctgggaattgacacgcgccatcagttccaacggtgtaaacggcttggtcacataatcatccgccccgatatttaacccgatcaccttgtcggtctcctctgacttcgccgagagcataatgaccggaaagtcatatttttcccgcagcttcatggtcattgtaacgccgtccatgcgcggcatcatgatgtcgacgatcgccagcgagatcttctcccgctccatcacctcaagtccttccacgccgtctgccgccttgaatacgttgtaattctgactctttaaaaagatttcaattccgtccctgatttctttatcatcctcaacaattaaaatgttatattgttccatttttccgctcctgctcttgttctcttttctgctatcataacacatccgccgcagaatcacacgcctccccgtgcattgattacattttacctgatctgccgcaaaattccccgcagaaatacccgaagaatttctaaagaattatttagaattattatcttgacaactgccacttcgtagtgtatagtagtacaagtgctgaggcaactcacacagatgctgctgtggctcagtcggtagagcgtcgcattggtagtgcggaggtcacgggtccgattcccgtcagcagcttcattgagaagaagcgcaaatccttgaatgaaagggtttgcgcttttttgtgctatggtgttacagtgttacggtattatgacgaatgtattgtgatggaagtctggatgaggggggaatatacggttgaggcgttaatgctatctcgtgtccaagggggaagtagaaaaacttttctcgtcctgcgggtctcagcgatactttttctattctgggacccaatttttgcttctatgcgggtctggttcgcactttttctcgtctcagacccgggttgctcttcccttctggcattatgtcaacctttttccattctttccgggtctggcacgcactttttctgctctggaacttcgcctttcccttctatcagccccggattccaatttgtttgacgattcttcacacatttttcaacactgcttcatacctttttcacatttatccggtatcttaatcattgtcaagaggaaatccccattgacacaatttctttttcataatatggccggtaagtcccccacatcttacctgcttctccttctttttataaaatgataaacgtacaaaacgcctcaccatccggtgaggcgttttgcgtattcctgttgaatacccagattctgtcaacttctcctttactacatgcgattcatcatcttaatgtgtgacttgaacagggaataatatttcattcccttgtctttgccatagtgcccctgcaatgctgcgcggagagaattgagattctttcgctttccgtttgcctgatagaggaatcccgaaaaatcttccggcggttcctttgcatattcactgtggtcaaaaaccattttgcagtacatgtcaaacttttcttttaagccataagccggaagttctgaccagtaagacgcatactctgcattcgtcttcagttcctgatacagccgcttgccttcttcctcgccgagaagcgcaaccagcgcattgtgaaaatccaccagattttccttgctgatgcaggcacacaatgtctttaaaattgctctctctgcattcagatccagtccaaacttcactggcgcttcgctctggtccgtggcatttgacacactctgtggattctctgacatttcttctttcaaatccatcatttctgtcatctgtccggattgttcctccgtcagatccggcttctcattccctgcgttctgcgtctttgctttgtcactcttctgtgacttttccgaacgatccggttctgacatacgctcagacttttctgctttgactgctttcgctgactttcttgaccgttttgccctgccagtcttctctgccggctcagccttcccggatttctctgccaacccagctttttctgccgattccgacttctcggatgtctctgcatcctcagccttcccggtcacttccggcttcccggatgtctccgcatcctcagcctttccggtcacttcagccttcccggatgtctctgcatcctcagccttcccgatcacttccggcttcccggattctcctgccaacccagctttttctgtcggttcagccttcccggatttctctgcatcctcagctttcccgatcacttctgccttcccggatgtctctgcatttccagccttcccggacgcttccggcttcccggattctcctgccttaccgccggctttcgacggttctgacttcttggatgaccgtggcttctttgactgctctctgccacgctctgcttccgcttcctgtccagtctcccgaacctgctctgcttccgcttcctgtccagtctcccgaacctgctctgcttccgcttcctgttcagtctcccgaacctgctctgcttccacttccgggccagccgctctggtctgttcctgttccggctctactgctgccccggattcctttgccacgcgctgctttttctctgtcagcattctgtggcattcctttccgcttaaacggctcacaggcattttccgtgttgaccagtagcgcaccgcagcgtcaaatcccgtatcatttgatacaataacatactccctgtccgcgttctggctcaggcgatagccaagttccgataccagctggaaatccagcgcattgcttccctcaaaacacttaataaagtctgcttccttttccgtctccttgagcatcctcacattttcgtaattcatatgcgggctctttgtcgtataaaatacaagaacctcgtcatcttcctgcgaggataccagaagcggcacccatatatctcctacattctcactgtcaaccaaataaatttttcccattcattctcctgctgacagaatccttttttattataccacattccgcttttatactgcaatgttgtttttccgctgacgcttcttcactttcccgtgttctgttttataaaatatcgatgtactcacccgcaagcgccttgttcatgctgcgcaccgcacagaattttccgcacatggaacaggtgtcctcgtgctccggtttgcggtcctcgcggatttgttttgcggtctcgggatcaatcgcacattcccactgtgcatcccagtccagcacacggcgtgcgtctgccatcttgtcgtcaatctctcttgcaccccgcacgcccttggcaatgtctgccgcatgcgccgcaattttcgatgcaatgataccctgcttgacatcctccacattcggaagcgccagatgctccgccggtgtcacatagcacaaaaatgcagctccgttctgcgcggcgatcgctcctccgatcgcggaagtgatatggtcgtaccccggcgcaatatccgttaccaacggtcccagtacataaaacggtgctcccatgcagatcgtctgctgaatcttcatatttgctgcaatctgatccatcggcatgtgacccggtccctctaccatgacttgcacatctcttgcccatgcgcgctttgtaagttctcccagccgcaccagttcctcaatctgacacacatcggatgcatccgccagacagcccggtctgcaggcatcgccaagggagatcgtcacatcatgctcccggcagatctcaagaatctcattgtaatattcgtaaaacggattctcctctccggtcatacacatccacgcaaacaccagcgaaccgcctctggatacaatattcatttttcttttgtgcttcttgatctgctcgatcgtcttgcgcgtgattccacagtgcagcgtcacaaaatcgacgccatcctcagcatgcaggcgcaccacatcaataaaatcctttgcggtcagtgtcgcaagatctctctgatagtgaatcacagaatcatacaccggcacggttccgatcatagccggacattccgccgtcagttttctccggaacggaatggtgttcccgtgcgaggagagatccatgatcgcgtgcgctcccatgtcaactgccgccatcactttttccatctccacgtcataatccttacagtctctggagattccgagatttacattgatcttcgtccgcagcatcgagccgacaccctccgggtcaatgcatctgtgatgcctgttcgcgcagatgaccacctttccctccgcaacgagcggcatcagctcctctgtggtcatgcgctccttcgccgcaaccttctttaactcttccgtcacaatgcccttgcgggctgcctccatctgtgttgcatactgttccatatttttctgctccatttctgcagaggatgtgcgaaaaaatccggcgtcgcagtgacgccggattccacaaactatctgatccatcattcgctccctacgacagtattaactgacaggttccaagagtcaggttttaaccttctcaaccgtttgcgcatgcgcacagtccctctgtgatatattctttttcctctaacaccttatctcaattctatgcttctgtcaatctccctttcctcagaactgctcttttccataacaaaaaaaagaacagccatcactggctgcccttttaggagaaggtatttttactatggggtatagcaaaaactatatataatgtattggggggtttttacggttattatagtaccatgactgcgcaaagaagtgtgcacaaacttcacaaaacttctatttcatttctatacattttatacagtaccttaggactagttcttttgtttccgcaaaattttgcataaccggttgttcatttcccgctcttttttgcaaaatgtcctttttgccttctctctatctctgccgtatctttcccttgatacgcgagagagcattgtcgattgtcttaggacttttcccgagttcctccgctatctggcggtagttttttccttccagatatgcgtctaaaacctggcgctcgagcgcgcttaactgttcccgcagctgctcccagaaagcggtaaaattctcctgctcgatcacgagctgttccggatcgtccatctggtcggtgagaagcgtctccgccagggattttccctcctccgtggtctgggaataaaaagacacatacgtgttcagggggacatgttttttccggttggacgcctccaccgcgctgtagagctgtcggttgatgcacagctccgcaaaatggaaaaaggatgcctccctgtcagaccggtaatcccggatcgccttaaacaatccgatcatcccctcctgaatcagatcatccgtatctccgccaatcaaaaacattgcatttgccttacgaagcaccaacggcttgtacttttcaaggatataatccatgatccgctcgtcgcccccgcgcagtttctggatgagttcttcatccgccagcttctgatattcgtccacgtcttcctccgtcttccctctctgctctgccctgccacgctgcctgaactttccgcgccctgccacgccgcctgaactttccgcgcacggctgcgctgcctgaactttccgcgccctgctgtattttccgcagcataaaaatctgccagcctatgcctgctttgtcatcttacatcatccgctgtctgacgatctcataggcaagcacaccggctgctacggaagcattcagagaatcaatgtcacctttcatcggaatggaagccacataatcacaattctcgcgcaccagcttgctgacgccctcgccctcgcttccgattacaagaccgatcggtcccttcagatccagatcatacatctgtgtgccgcccatatccgcgcagacaaaccagatcccctgctcctttaattccttgatcgtcgccgtcagattcgtcaccttggctaccggcgtatagtttaacgcgccggcggacgtctttgccacagtcgcggtcagtcccaccgccctgcgctttggaataatgaccccgtgtgctccgcagagattcgcggtacggatgatcgcccccagattgtgcggatcctcaatattatccagcagaaaaagaaacggcggctctcccttttctcttgcgatctccagaatgtcgtccacttccgcatattcgtacgctgccgccaccgcgatcacaccctggtgtttcttcgtctccgagagctgatccagacgttctttttccacaaaatgaataatggtatcatgcttttttgcctctcttacgatcgtgcgcaccggtccgtcctgacagccgtccagcacaaaaagcttgtcgatcgtcttgccggaacgaaacgcctcaagcaccgcattgcgtccctctatttttaattcctcgtatcccatgtattctccttttctctctgcttccggcagactctttctgctgcctgcagcatcctctgcctatggcagatgctctatatttccgccttctgcttcctctgcctgcggcagacgctctatagcttcaaatgcagcccgtccacaccggtctttaccagttccaccaggcgttcaaactcatcctgtaagtacagccagcccatcagcgcctcaaacccggtggccttgcggtaatcggacatcgtcgcattctttgccatagtcggcgacttggcatttctgccgcgccggtaaatgtccgcttcctcctctgtcagaagcggcaggagcacctccatcatctcggcctgcgtgtgcgccttgacaatctggctggtccgtttgtgcagttctcccgctctggtattgccttttcccacgacaacagaacggatgacgagatcatagatcccgtcaccgatataagccagcgtcagcggtgaataggtgcggatatcgacctccgcaatcccgaactgttccttaatataagaatcgattcctcttcccataccagcttcctctccgactcacgctttatgccagatcacaccctcgcgtgtgtcctttaacacaattcctcttgccagaagatcatcccggatcgcgtccgcctttgcaaaatccttctccttcttggcagctttgcgctcctcgatcttttctaaaatatatgcctcaagctctgcatccacctctgtgtcttccgccggattatccaccttcgccgtcgtcagattcaaggagagcacgcggtcaaaatcctccgccagtgcgcgcttggttgcatcgtttaaggtatcatccttgagcaggtcatagacgattgtaatcgccatggaagtgttcaggtcattggaaatggcatcacagaacttttccttgtactctgcaaattttccctcatccactatgccgtccgccttcagatccgcgattctcttcacaagctttttgtaggcaacactcatgttatccagcacctcgtaggagaactcgagcggctttctgtagtgggactgcagacagaacatacggtacacaatcggatcgtatcctttttcctgcagaagcgacaccgtaaggaaatcccctttcgacttgctcatcttgcccgacttgtcgtttaagtggttcacatggaaccagtaaccgcaccacttatgtcccagatagctctcggactgtgcgatctcgttggtgtgatgcgggaaaatattgtccacgccgccgcagtggatatccatatattcccccagatgcttgatgctgatgcaggagcactcgatatgccatcccgggtatcccacgccccacgggctatcccatttgagcgcctgatcctcgaatttggactttgtaaaccacagaacgaaatcatttttgttccgcttattgacgtcctcctccacatcgtcgcgcacaccgactaacaattctttctcgctctgggaagaaaaaacataatagtcgtccagcctggaagtgtcaaaatagacatttccgcctgccacataagcgtagcccttctccagcagcacctcgatcatgtgaataaactccgggatgcagttggttgccggctccacaacgtccggacgcttgatatttaactttttgcagtcatcgaaaaacgcgtccgtgtaaaacttcgcaatctccatcaccgtcttgtgctcgcgcttcgcaccttttaacatcttatcctcaccggtatccgcatcggaggaaaggtgtcccacgtccgtgatattcatgacacgttttacatcgtagcccacataacgcagtgctttttccagcacgtcctccatgatgtagctacgcagattgccgatatgcgcgtaatgatataccgtcggtccgcaggtatacatggcaatctttccatcctcatgcggaatcaccgtatcgatatttcttgtcagtgtattgtaaaatttgaacttattctccactttggtattctccgtttctttttattcttattattcctgtgacgctccggctcccgtgcttaaaatacgcacttctttttccagatccagcacacggttcaccagttcggcattctcatgctgcagcacggtgatatcctccttcacagggtccggaagatgcacctgatccatgtcatcctgcggtgtcctgatattgtcacgctttacaacgcgtcccggcactccgaccacggtgcagttcggcggcacttcctcgatgacgacgcttccggcgccgatcttggaattatccccgaccgtaaaagaaccgataatcttcgccccggcactgatcatgacattgttcccgatcgtcggatgacgctttccggtctccttgccggtaccgccaagtgtcacgccctgatacagcgtcacgttatctccgatgatcgacgtctcgccgatgatgacgccgcttccgtgatcgataaaaaatcccttgccgatcgtcgctcccggatggatctcaatgcctgttttcctggctgcgcgctgcgaaataaaccgtgcccagaaataatgccctttgagataaagcttatgcgcccttctgtagcttagcataacatgaaatgtcggataaagcaaaacttccatcggacttttaatcgccggatcgcgttccttgattacctgaaactcttccttcatataccttaggatacccatctcttcccattcctttccacatacaaaccagaacaaagtttcctattacaaaaaaaggatcatccgtctcctagagacgaaatgatccgcggttccactctactaaaatcatatgatttcacttgacgcatgtaacgtatgccagacgtacccggctacggcatccctgcatcctgcggtgcagatgactctcgccggatcagctcacggaggcacttggggactctctcttccaagactgctttcagccggtgacagtctctctctgacgaatgtccgaatccttactctttccgatcttcgcttttccaattcatctttttatcggcagaagatacctctcctgcctactatagtttatgcacttcctgtgtttttgtcaatcttttttcactgcatgtttcgtctgcagccgcctgaattcttcttagctcattgtacgcttcgtccgcagccgccgcagcccgcgcagcccgccgcagagtccgccacagtaaaacttccctcataaaaactggaaagcgcgcagatcgcctgtgaggaaatcccttcctccgttccggtgaagccaagtccctcctccgtggtcgccttgacattgacctgatccgtgctgatgccgagcgctcccgcgatgttttcctccatctgcgggatatgtgggcgcatcttcggcttctgcgcaatgatcgtggcgtcaatgttctccaccacgtaacccctctcccggatcagctccgccacatgggagagcagcttcatactggaaattcctttatactgcggatcagtgtccggaaaatgctttccgatgtcacctaatcccgccgcgcccaaaagcgcatccataatcgcatgaagcagcacatccgcatccgaatgtccgagcagaccaagcgtatgcgggatcctgacaccgccgatgatcagatctctgccctcaaccagtttatgcacgtcgtaacccattcctactctcatgataccctcactttcaagccttttcctatgaaagaacaaaaatccccggacacacaactgcttgtattcccgaggactctctagtagcggaagggagatttgaactcggtatcaaaccccgcaaacccgcataaatactaggtttctttacacctaaaggtgttacctcgtgttaccttttacatcgatagtgctttcgcaatgtattcttgcatctcactctctgttttattattaaaataataatggtcaagcgttgttctaatatcagtatgacccatttgtgtttttattacagattctggaacatttccatctataagctttgtagcatatgtctttctcgccttatgaattgatcgctcaccaattttaactttatcgcagatcacatataaacgtcttgtaaatgcttgtccttttatccttttaccgtttttcataaaaatatattctccaaaagggttaagcatttttatttttctcataagttcattggtatcttcggtaattataacatctctaaatccggcatcgctctttggaaaattctgaacgtcaaatacatattttccattctcgtcgcggtatcgtatttctgtctttgatatatgtatcttattttctccgatatcagaccatgaaagagtagatatttctccaaccctcaaacctgttttaaatgccaggataattccaagctcaatcaatgtaggctggtcttccattataaatttttcgattaaaagctcttcatctttagaaaaaactaattcgttgtcagacttatgattcctcttaaatgacttttccgaaatttccaaatcacccatgaaactggttatgcttaagctggtataatgttttttctttgcatatttgaaaattccgttaatcaatatccgcatatcggagtacgctttctgcgtaagttccagctttgaaatagctgtttttatgaatgattccaatatttcttcgtcaatataccggatttttctatttgcaatcggcaaatacttattttcaaaaaatcttttaaaattcgtttcgtacttgtcctttgtctgccttgttatttcaccatattccaatttttcagaaatccagctagaatatacttggctgattgtcggttcatcttccatggctttataaaacttcactatctcgtcttctatcgccttttcagatgttctttttacaagttttttccctctctggctttcttcgtcgggcaaatatgtgtaaaacttaccgtcttttccttcccaaatgctgtagttgtgtttttcaataaatttcttcctttcgttcatctcaatttttttctgaatggtgtctatgtcgataataccattttcaatggcgaaattcaacaattcacttttagaaagattttccgtttaaatcaccttccaatctcttgactttttgctttatatcaaagatacgcctttctactgttcttagcggaatacaaattttcattgatatttcttttggtataaatccacgggcaagaagagaaaatatttcctcttcctgctccgtaaaattggcgttttcaataattacttcaagctctggcttagtcagttttgaaaacttcataagccaatatcctccaatattttattcctctccctgccagatcttcggtgtcccgtctgcattgagcataacggtacatccggtaccattccgctgatacaccagatacatgacgcctgtgtctttgtccgcatagataccgtaataccgccaaccttctaccaataccatcgtattatcctgccctgcgctgacgtttgccatgtcactgcatccggcgatcaagagtgttgctgttaaaattgctgctaaaattttctttttcataactgctccttttctctgctctcttcttcctcgattgccttataaaactcgctcgctttaatttctgtcataaagtcgagtagctttacttctacattctccgccgaaccatataaaacatcgccgatcataaagcaccttgtgctatatttcccacaaaatctcattccgtagcagaagtaattcggttttttcggctttggtaccgtctttgcaatctcaagccaatccttggtaatttggcagtttgctctgaaacgtctaacaccgttttcgtaatataatttattttttgtaaacataccctgaaatttctgcaaatcattttcagttggaataattattaccgctctatcgtctggaatatattgcgtcgactcaatcccgtgttcctccgaaaatttcttaaatgcctgcgcattcgcttttacatctttctgatactgtacatatgctttataaaaatcactgtctttgttaattgtaaaaaatttctccatctatttatcctctctttccgccccgccgcattactgccagcgaagctatagctgtttgatctcatgcaaaccggagctgtccggtctgctcaaaataaactcatctggttctcatcgtactgataaaagcgtcctgtcgtgatcctccctgtctgacgcaacctctccacccgcggcttctgtctcagacttgccatgtaattcatatcgacttctggcggaaccgcaagataatactcatccggcagcggtaaccgattctctgtgcagatctcacggatctttgactgataatagatgatgtggttccgtgtcagattcatgttgcacccatccggccagaacggatcactgcacccgttctgattgatatctttccagtgttctatttcctgccggatgcactggcggtactctttcactttatcttctgctgtctgaatcatggcagcacctccccaaaattaagtttcatctgcagatctggctcatagttcatccacaccgtttccgtccgtggctttccatgctccgcacagcttgaaaactgctttttcttccatccggtcagatagtcgttatacatttctgactcgtaaccagaaatcatgatctttgctttgctctgcagtaacgctttcaataattcctcatgatctgcatctttcatctcatgcgcatactgctttcccccccctggtacccaaaatatacggcggatcaatatacataaaaacattgctgtaattaaatctctcaatcacttccaacgccgggcgattctcgatctgcaccatgcgcaggcgttccgctatgtcaatgatccattccggcagacggtaccagttccacagagcgtaggctctctccctgccctgtacatcgtttttccatcctaccttgctaccattggtacggaacccatgcccctgccagcactggattaaaaatcgtaatgccttatgatacggttcatccggcatcatcagctcccatacatccagtttatatgtatcctcatatttttcacgactgaatggtgtagtcattaccattctggacagacgttccgcatcttcctgtatgcaccggaagagattcacaacatcatgatccagatcattgatcgtctcgatatcagataccggcttattaaataacacggccccgctgccgaagaacggctctacatagctgtgatgttccggtatcagttccaccagtcggggagcaatgttccatttacttcccggatatttcaatactgttctcatggcatcacctctggaatatcctcgaaactaatctgattatcagtttcgaacacaagcattttctcttttgctcctgtataaaaattgcggtcaatctcaaatccatacgcatttcttccaagttccgccgccgctcttaatgtgctaccgcttccacaacatggatcaattaccacatcaccgggatctgtaaatatctctattagcttttttaaaacagatactggcttctgtgccgggtggattttgggaatatctttgccatctttctcccaagtaaaccagttaaagatcatatgtccagtgcctcggatagtctttccgttttcatcgaatcttgctccatttctaaactttggcaacttgtccctatataagatcaatgcatactccgtcgctccgaccactctcatatttgccttaagcacctgtggactgtaattttttacaaatacaagcggtatgtaacgctcaaatccatgcttctttgccgccgcaatcaatgtctgcatctgctcaaaggcgcagaacacgatcatgcacggcgcgtcagaacttcgccctctagttccggctttcttcggttctttcttaagcatcttgctgcagaaatgaaaatattcatacaggttgaagttaaaatctgaattgaatgctgcttttcctgcaagtttgctctctccattcttgttgtctccaccgttgtaccacatcggattactgccgtagaaattcttccctacgttgtaaggtacatcggcaataataagctgcgccggcggtatcgcatattttttataattctgcatagaatctctgtaaatttcacattttgttttcattttcttcaaaaggaacccggcgcgccttttatccggataggttccggctcctttccctacataaattcttccaggctcatctgcccgtctacattggcagcagcttctttctcctgcgccattcttttctgcttatactcattgtatttctttctgtactcataactttttccgaagatattccatgcagctttaactacatttggttcatacgggcgaatcagttccagatcttcaacagccttgtaggatatcgggcacccacagcatccagtccgggtaagtccgtacacctcatatgcgtctgaataccgtatgccgtagtattccttataccactctttgtcccggtcgctcacataatacagcgggcggagacgaaactgaccgtttgaagtttccgtaaagcataaggccgtattatctttccttggtacggatctcatcccaccctcgtccctgcgctcgccggtaataaccatctcgaagtccttttgcaccttatgtgcgatatttttcttgcaatgtacgcaacaatctgcgcttatcgggaagttcggcggatattcttctataaaatcccgcatatacttcgacgaattgataaccaactgaatatttggtcttggctcgccggcggagttgcagcaacagagaaaattgatcgtcccctcacaattagggtatctctctttcagttcctccctctttgcctgcttgtcctctgcctgatcatattcctgcgcgattgataacggtatattcttcttttgccatccagacaatccagcagacataatctttgatacaaacggtatgccatattttcttgttgcctgcacaatattgaccttcggtctgcactcttcaatttccacaccgtatttttctgctgtatccctcacatgatcctttatagctttcatttcaagtccggtattgaagaacgcatacttgactggtggcaaatcgaaaatcttccgtgttcgctcgataaggtcgatcataatatcactgtcagaaccacccgagtacgaacatatggcgttcggatgctccctcaatctctttgcaataatgctctgtatggcattaaattttgcaggtgcatcaaaatcagcataatccggtctgtccgtatacactcggcttctaaattcttctttcattatttttcggagtaaagagctcttttacgctggccagcaaacctctcactcctttctgctttattttttcttacctctcttggtcttgaacttatacacatcgtttctctgccggcttaccgcactgcggtagccgttcagcttactcgctctgctctttcccatgtacacctccctctatggcatctaagcattcgttccaccctgcatcgaaccttccattgtcacaatgctctggatgatctgatttctccggcaattcccggagtgggcaccagtccggcttttctccgtctggtacaagttttcctaccgcacagcacagatattcgtcatcctccgtctcatagcacaatgtgcatttctggcacacctgttccggcatatccataatcaaaatcgctttagccatctactccaccacctttcacaatctggattgctttgccaaatgcttcatatcttccctgacttctcccgtcatcgtagatctgttcgccgtctccgcatccgtcctcgtcgcaatcatctggtctgtcctgctctgctttctttaattttcccaactgttccacaaccttgtctacatcataagccgtcggatattcttctagtaaatacaatactgcatttgtatttactaaagttccattgcttaaagtaaccgattttaaatctttctttagcgcatccgcgtcaatcagtctcatcgttcgccctcctgttccaatctgtagttgctttcgttcgctcgtctttccctgttctgatgcctccgtcctgatccatgtacatctcacattcatagctttttggaagttctgttccgcatttcatacatttgattttgaacattaccccaacagccgaatgtgatgacttatttgtaatggttaagaacattgcgtttccgccgcagaacgggcatggcttaagctcttcgctcattcttcattcccccaatcaatccattgaccgcaactcgggcaataggcggaattatcacttttaaagcatctcgggcatgatggacaaatcattgcgtttccaataattctcggtcgcttcgctgtctgcttctccaccgccgcccggcattcttccaaagtcccaatcttgcgatattgacgccaatcacttaatgcttcaaaataattgcttttcatatcctgcaattcttcagaagtaccgattgcacggtacttctgtacttcatctaaaattgccatcatgaaatcatacatcgtgtttctcttgtcagatgcagttattttcacaagttcgttgcaatccccatgtccaccagcatctatgtaactatcctcaaaatctgatgtatccacacgatcaaaaatataatcaaacacatcatcctctgtctcaaaactacctctgaacgcatcccaccagtaatcggtgagttccattcccttatgctctctggctactttttttaatgatcgaattgcaacatcacaagcttttttccctatagtgctctgatatgctccatctgcttttactgatacctgcttaccaaaatcttttaaaacctcaagtgcttcattctccgtcatggctacacctccaacagctctgggttgtcaattttattgccgatcacttcaaaattctctgaatcaaaatcatccagttcctcatagtcatcacagcccgtctcattcgtgcaccatccgttttcatgccacacgacacgctttctcgtctcatcttctggaaactcaacgtcgatatgccctgaaagaatatcattctcaaaaatcagctttccgttcttatccttaagacctgtacactggcagatggtagattgatcgacctcaacctgtattttttcaacaggtgtccctaggctcaaatctgctcctaatggaataatgaaatggtgtgtgtgcctaccatcagtatgcgtcatacaaaaataaaaaccttccacccattccccattatccttgcgttttgccttgaataaatatctatcctgcatcttcattcctcgctttctttctgtaaccatgacagacaactctgttctccctcatattccttaccaaaacggttgtcaaaattgataataaaatctgccaactcctcgtccgtcatgctccggattcggtctgcattggtcatggctttataattctcacagttgcgctccatgtctaaatgtgggctgtcgttaatcttcggacaccacttgccgacaattacatcatctttatttgacagattatataagttattgcagttcttacacttcggcatctttttttctcccttccgtgtctttatctccaatcaattttttgaccacatacatcgcaaaatgaatacctgcctttatttctgtagatgtcacgtatatgttttttacatgcagggcagtagaattctttccgcgcatacctggttgccacttttcttggctgctgtttcatttttgtgtccctgcatatctgcaatgctttcacagcttttgttaaagcttggagcatatctctattatctttttgggcttctatagctttttccaatatttctatggcatcatttatcgacattcattttccctgctcccttccgcaccgcagctgatacggcacctctctgaatctcttaagcgcgtcgccgctatcgttgcgcgttttttctttcatacctttatctcactttcacatcagtgtcatttctgcgaattttaaaatccaacccacactcttctttcaagatctgtatctgatcttcccatgtagcataatcatccatgatgcattctgcctttttattgaagcgatcaacaaatctctgtatgcggcttttaccaaagtcaaactcatcgtgcaaaaccattgcagacaaaatcgttaccgtgtctatggtatttaatttaatcttgctgacgcattcatctattgcattctttggtagcgcaagtggtaattttgttgcgccgcgaaagcggcactcttcttccagagagtcaattcccttctcctttgcaattcgcagagcatatgccattccctctcgcctaagttcttcatctttatttctcatgaatcagttctcctttcttttcatctcaatcgaatcgagttccaaaaaggactgtgcatatatctttgaattcattttcacgatcagaaatttgaccatccaattcatcgagcctattaagtaatgctttctggtattctttttctgtaaaatccgtattgcgttttcttccccttgttcttattggaagttttacattttctccgttttccaataaaatcccaataattttgtgccttgggacgtcgtttagttccgcaagaatctccaactgttcacctttatgctttgcatgtcggtacctgttgcaaatttcgcattcgcccatctccatcatttcttatcacgcccttccataacatttgtttccgccaaagttttttctaattcatcatagtcataagatctctgatgaaagttattaaatttgttttttgatcttgggttactctctttctcctgcttctcccaactccttaatgcggctttccagtcggttattatttctccattacgtttccaacctattgatttgtagtaatcaataaatgattctgcgctaacaccattcttcctcttacggcaataatcagccacttccgccaatgacggtatgcacgcttccacttctttccccggcgagcttcctgcgcttcttattgcattcactccggaaaaattttttgaagcatcaaatgtgtatgcgccatttcttttcgtataaagcattgatttttcttctgcataattggttggcttataacggtctttttgaatgcagttatgtaatttccaatgttttatgacaataacattagatcctggaaaagtaagaacataatgtttgtcaatgagaatttgcaagtcttcctttgaagcctggcactctcttactgttttattggcgcagtcaacaaaaccgtcgtcatctgcccgtatgcataaatgaaaaaacaacccctgcgctgtgagcggcatgtcaagaaaagcatctgacgtcactaaatctatgcgaaacatccgcttacttgccataatatctccttcaagttccaaaaaattatcacttttctgttttcaaaagctcaatgacacgcgatcctgcatcttccggtctgcaaaaaacaaatttcacgccgtacttaatctgcattgtcagcattgcttttccaaggacttccccgcttgttggcggtgcctttggaagcggtacattcaaccactttccaataccgtgcatgtactttatcttgttgtatctctcaagccttggattgtgccaatgaaaaacgtcttcaatagtttttattccatccatgttctcaaccaaaacatacagtgctatattgttgttctgcgccaaaatacactcgtctcggaaccttggatgctgttttccgcagacgtttcccgtaatctcttgcatgtccttcttagtatctacagcaaccttgtagcttccaataaaatccatcttcttaacttccatttttcttgctgactttcgtcttataacgtcaagaacgggtccttccgcgataacataatctccaactggaagaggtgctcgtagcacctctatgtcattacgatcaaaatagcgattcttaagtatgtgctgaccctctttctggcctttgtcctcgatcaataacatacatatctcccttccattgatttatccgagtcatttttaagtaaaaggtaactcttcatcaattccatccggaatattcataaaaccatccgaatctgtcataggctgcggtttgtaacttccgttgtcctgcgaagcctgtttgctctctgcaaattcacagctttcgatcaaacactcattggtgtacaccttattaccgtctttgttggtgtaacttccggtctgccagcttccttcaattacaagctttgttccctttttgcaatatttttcaagaaactctgctcttttaccaaacgcaagacaattgataaaatctgccgttggctgtccatcctgcttaaatttccggtcaaccgccagagtaattctaccgatagctgttgacttctcgccctgcgaccatcttaattccgggtctttggtgcatcttcccattaaaatcactttattcattcacttattcctcgcttccttaaaacgggtaaaggttcatatcgacctctaatccacgttccgccacgtaaacatctgatccatatttaactgtttcttctgtcttttgtttgaatagtgcgggatctccgcttttatctgataagtgaattagaacgacatttcttaatgccgggttatcgttagtagaaataaatttaagtgccgtatcaaggctcatgtgacctcgtaggcggtgttcgtagtttggctcgtccctgtcaacgaactgcatatcatagttggcttccaccatgatgtgattaacaccattaaatctccatctgacgtattccgtgtctgttgcatacacaaggcttcccatctctggatgcgtaatgtaaaacccaacgcacgggcactctgaaccgtctccgttgttatgtagccatcttccagatttatcacggttttcaaatgcccttatgtcaaaatttccttttctaaaacgcatttcagaatattttatcggcggtctgcatggttcaaaaacaggaatgccagctcgcacatattgtaagctataaagactatggtcaatatggaaatgggtagtaatcacagccttaattttcatcacattgaaatccagtgctttcttgacttccataaatggcaatccagcttcaattatcaaggcttcttcgtcattctccaggatgtagcagttgccggatgaaccggaacctaggactttaagctttattttcaatcactcccttcgctttctcgataatctcatcatcaaaattcgctagaacttttctgtaactttgcttttcaaatattcctctcatttttctttcattcggattatgacaaaaaaccttgaaaaaattatcaatattggattgatgtttgattcgctcaatctctggaagccgtacctcaaactgttcgttaccaaaaacatctacgccctgtttgacaatgcagtccgtaatctcgtaatcaatacggttcacagctttcgccatttcctatatccacattatcatctaatgaaaatgctgcatttactgattttttacttttccggaattccataaacagttcatttctcacaattggaaaagcatatgtagaaaaacatccttttgaagcatcaaaggtgtcaatagcctttagaagtccaatggaaccaatctgaaacatatcttcatcaaacgctggaattcctaaacgtcgcataacaaaaaagacaattccgtaatttgtaaggaacatttgctctttggcatactccgaacggcaagtaatccataggtgcaatgcatcttgcttactcaattcagattttggaaagttcattctatcctcctacttcatgaagtccggcaaatcattgtcattatcaacaacttccgtctctaccttttccggtttatctgccatcttgggctcttccacagtttcggcaacttccagatcaacaggaaaatcctctgtgtttgcgttttcagatatttcatgcttaacctgttcctgtaaatcttccatcggatattccttgaaatcgttgtcctgcatttcttcttttgtataaagccccatcgtcaattccgggcaattcagactggagaagaaagatgccgctctgtaacgaagcattaactgtggcatggttttccacttactaccgttcttaccaagccatccctcggctttagccatttccatgtccacggtcataccctcaactctacgaccatttttcgtagtccaagcaagacacgaataaggcttgccatccttatctttggtttcctcgaactgtaattccatatcgaatttgccggaattattgattgccgcaatcagaaactttgagctccaagacggtctcccctgaattacatacaaattctgcataaccattagtgggcttactcgcagtctctgcgcctgctcaatagcaatcagacagtttgcatcgttcttctggaatgttgccggaacgatagttgaactcgctaacgcctttgccatctgcatagccatgatgaaattatctgatgttccaaaaattccaaggctataatctgtaaccttgttgttgctgtgtgcaacctctgccttttcctctgcctttgctactgctgtgttctctgccataattattttccctcactttctccggcatctaccggctcataatatttcttcacaactgcaatcttatcagcaccgtaggtgtccacccacttcatatccaccgattcatccgtaactttcagctttgcgcctttggcatttaaaaccatgtctccggcttttacatcgtctgatgtagcaaatatatatgaccggctctggtttggatattttgcttttatgtaattcattctgatacctccgcaatctctccattttcaatcgtataccaagtattcggcttgatattttccccatcaacctgcaccatttttgcaccgttaagaacccatgcactctggttatttctgtcatattctgtatcatcttctgaaccagtgtattcccagtctgcaaaaacaagaaatgccccaagaacgcccttggcttttgatttgtaaccccaagcaacagctactgcatccttgtcttctgccgaggatgctccacagtatccggttgccgaggatgctccacaggtgccggttgccgaggatgctccataggtgccggttgccgaggatgc

SEQ ID NO: 11503 - DNA, 6343 bp, Unknown
  gut microbiota DNA sequence
cacgatcgccgaatcattgaccagttccagcgccaccagcataccgcacaccgttcccacgaagatgctgccctcaataaacggggttgtcagcgggaaataagaactggcaggtataaaatagacacagtccagcacataggctgcaacgagcagcgccgcctgcacaagcgtcatgacccggtctttgtagagcggcgtcagcagcatcggcagcaacagaaccatcggcatcagcgtcacgctcgtatgcacccacgccatcacagccgcgtaggatgtcagcaggaatatggcgcatcccgccatcgcccgtctgctgtatacacgcttctgtctgccggtcagcaggcggtacacaaaaagaagcaacagctgcagtccgctcggtcgcacaatgaacagccatccatagcgcagtctgccgcagtccgcggtgggcttaaaaaacagaaacaaaaacaattctgtgattaacaccacgccccagatcttccagcccatcgaaaagaagctcgcgctccactccttccagctttcgccactcagccattcatagctgctgtcatgtctgatcttctccatcttttcccctcattacgaaacgtaatactttcttcctagaatattatactgtatcacaccgattctttcaacggcgagtaaacgcaccccgatcagaaaaaaccagagacagctccccaaccgtctctggttctatttgaaatactctccctctttttagcacatgatgtgtcttacaatcacatcgatgccggcaatccaaagcagaagcgctccgccgacatatgcttttgtcttgtgctgaaatcccagatgataacccgtatacacgccaagcacaacgaatgcaatcgtcatacatacgatgatgatcagcatcagcgcaacgttcgtccccaggaatccgaatgcgatccccgcaagcagcgtatagatgcttgtcaccgcagtcatcctcaggaactttttcacatcaaggctctcctcccggcgctcattgatccattcgttcttgattgccttcgcaatcaggcggatgccaagtccaaaaaaaatcaccgccgcaatcacaagtcctacaaaattctcatcgtgtgccagctcatttctgtaaaggagaccggacagatagttcccgagcgccagcgcgcaaagctgccatacagcgatcaacgcgcagatgacggacaactgttttttgtccacttttgcgaccaatgcgccctggcactccatcgccgcgaaaatatcaagcgatactcccgctataatcagaacattctctatccagttcatttccgtcctcccttacatgactccttattattatactctcttcttacaatatttccagaacaaatacagatttattgagacaattttcattagtcctcttttaccgcatctgtcttgtagataaacttgatgcttccgttcacgccgtccgcaatatccgtgtaggtctgatagtcctctccagcgtccagaactgcctggatacgatccatcagaggctcaatatcaccgtggtaggaatttaagatcttctcaattccatcctcattgaatgtaacgattccgtctgccagctgatgtgcgccgtccgataactgatccacaccgtcgatcactgcgtcggtaccatcgcttaacgcgttgacgccatcgttgagcttctgattgttggaaaccagttctgcacttccgttcttaagctgcgccacaccggatgtcagtgccggtaccgcatctgccagactcttcgtaccatctgccagtgctctcgctccggttaccagactgtatccgcccgagctctgctgctcaatacttgccgccatcgtggactttgtctgttctgccgctgacacagctgctgttccggctgcttccttcgctccaagtaccgctgcatctccggccgctgcctttgctccgagtaccgctgcatctccggctgctgccttcgctccaagtaccgctgcatctccggctgccgccttcgctccgagtgccgctgcatctccggctgctgtctttgctcccgttactgctgcctcgcctgctgctgcctgagcgacctgtttcgcagtatctgccacacccgttgccagagaatctgccgctccgccaagctgcgttgtgattgtggtatcaagctgtgctgcaaccgtctgctgtgcctctgcgatttcatccgcatgattggtctgaatctctgcgatggtctctgtaggatgctgcgctgcaaccgatgcaagtgccgctccgttaatcagattctgcacatccgcagaagatgtcagagatcccttcagaccgtccatcttcgtggtaatctcctgcgttgcctgattcttgatggcttcatactgtccgttatcaaactttgcgcttgcctgctgtgcagcctgattcttaatcgcttccgcctgaccgtccactactgcctctgcctgtgtcttaatcgcttctgcctgcgcatctaccactgcagatgcctgactcctgatcgcttctgcctgtgcatctaccgtggaagatgcctgatttttaatcgcttctgcctgcgcatctaccgcagcggatgcccgattcttgatcgcctctgcctgttcatccactgcggacgatgcctgtgtctgcatcgctgccttctcctgatcggtgaaggaagtctttaaagtattgtctaacagttctacgccgtccgcaatcgttgccgcactgctgttcaatgtgccgacaccgttagataatgtcggaatgctgtcggaaagctgcgtgataccgcttgcgatttttcccgctccgtccgtgtatgcatgaacgccggactgcagggtgccaacaccgtccttaaagtcgcccatcttggacttcaaggtgtctacgccgtctgccagttctgcggagccgtcggtcagctgatccatcgcatctgtgagtgtgtcaaatacctcatccagcttcgaggtgtcattgtcgctgtcggcgctgatgaagttcgttgcattcataaccaccgtcatcgtggtatcaagcttgaagttctcaacctttgcctttacctccacgtaatccggaatggtgacatccccgtcgaaatcgtcgtcctttacgttcaggctttccttcagccccggaagtgcatagccaactacgacattgttgcttccgtcggagatcaccttaccgttttccacctcgatatccgagaattcatctccgaggatcatgccgctgactgccataaacggtacatagatgtcttcgtcttttccgtcaatcttcgctgtcactttctggttgttcgtgtagtcgaaccggatcgtaacctcaccggattttccggcaagctcctccggcgtcacttccttgccgtccagatagtaggtcagcttctgtgtcaccggcagctcgctctctgacgttccctggtagaaaatgtcattgccgtctgcctgccatgtcaccttattgccgctttgtgtaaaggtctcatcgccttttacattttcaatatcttttaatgtggatgcatcttcaagcgtatccttgtcatcgttgttgatcagatgatcggagacaatgattttctgctccttgccggtattgtcggcgatgacatatactgtctcttcttttccgatctctttctcgcttactttgcttccgttatccagcagatcctttaagctgctctcggcatcttccgtatcttccgcctcctcagaaacttccgtctcctccacggtctctgtggcagcgctgcctgcctttgccgcattcacactgtagacggaggaacctgttgcaacaagcgtaacgaccaggactccggcaataatgcggattgcatatctatttttgaattttgattttaactctggtaatttcatggtttttaccttcctttcccgttactgtaccgatacattgttttccgacacattcaccgtcgtgccctttttattgcgaaatcccatgctcgtcgcacagatcagtttatcaaaaatcataaacatggacggcagaatgaaaataacgacaaacatactgatgattgctccgcgtgccatcagaatacacagggaactgatcatatcaatattggaatacatgccgacaccgaaggtcgctgcaaagaagctgagcgcactgacaatgatcgactggatggagctgcggagtgccgtcgcaatcgcttccttcttgtccgccccgttgtagcgaagcttcttgtactttgttgtcatgagaatcgcataatcgaccgtcgcgccgagctgaatcgtaccgatgacgatagaagcgataaacggcagcgtcgtgtgcgtatatgccggaatacccatgttgataaaaatggcgaactcaatgaccgccaccagaatgaccggcagtgacactgacttaaataccagtgcgataatcacgaaaattgcaccgatcgacacgatgctgactgtcttaaagtcctgatctgtgatctcaatcagatccttcgtacacggtgcctcaccgattaacatggcagaggaatcatattttttgatgatattgttgatctcctcgcactgcgcgttcacttcatcagaagcaaccgcatattccgagccgaccaccatcatctgataatcgccgttgatcaagacgtcttttacgtcatccgggataaactccctcgggatgcctggtcctaccagcgagtcaaagccaagcgccatcttcacgccatccaccttgctgatctcatccaacattgcgctggcatcttttgcggagagactgctgtccgcaatgatcatgtgcgtcgcacccatctcaaagtcttcgtttaacttatcgttcgcagtaatactgcttaagctcttcggcagtgttcccgcaagatcgtaatacacatccgtgtgtgtgtagccgtagactgccgggcccaacaccaccagaaatacgatcaggaatacgccgtaatggcgcacgatccagtctgcaatccgtcccagatctgggatgataaccttgtgcttcgtcttctcgatcgccttgtcaaatacaagcagcagcgacggcagcaccgtaacgcagcagataacgccgagaacaacaccctttgccatgacaattccaagatccataccaagtgtaaagctcatgaaacacagtgccacgaaaccagccaccgtcgtgatggagcttccgaccaccgatgtgatcgtattagaaatcgcatgcgccatcgcacgttttttatctccctgaaaacgctcctgctgctcttcgtaactgtgccagaggaaaatggaataatccatcgtcacacccagctgtaagaccgccgcgagcgcctgtgtcacataggaaatctctcccttgaaaacattggtacccagattgtatacaatcgccattccgatactgagcaaaaagaaaatcggcgccagagccgaatccatcgtaagtgacaggacaatgactgccagtacaaccgcaatcagcacatagaccggggtctccttgttcgacagattcttgatatctgtaaccactgccgacataccgctgatatagcactgatcttttaccacaccgcgcagttcctcaatcgcatccatcgtctcgtccgcggacatcgatgtatcgtataacactgcgagcaaggtgctgtccttctcatcattattaaagaaatcatagatctcatccggcagcatctccatcggaatgctgatgtccgccagtgaatcgtaccagatcactgattttacgtgaggaacttcctccatctgctcccgcattgcagatatgtccttcgcgtccataccctccactacacaaaacgagaatgctcccgttccaaactcgtcaagcaggagatcctgccccttcatcgtctcaatctcttccggcagatatgtcaggatatcataattcactctcgtgttaaaatatccgattgccgacggtatcaataagaaaatactgagaatcaaaatcggtattcgcagcttgacgaccgcttttccaaatttaatcatggtccctctctcctttccataaaagcattgtataaaaaaaagactgaatatgaaaatattcaatcttttctccgtgtatcgggttattatacactcgacccgaaatgtataactatctatacatttatattcatttgtattctgtccgcaattacagttctgtcagaatatccgtcatcgaccgcttgatcatgtaattatagatttctgcaagttccttggatgaaatcgtcattccggacttgatccaggtgatcaccacatagcacatggactgt

SEQ ID NO: 11504 - DNA, 5067 bp, Unknown
  gut microbiota DNA sequence
acgctctcggtcatttattgtgaggaaacggacattttaaagcggtgcggggagcattttgcggaggcagacgtgtctgcggtgtctgagatccaggttacagagcgggatgcggcgggttatgtacagcaggtcatgctgggggagtatgcctgcaccggggaagcgttccgtgaggcgatgggctggaattccgcgtgttttacgatcacgcagatgggggaaaatgtgcggatcgtgacaaggggactgggacacgggtacggcctgagccagaatgaggcgcgcgcgatggcgcaggaaggaacctcttatgaggagattttacaatatttttttccggggacaacgcttgtgacagcggatcagataaaataggcggcgctctgcataaaccatccgtgcagggggaacaataggaataaaaataaataatatggatggtgaaaaaaatgagaaaaagcagattttgggcattcctcgggcgtaaacaatatgtgattgcgggggcgattgtgattgcggcagcagttgcgaccacggtaatttacagcgatcatgaacaacagcagcgcgaacagctggaggaagaactggcacaggaaaacacaccggaggaagccggacttgtcgctgcgacggaaagtacggaacagacagcacaggcatccgcagttattccgccggagcagaccgcggagacggaaaagctggagcagaaagtagcggagacgacagagagtacggaagtggcgcaggtggaaaaagaagcggagaatgagacagcagagacgggcgcagaggccaatgcgctccattttgccccggaggacggcatgctctggccgatggagggaaatgtgatcttaaattacagcatggattctaccatatattttgcgacgctggaccagtacaaatacaatccggcggtgattatcgcgggagaggtcaacaataaggtatattccgtcgcaaagggaaaagtcatcggtctctccaacaacgaggagaccggctgtacgatgacggtcgacctgggagacggctaccgcgcgatctacggacagttaaaggagccgaactttgcggtgggtgattatgtggaatccggtcatgtgctgggctatgtggcagagccgacgaaatattattcggtggagggcagcaatctgtattttgcgctgcaaaaagacggacagcctgtcgatccggtagcatttttccagagctagtttgtaaaaggaagacaccggttcttgaatatgttggatttcttcattataatgaaacaagagataagggaggaatcggtacatggaattcaaggaatacagtaaagctgtgatggcgtgggtggacggagtgatgcagaaccgcggcgccgatgccgagaaaacattgaaatactgtgcagatatcgaacaatatgcaaaacagacgggggatccaaagcttctggggtttgcttactattatgcgggcgagacctactatgtgctcaatgagggcgagcagcttcttaagaccattaccagagccatcacctatctggatcaggcggagcagtgggacatggtggccagatcttataatatccttgcgattgcctttttgaaccgtggaaatacgccgattgcgctggattattatctgaccggactcggttattgtaaaaaatataagctggcgaacgaagaaaacgtcatcaacttgaatctcggaaccctctatctgggcaacgaacagtggaatgaggcgcagagatattttgaaaaagtctcctccgatatcaaggcatatccgaagacaccgaattattacgggctgatgagctgcgtggcggtctgtctggggcggtgctttatgcagcgggaacagaatgagcgcgtgcaagcacagctggattatctggatcaggtctgctgggagcacatgcagaagatcgagcgcctctccgcgctgatttttaaggcggaatattatcaccgcgtgggaagaatcacactccgcgaggaatgtattgagcagatccgcggacttgtggatatggacatggcggttatggatatctttgatgatgtgtacgggctgtgcagactgttgctggagatcgaccaggaagatgtcttctgggacatcgtggcggtattggaaaaattgacgaaaaatgccaatattgcgaatttgcagcggaaaatagtttccttaaaaatcctctgctatcgcaggaaacaggacgaggcggcttatcttgaggaggcgggtcggttctatgaactgaccgaggctctggatcgggagaaccattatatgatcgccaacatgctctctgtgcgcagatcattagaacatgcgaatgagaagcggcgggagatggagaaagcgaatgagcgtctgctggagaagtccgagacggatccgctgacgcggctggcgaaccggttccggttgaatgattatctggagcgggcgtttgagcgggcgcgggatgaccatagagcatttgcggtagagattctcgacatcgactacttcaaggaatacaatgataactacggccatcaggcgggagatgcctgcatcatggcgattgcggatgagctgcggaaaatgcagagctgcgataccttctgtgcgcggtatggcggggatgagtttatcattatttacgagtacaagacggaggacgaggttttttccatggcggacagtctgcgggagcgtattcttgacaggcggatcgagcatgtgtgctcgaaggcgcttccggttgtcacaatctcgcagggaatctgttttgacgtggctccggagggaagccgaagctgggatttcctgcatgcggcggatatgatgctctacgaggtgaaaaagcgcagccgcaacaatatttcgctcggacatctggatgcaaaagaggcgagatgcggagaagagaggaaacttttatagattccggcatagaatatactgtaacggaaaatccgcaatcgagccttttacttttaccgaagcgcagcagtatgaagaagtacagatcgagtgaagtacgcatctgtcgattgcttttcataggagtattgcccaaagccgcgagtggatttgggttacatagacagaagttcggagatttgcgcatttcttgacaaaagagagatgccgtgctatgattcaaaatactgcgcagtcggcagaggtgggcactttctgccggtgctgggcatgcgtcagagaattggctctggcgtgacagaaaggaaaaagatggaaacagttagatttgatgagttagatttatatcctcaggtgttaagagcgattgcggatatgggatttgaggaggcaacgccgattcagagccaggcgattccggttgtgatgtcgggcgtggatgtgatcggacaggcacagacaggtaccggtaagacggcatcctttggtattccggttcttcacaaggtagacccgaacagcagaaagacgcaggtaatcattctctctccgaccagagaacttgccatccaggtggcggacgagatccgcaaacttgccaagtatatgcacggggtcaaggtgcttccggtgtatggtgggcaggagatcggacgccagatcaaggcgttaaagggcggtgcgcagattatcgtcggaacgccggggcgtgtgatggatcatctgcgccgcaagacgatccgctgtgatgcgatccacacggtggtactcgatgaggcggatgagatgctgaacatgggcttccgcgatgacatcgagacgattcttgagtatattccggcggagggacgtcagacgatccttttctccgcgacgatgccgaagccgatcctcgatattaccaggaaatatcagcacgatgcggtcaacatcaaggtggtaaaaaaagagctgacggttccgagcattgagcagtattactacgatgtcaagcgcagcgacaaggtagaagtcttaacgcggcttctcgattactacaatccgaaactctcgctggtattctgcaataccaagcggatggtggacgaacttgcggaagaattaaagggacgcggctattttgcagagggactgcacggagatatgaagcagtcgcagcgtgaccgcgtgatgaaaggattccgcagcggcaagaccgagatcctcattgcgaccgatgtggcggcgcgcggaatcgacgtcgatgatgtggaggccgttttcaactacgacattccgcaggatgacgaatactatgtgcaccggatcggcagaacgggacgtgcaggtcggaccggacgcgcttttaccttcgtgaagggcaaagaagtctacaagctgaaggatatcatgcgctactgcaagaccaagatcgtggcgatgccgattccgtcaacggatgatgtggcacagatcaaggcagagaaggtcatggaggagatcggcaggatcatcgacgaggagaacctgtcggacatgattgacatgatcgagcgccaggtgaatgcttcggattacaccgcaatggatattgcagcggcatttttgaagcaggcactcggtcaggtcaatctcgacaacggcagcgaggatgactacgactttgacaataccggcgcggaggaagggatggtgcgtctcttcatcaacatcggtaaaaaagaccgcgtcaaaccaggagacattctcggggcgatcgccggggagtccggcatgccgggcaagctggtcggcgcgatcgatatgtatgacaaatataccttcgtggaggtgccgagagagtatggcagagaagtcctcgagggaatgaagaacactaagatcaaagggcgctctgtcaatatggagccggcaaatcaaaggtagatttaataaatggaacgctatcagaatctggaactgccgcaataagcatagacctctttggggtgataagtaatattataagaaatagatacttaaaagttccagataaacatgcggcggcaaattctgaccgcaaaatccggtatttctaaccatgccgcagctggcatccgtgatgatccgtgtctttccaagtttggagcactc

SEQ ID NO: 11505 - DNA, 12734 bp, Unknown
  gut microbiota DNA sequence
cgccatgtttgtcgtgggatttatctgctttcagatgcagcgccggtgcatggcgggggtgacatcacagagcggtgcgataggaggcgcagcgggttttgccaaagaatgattctaaaaagaaaaagaaacgaatagaaataaaggaaaaacaaaacggagaacaaaaattgccgaatgaggacctgttgagtgagaaactgttacagccgatggtgcagctatcctatgctgccgccatggatctcgtacaggcacgattaagactgatcaatgctgacctgacggaacaatgccaccgccaggtcattcgcaatatgtcctgccgcatcaagacgccggacagcgtcaccaaaaaactcaaaaagaaagggcgggaagtctcctttgaggaggcggtgcagactctcaatgacatcgccggcatccgggtcgtgtgctttttttgcgacgacatctaccggattgcggatgccatcaagaagcagaaggattttcatattatcaaggaaaaggattatgtaaaaaatcccaagaaaagcggctatcagagtattcatgtgattgcgggcgttccggtgacgtacaacgatgcagtcacagagatccgtgtggagatccagatccgctcgtttgcaatggattactgggcggagctggacacacagatgtgttataagaaggatgccggacagatcgccaatgtggagcgcgagacgcgcggctactcggatgtgatcgcaaaggtggacaataagatgttagagctgcgccagcagatcgaaatgatgtgacaggatttttacacaggttttacataagtgctcttctgcattttacattcctcccgtaaagtaaaccatgttctaagaaacgaggtaaaagaaaaaacggagaagaaattccgtaaaattgaatggaggattcaaaatgaagaagaaagcaatgtgtatgttattgacaggtgttatggcagcgggcatgttcgcaggatgcggcagcagtgatacagcagacaccaccaaagatgcagcagcaaccacagatgcagcagccaccgcagacgcagcagataccacaagcgaagctgcaccggcagagaatgcagatttcgatcatacatcagcaatcgccgtatattcccgtgaggatggttccggcacaagaggagcattcatcgagctgttcggtgtggaagaaaaagatgagagcggcgagaaagtggataacaccacagaggaagcgatcatcaccaacagcacggacgttatgctcacatcggtagcaggtgacacctacgcaatcggttatgtatccctcggttccttaaatgacacggtaaaggcagtaaaaatcgacggggcagaggctaccgtagagaacatcaagagcggtacctacaagatcgcaagaccgttcaatattgcaacaaagggcgaggtcagcgaggctgcacaggatttcatcaactacatcatgagcggtgacggacagaaagtaatctccgacaacggttatatcggagatgattccgcagcagcattcgagtccaacggagcagaaggcaaagtcgtagtcggcggttcctcttccgtatctccggtaatggagaaactgatcgaggcttacaaggcagtcaatgcaaacgtggagatcgagcttcagacaagtgattctaccacaggtatgaccggagcagcagacggcacactcgacatcggtatggcttcccgcgagttaaaggattccgagactgaggaagggcttaccgcaacaaagatcgctatggacggtatcgcagtgatcgtaaaccaggagaacccggtagaggatctctcctctgacaccgtaaagggtattttcacaggcgggacaacaacctgggatgcagcaaactaggatggacagcagaaatagcatagcaggacggaccgggggaacagaatgttcttccggtcctttcgtggaacatacacattatttaggaaaaacctgtaaatggaggttctgatgaaaaaaagagagaagatcatggaatatgtatttctgctggctgcggtcatctccatcgtggcggtggcgctgatctgcatattcctgtttgcaaacggaattccggcaatgaagaaaatcggatttgtggaatttctgaccggaaccaagtggaagccgggaaacaataaattcggtatcttcccgatgatactgggaagtatctacgtcaccggaggcgcgctgatcatcggtgtgccggtcggtgtactcacatctgtttttatggcaagattctgtccggaaggactgtacaagctcttaaagccggtcgtgaatctgctcgcgggcattccgtctattgtatacggatttttcggactggttgtgctcgtgccgtttatccgggaacattttaagaacagcaacggacagagtattctctgtgcgtcgattcttctgggaatcatgatcctgccgaccatcatcggagcgtctgaaccgacgatccgcgcagtggaacagagttactacgaaggagcgctggcactcggggcaacgcatgagcgaagcgtttttaccgttgtggtaccggcggcaaaatccggtattctggcggcggtcatcctcggtgtcggacgtgcactcggggagacgatggcggtcatgatggttgtgggtaaccagccgcgtgtcccgaacagtattctgcagggcgtccgcacactgacgacaaacattgtcatggagatgggctatgcgacggatctgcaccgggaggcgctgatcgctaccggtgtggtgctgttcgcgtttatcctgatcatcaatctgtgcttctcggcaatcaagcgaagcggaaaggagtaggggatggagcagataaatccaatcaacaaagttacattgaaagataaaatgaaatcctataccagacatcccggctctttgatcctgctgcttctggttttgattgcagccgcgctcacggtggtgacgctgcttttcctggtgggctacattctcatcagcggcattccgtacttaaagccgagcctgtttgcgttacattataattcggacaacgtgtccatgctccccgccatcatcaacacggtggagatggttgtggtctcgctgctgttttccgtgccatttggtgtgggggcggcaatctacatgatcgaatatgccagaaagggcaataaattcgtggaggttgtccgtctgaccgcggagacgctgaccggtattccttccattatctatggtctgttcggtatgctgtttttcaacattgcactgcactggcgctattccatgctctccggagcggcgacgctcgccatcatggtgctgccgacgattatgagaaccacggaggaggcgcttttgtgtgtgccggattcctacagagagggaagcttcgggctgggcgccggaaaactgcggacgatttttaagattgtgcttccggcggcaatcccgggaattctatccggtatcattctctcgatcggacgtatcgtcggagagaccgcggcgctcatttacacggcgggtaccgtgaccggtgtggcgggactcatggattccgggcgtacgctcgccatccacatgtatgtgctttctaatgaaggtttacataaaaatgaagcaaatgcgactgcagtggtgctgcttgtcattgtccttctgataaatggagtctcatccctgatcgcgaagcggtttgaggcagtgaaagaatagcgcacagcgcggaaatgaggaaaacatgggagaaaagtttaatatatcgaatctgaatctgtattacggcgatttccacgcgctcaaggacgtggatctgtccattaacgaaaaagaaattaccgcatttatcggtccgtccggctgtggaaaatccacctttttaaaatgcctgaaccgcatgaacgacctggtacagggatgtaagatcacaggacaggtgctgctcgacggggaagacatctacagcggcatggacgtgaatctgctgcgcaggcgtgtcggcatggtattccagaagccgaatccgttcccgatgagcatttacgacaatatcgcatacggaccgcgcacgcacggcatccgttccaagacaaagctggatgagatcgtggaaaaatccctgcgtgatgcggcgatctgggacgaggtcaaagaccggctgaaaaagagtgcgctcggaatgtccggtggacagcagcagcgtctgtgcatcgcgcgtgcgctggcggtcgatccggaagtgattctgatggatgagccgacgtctgcgcttgacccgatctcgacctcgaagatcgaggatcttgcggtagaactgaagaaaaaatatacgatcatcatggtgacgcacaacatgcagcaggcagtgcgtgtatccgataagaccgtattcttcctgctcggcgaggttatcgagagcggagatacggaaaaactgttctctgtgccgcaggataagcggacagaggattacattaccggacgtttcggttgacgaaaggagcgaacaatgagaaacagatttgagagacagctgttggaactgaacaatgaactgatccagatgggaggcatgattgagcgcgcgatcgagatgggaatctccgcactggtgcgccaggatgtggagaaggcgaagaaggcgatcgcctacgacgaggagatcgacgagcaggaaaagaccgtggagtcgctctgcatgaagctgctgttgcagcagcagccggtcgcaaaggatctgcgtctgatctccgcggcattaaagatgattaccgatatggagcggatcggagatcatgcggcggatatttccgagatgacgattctgatgtccgacgcgacatacgagcgcagcgcgatcaatattgatctggtggagagcatggcgaaagagaccaccgatatggttatcaaatgcgtggatgcgttcgtcaacaaggatctggagctggcgcgcacggtgattgcgcaggatgacgtggtcgatgatctgttcgcggacttcaagcagcagctgatcaaaaagatcaatgagaacgtcaaaaacggcgagcaggcgacggatatgctcatggtggcaaaatattttgagcgtatcggcgatcacgcgacaaacattgccgagtgggtcatctattcgatcacgggagagcacgagaagtagaaaattggtctaaaaaccgtgattttacacagattttacataaagcttaccggaaaattacctgaaattaaaaaattttaccgactccttggattgtaattgcaaaacgtcaaaaaatacgttataaatgattatgtatgcgtatgtaaaaaagatgtaaagcaatgagatgcaaaggagattagaatggatatttttggagtactgtccctgattggcgggttggcattattcttatacggaatgcacgtgatgggtgcgggactggagaagatgtcaggcggaaggctggagcgcattctggagaatctgacatcgaacccgttaaaagcggtgctgctcggtgcaggtgtcacagcggtcatacagtcatcttccgcgacgacagttatggtcgtcggatttgtaaattcgggtattatgaagctttcgcaggcgatcggaatcatcatgggtgccaatatcggtacgacgattaccgcatggctgctcagcttgacgggaattcagggagacaacctttttataaatatgttaaagccgacatcgttctcaccgattctggctttgatcggtattattctgctgatgtccggcaagagcgataagaagaagattaccggagagattctgcttggatttgtcgtgctgatgtacggtatgtcggcgatgagcggtgcggtggagccgcttgcggacgtgccggagttcacgaacctgcttaccatgttcaagaatccgattcttggagtgcttgcaggagcgctgctcacggcgatcatccagagttcttccgcgtctgtcggtattttacaggcgctttcggtaaccggcggatttacgtttggcacagcgatcccgattattctgggacagaacatcggtacctgtgtgacggcgatgatctccgcaatcggtgcgaacaagggtgcaaagcgtaccgcgtttgtacatttatattttaacatgatcggtacggttcttttcctgtgcctgttttatctggggaatgcaatctttcgtttcccgtttacgaacgatgtcgtaaatgcagcggatattgcactggttcacagtatttttaatgtatttaccactctggttctgcttccgtttacgaagggtctggagaagctggcatatcttacaattccgaagacagaggatgagaagaagacggcagacgatgtgtttgtaatcttagatgacagatttctctcatccccggcatttgcgatcgagcagtgccgctctctggtaagccagatggcggagatgacaagagacggatttctggaggcgatggacgtgctgggagcgtattcagaggagaaagcgcaggatgtcattgacaaggagaaccgggtcgatgtctatgacgacaagatcaccgcatatctgacgaagttaagcagtgaaaatctgtcctacaaggacagcctgcaggtgacatcgctgctgcactgtattacggattttgagcgtatctccgaccactcaatcaatgtggtggagagcgtacagcagatgcgcaaggaaaatctgacgttttccaggaagggtgaagaggagatgaatctctacggtgcggcaatccgtgacatcctgacaagaaccacggatgcttttgtgaacaacgatcaggcgctggcgcatacggtggaaccgttagaggaagtaattgacgaattaaataaagatgtgaagaagcatcacatgaagcggctgcgcaagggcaagtgcagtatggaactgggactgattctgtcggatctcgcaatgaattatgagcgtgtggcagaccactgttccaatattgccgtgtacatgatgcagctgaaggatacacagctggaggagcacagctttacagagcagctggatgaggcggagagcgcagagttcaccagactgctggatgagttcggaagcaggtactctctgtaattcgtatcttcgatctgatgtgcacaggaagctgtggaagagaggagaacaatggcaacaatttatattgtggaagatgacgtcaacatccgcgagattgagcgttatgcgctgaagaacagcggatatgaagtggaggaatttgagagcggagaaagcctgtttaaacggctggagcgcgcggttccgtcccttctgctgctggatattatgcttccagatgaagacggtctggagattctgggaaaactccgggcaaataaaaatacggcagccattccaatcattatggtcaccgcaaagaccagtgagctggacaaggtcaagggactggatttcggagcggatgactatatcacgaagccgtttggcgtgatggagctgatttccagagtaaaagcgctgctgcgcaggacgcagagtgcggcggaggagacaaagatctgccacggcgagatccggatggacaacgacaagcacgcggtatttgtcggggatgagccgtgtgagctgacgttcaaggaatatgaattgttgaaatatctcatgatcaatgcggggatcgtcctgtccagagacaagatcatggatcaggtatggggctttgagtacgagggcgagagccggactgtggatatgcatatcaagacattgcgccagaagcttggggctgcgggaagctgtatcaagacgatccgcaatgtgggatatatgatcgagtagacaaaaacctatgaagaaaaaattaaattccaaattcatgctaattgcggcaatcgccattctggtgactgccgtatgttctatcgggctgttttacagcattctggtacaacagatttatgatgacttaaaggcaaatgcacatgtgatctcccggctggatttcgaggaagcgtcgcaggaagtgtgcgatcagctctcctgggacgggctgcggattaccctgattgcttcagatggaacggttctctatgacagcatggaggacgagacgaagatggagaatcacagggggcgtccagaggtcgagcgggcgcttgcggtcggggaaggacgtgggatgcgcaaatcgacgacctccgcggagcacacattctattatgcgatgcgtctctcggatggaaatgtccttagaatcggaaaagagagcggcagcatctaccatctggcgtggaatatgacaatgcttacgctgggtgtgggactgtgtgtattcctggtgtgcgccctttttgcaaaacgcatgacggagcgttttgtggaacccatcgaaaagatggcggacaacattgtgcttgtcgatgagcgtgaagtatacgaagagatgcgtccgtttgtgtcgatgatcaagcagcagcatgtggatatcttaaaccatgcacagatgcggcaggaatttaccgcgaacgtatcgcatgaactcaagactccgctcacggcgatctccggctacgcggaactgatcgcaagcggcatgaccaacgagcgcgataccgagcattttgcaaatgagattcaccggagtgcggaacgtctgcaatctttgattaacgacatcatcaagctctcggagctggacaacagcgaccttaagctggagtttgagccgatcgatctctatgcgctggcgacgacctgtatcgatcagatgcagattgcggcgcagaagaacgaagtcacattgctgcaggaaggcgggtcggtcacgatcaacggcaacaagacgctcattgaggaactgctctacaatctgtgcagcaatgccgtgcgctataataagaagggcggcagtgtgaccgtcattacaggcatgaagaaccagagaccggcactcacagtgcgcgacaccggcattggcatcccgaaggagcagcaggaccgtgtctttgagcggttctaccgtgtcgacaagagccgttccaagtcgacgggcggtaccggactcgggcttgcgatcgtaaagcatatcgtcgtgcagcacgaagcccagatcgaactctccagcgaggagggcgtgggcaccgaggtgacggtaatcttctagccggcaccgggattcgatcacaaaaccggtgatttctaaccatgccggatcgaacatcggagttcgtgtcttttgccacactttgacattctatgtggtcgtgtccacacagcaaagacaatgagcggactttttagcattgccaggcacacctctttacagatttaataattaggaactgtcgcaataagcatatcgtattttgagttgataagtaatattataagaaatagatacttaaaagttccagataaacagacggcggcaaattctgaccgcaaaattcggtatttctaaccatgccgcagctggcatccgtgatgatccgtgtctttccaagtttggagcactctacggattgtgtccgcaagccggcagacaattttaggacttttgtgtgtgtccctttatggcacctcttaacaaaacataaccgcgcgaagccgctgtctgagtcggcatctgccctattttaaatagcagatgccggcgagttcggttcgcgcggttttatattgtctgtgaagaggtgccattagggacaccaaaaagtccgctcattgtctgcggcttgtcggacacactccgtgagtgtcaaaacgtggccaagacacggaatgtgatgccagccacagcatggaagaaatacgtgaattttgcttcaaagaatttgccgccgtctgtttattctgaaacttttttgttctctggtattcctgtaatattacttatcactcaaaagaactctatacttattgcgacaattccttatattttgttcatcggtgtgccaggcgctgcacaaaagtcctgaaattgtcttatgctgtgcgaacacaccccatagtgtgttcaaagcctggaaagacacggacgatcgccgatgtgagaacggcatggttagaaatcgccggtttatgccgtgtggagcgccggccgggagattgctgtctcggcgctggtgtccgcgtcatgcagccggtggtactcttcgataaagccgttcattttgccggcttcggcggcaagctccgcgatgacattgttgacgctcttgaagcgctcggcattgtcggtgcacatcgcgttggtctcctccgcggaggcactgatctcctcgctggtcgaagagagcgtgttggtctcatcgaccagcatggtgttggtttctcttaaaatgcgtgtcttctctgagatggcggcggcattctgttcaaggccggtcagaccggagcggatgccgctgaaattttcttcaatatcatgaatcatgctgacctgattgccgatcttgtccatgacatgatccatcgaggcgattgtgtcaccagcattctgattcagctttgtgatgatttcctcaatattttcggtggactgtttggtctgctcggagagcatgcggatctcctccgcgacaacagcgaatcccctgcctgcttcccctgcgcgcgctgcttctatcgtggcgttcaaggcgagaagattggtctgtgcggaaatctgctggataatgctgataatttttaacatgtcctgcgtatgtgcctgcagtgcagtcatattttcctttacgagcttattctcggattctacttcctccgtctgggagacaatattgctcacaagtgcctgaccggtctctacatttttaccagaagactgggagatgttggtaagtgcgtctgcgatcgacacggtatcggcaatgatgtcctgaatccgtccggtcatggaagcctgttcctgaatgcttgcgactgtgctctccatgcttacggtaatgtcgcccattgcctggctgacgcagccggttgcctctgtcatctcctcgatcagcgcatgaatggactgggtggattcattgacggatgtgccgacggtcacgatggaattcatcatatcctcctgctttttcttgtgggcttccagttcggcaagctcctctgtgttgtgcaggacggccacgcgggacgccaggcaggtgattgtgttgatgacaataataatggagcagatcacaaagatcatattggtttcggaaagagagttggttccaagcacatggacagagtaaacaccgtttaaaatacagcagaccatatttaatacaccggcgcagatttccagcttcaggtcaaagtacattaacagtgcgacaagtatgggaatcataaaaagattatagacaaaaagttttgaggatagacagctgacttcataaatgatcagaaagcatgtaagcgcgacattgcggtagcgtatggaaactggattaaaaaaatagaacaatgtactaacagctgcagggagggcaatcatgccagcaatgacaaaaagacggaaaagagcatgatttccctgcagaatggttccgataaacagaaacatcatatagatggaaatgatgagaactgtaagcatcagacaatagttggcacgctttgtggagcgttcctgtaacgttaactctcttgaatcgttcatgatagacctccttttcctgtacgaaagtaccagatgtttgtgatactaacatagaccttggtgcaggtctaaggtcaataggaggttgaaaaaatcaggagtcttccagcggaagatatacttcgtaataatccaggatgacatctggctgtgctatgctgaagacgtagaaagcgtaagcctccggtttgcaggaaagctgatgctccccggcgtatttcaggatggcggagagatcccagagtatctcctgttcggtcggaaatgcggctacggtgtagagacagcggcagctgtcccgtctgggcagattggaggaattgagctgggtaagtgcaagcatcggctcgcggatggcaaactggagggcactgacccggcaggaaccggacggctccacggagaggatgtagctgaaattccccatcgaaaacagcggggaatgaaagacatcctttagcgtgcggtagcctaaaaaagcggaatcctgatggtagagcggatagacagcgggaagcgtctggatgcttatagtgcggctgccttcatccagggtatccagatgctgtttcatataggacatctgctccacttcaagtgtgagacgtgcaatctcttttttgcgggaatcaatgaaaccggaaaaaccatcggagatatcttccagtgtagacacttcgacaaggcgcttgatctcggcaatgctcacatgtagcttgcggtagagacagattcccatgatgcggtgaatctgctcggtgttatagtagcggtagccgttttccggattgcgcgtgggcgtgacaagtccctccttctcgtagagccggatggcatccgtggagatattaagtaaagcggcaacttcatggatcgtatattgtatcatgacagacctccatagaaataagaagtatttcaatcacaagatatgtctcattgtaccatattctgacaaaaaaattaaaagaaaagaatgaagaaaaaaggattttatggtacaatcatatgtcagagaacagagggcaaaagcaggaggagaggttatgttttccgtatcgg

SEQ ID NO: 11506 - DNA, 13505 bp, Unknown
  gut microbiota DNA sequence
atcaaagaggacgtgtatccggcagtctaccggagaggaaaggaattatatgagacagggggcgtgctggatttcgcgtatgatatttatctggagcatgatctgccggttgccgaggtgcgggcggaagtacgtggaagggaacagagcagctaccgggtgacggtagttgtcgatgaggaatacggcacggtgtcgagcagcaactgtacctgcgaggcattttataattatgaggggatgtgcaaacactgtgtcgcagcgcttcttgcgtacgtcaaccgcagacaggcgaaggacattctggctgcgaagcgcaccggacatgaggtgggagagcagggaagcgccgcggaggagaagcctgccgccccgatgcagacggcgggagcgttcaagacgcttttgaaccagtattcactgcgtgccggcgtaagctatctgattccggagagcgtctatggaaaggtggaactggagccttattttaagatggattacagttatgcgacggtggagtttaagatcggaatggagcagaagtatgtattaaagaatatttctgcctttttacattccatcgagcggaatgaaaaggtgcattacggaaaaaagctggacttttatcacaacagacaggcatttacagaagatgcatggcggatggtagagtttatgcggatgcaggatgacgacaagaagcgccagagcagatttcatgcctattatgcttacaccgggggatatgagcgcacgatggagctcgatgaggtcggcatcgaccgtttttttgacgccatcggggaaatgccattatctgccgaaatcgggtatctgccggaggaggagtatcatgtgcaggaggaagagcgcaagccgaagcttgagatacgcgcaggggcgtccggtgtgttccttgtgctggaggatctgcacgtcataaggggaagcagattttactatttttatgaagacggcatgatctatcgcagcagtgaggcattaaaggcgaagacgggagatttctttgactatatggaacggcagaccggcggggaatgttacattgcggcggacgagctgccgtcgttctgcagggatctgctgccacttttaagggagacgttccgggtgacggcggagggcttcgatgagacgctctacgtcccgaaaaagccggagtttgagctgtatctggacaagcaggacaaccagacggtcggtgcgaagctggtcgctgcctacggggacgacaaatataacgtattacagaagattgagccgggcgaggtgcgggatctcggggaggagatgcgcgtgcgcacgctggtcgagccgtacttcaacgaatacgggctcgggcagacgatattcattctctcgcacaatgaggacatgctctatcagctcatcagcagtggtctgcagcgcctcagcgagtatatgtcgatctacacgacggaggatttccggggaatgaaagtcgtttcttcaccgtcggtttcggtgggcgttgcgctaaagagcgatcttctggaactgcagatccactcggatgagatgtcgcgcgaggagctggcatatcttctgacccggtacgaccggaaaaagaaatacgtccgtctgaaaaacggagattttcttgatgtgcgcgaggatggtctggggctgcttgcggagatcagcgaggatctccgcctgacagaatccggactgaaaaaaggtcatgtgaacgtaccaaaataccgcgcgatgtatctggacgcggcgttaaagagcaatcaggagctttccgtggagaaaaaccgcgagttcaagggcatggtccgcaatatgaagacgatcgaggacagcgattatgaggtgccggattcgctccgcagtatcatgcgcggctaccagaagagcggttttctgtggttaaagacactgcgcgagaacggattcggcggaatccttgcggacgatatgggactgggcaagaccctgcaggtcatcagtctgctcttgtcggaacaggagagtgctaaggcaggagagcgggagtggcaccgttcccttatcgtatgtccggcatcgctcgtctacaactggcagaaagagatcagccgttttgcaccgcagatcaagacgacgctcgtgaccggactcgccacagagcgccaaaggattgtcagacacacgaaggaaggggaagtgctgattacgtcctacgacctgttaaaacgcgacgtggagctgtaccgtgatatggtgtttgcgattcaggtgatcgacgaggcgcagtatatcaagaaccctggaacccaggcggcaaaaggcgtcaagcagattactgcgggtttcaagctggcgctgaccggaacgccgatcgagaaccggctgagcgaactgtggagcatttttgattatctgatgccgggatttttatatacttatcagcggttccgggaggagatcgagatcccgatcgtggtaaacggggatgaaaaccgtatgcagcgcctgcagcgcatgatccggccgtttatcctgcgccgtctgaagggggaagtgctgcgggatcttccggcgaagctggaggagaatgtcttcgcgaagctcgaaggagagcagcttgcgctctatgatgcccatgtgcagcgcatgaaggagagtctggagggcaaatccgagaaggaattccgttccgagaagattcagattctggcggagctgacgagactgcggcagatctgctgtgaccctggactcctgtttgagggctataagggagaatccgcgaaggcgcagatgtgcatggaactgatcgagaatgcggttggcgccgggcacaaggtgttattgttctcgcagtttacgtccatgctggagcgtctggctgcagggcttaagaaggccgggattgactactacatgctgaccggttctgtcggcaaggaaaagcgcatgcagatggtggagagctttaacgaggacgacgtgccggtattctgtatttccttaaaggcaggaggaaccgggctgaacctgacggctgcggatattgtgatccactatgatccgtggtggaacgtggcggtgcagaaccaggcaacggaccgcgcccaccgcatcgggcagaagcatgttgtgacggtctacaagctggtatccgagggaacgatcgaggagaagatcattgcgatacaggagcgcaaaaaggaattggcaaagcaggtgctcgagggggagggaatggactctgtttcctttaccaaggaggaaattctcgagcttctgggataaaaaggttgttttttcgacaaatcagttgacaaaaaatgtgggctgctatatagtaaggaaacagcattattggtgaatgcagattccgtgagggagtagttcgcgcagcgcgtgatttgtcaacagaccggtcggacagcctgacctggcaaatcttaaagaatgagactcatgtatatctttggcttcacatcgcagacggaagcggtgcgcagaggatatacatcagtctctttttttatgtgtgcgccggcggaaaatgcatccgggctgaatgtgtatgtgcgccctgtggcaggggcagaataaaatgtggaggttggtatggctatttttattgaattgctgctcattggagtgggcctttcgatggacgcgtttgcagtgtcgatctgtaaaggccttgcgatgcgcagggtaaacaaaaaacaggcgcttgtgatcggtctgttttttggaggatttcaggcgctgatgccgtttatcggctgggcgctcggcacacagtttgagagctacattaccagtattgatcactggattgcctttgtgctgctggtactcatcggcggcaagatgatcgccgaggcggtgcgtccggaggatgagaatgtggagatcgacaagttggatccgccactcgacttaaaagagatgcttgtgctggcggtggcgaccagtatcgatgcacttgcggtcggaattacattcgcatttttgaattacccgatcggggaggcagtcatgatcatcggtcttaccacgttttgtatctccatcggcggcgtctatgttggcaattttttcggaaaccgctataagaaaaaggcagaacttgctggaggtattatcctggtgctgattggcgtgaagattctgctggagcatctcggatttgtgggataggtgccggattactggaagtcgagataactttgagaaaataattacagtagagaaaacagagaggaatggagattattatgacagaaatgctttgggcagctgtgctgcttgttgttggatttgtgcttctgattaagggagcagatttttttgtggagggaagctcttccgtggcaaaaatgctgaaagtgccttcaatcattataggacttacgatcgtggcgatgggaacaagccttccggaatgtgcggtcagtattacggcatcggtaacgaacaataatgcacttgcagtcagcaatgctattggctctaatatttttaatctgatggtggtctgtggattctgtgccctttttaatccgctctatgtggaaaagagtacgctgaaaaaagagtttccgttttctgtggtctgtgcagtcctgcttttagtctgcggatatctgggaatgcagcttggcagggcagacggaatcatcctttttattgtatttgtcgcttttctggtctggatggtgcgttcggcactgaaagcgcgtgctgctgccggagatgatgagtatgaggtattgccggtgtggaaatgcattgtgtttatcgtcggaggtattgtggcgatcaagttcggtggggattttgttgtaaacggcgcatccacggttgctgcaaagctgggactcagccagaatctgatcggacttacgattgttgcctgtggaaccagcctgccggagcttgtgacctcggtggttgcagcgcgcaaaaatgagctggatatggcgctcggcaatgtgatcggctccaatattttcaatattctgtttgtgctcggtatcgcagcgacgatcagtccgatcacatttatcatggaaaatgtgatcgatattgtgattctggttgcgatgagcgtactggtgtgggcgctcgcctggacgaagaagaagctggaccgcttcgagggcattgtgatgctggcgctctatgtggtctatcttgtgtatatctgcatgcggtagcatgaaaagattttgcagaaaaagatttttcctgctttttcgattgctgtaaaggaaaattggcgttatactggggaaaaggaaacgacagggaggaaagcttcatggaattttttgataagttaagcgagtcactggtaagtgcggggaaggatgtcagccagaaggcgaaggatgtatccgagattgcaaagttaaagctggatatcaagtccaaggaggactatgtgcagaagcagtatgaggagctgggacgctcttattatgagaagcacaaggatgaggaagaatgtgaagaagcagagcagtttttcctgatcagggaagctgtggaggagatcgagcgcatgaaagccgaggttctgcggattcagggttctgcggaatgtccgaagtgcggtgcgaagatgccggaaggtgctgtatattgcagcaactgtggtacgaagatggatgatatgtatgaggaagagtagcagatacgcggcataccttccgtttgtgctggtggcggtgatcggactggtgtaccacgtcgggatgaagccgatggcgggggacgacatttttttccgggatgccacaaaagacacgacgctatgggcgtatctgacgcagcgttatctgacctggacgtcgcgcgtggtgtcggagtgtgtactggtcaatgtcatacagtgcccgtttttgtggagaatcattgattttctgctgtttgcgacgctgcctcttctgctgtccgggcttttcggcggtgggaagacgatgaactggtgcgcggcagcggcggtgctgatttttccgtttcacgacatgggtacggcgggatggattacgacaacagttacacatttctggccgttctggggatttttttatgtggcgtgggtgataaggaagcttgcgcttgcggagaaaattcacccggcagcggcagtgtctgcggttcctgtcgcggttgtgacaggaagtcatgaacagtatgccgtgattatgacgctgctgctcgtgcttagcggcgtgtatctgtggaaagcgcacagaaggccgggaaatgcagtgattttggggattcttgcggtgatcgatgtggtttcactgcttgtaattgcactctgtccgggcaatgccggacgcaatgcggtcagtattgcggatcttccggtttacgcgacgtttggattcggacagaagctgtatctgggacttttgagtattgagcgcgtgtttatcgccaatgcggacattgtattttttctggtggtgctgatctggacatggcttgtctgggagaagacgaaagattaccgcaggacgtttttttcagcgtttccgctgctcattctgttcggacagacagtgttaagaactgcatatccggggctctcggggctgttcgtgatgccgggggagattctggagtggagctggagcgatctgtcgacgtggattcccatggtgtatctggcagtgacggtggcggcgatggtctatgcgctgtaccagctgtttggcgacgatctgtttgctttcatcagcgtgctgcttctggtggggtgcggctttggtgccgggatggtgctgggctttatggcgacgatctacgtctcgggtgagcgcgtgtatgcgccgctgtacgggattcttctggcggtcacactgtctggcatctgccggcagcgcagcgtgtggaaggagccggcggctgtggcggtatctggacggaaagcagagccggcggcggatgcgggcgtgactgcggcggtttccaaagcggcagtgccgtccgcagtgttcctgacggcgctgacagttgtctgttgtacggtgaacgtattgtttatcgttttgtcattgtaagactggaagtataaaagatagaatatgagttccatacagggagcagattctgcagggcagaatctgctccctgtttttttgacacacagtcagagagaggatataatcattattaaaaataaatccagttaaaggtgaaatgaaggttattgaaggtataggggtaaacggagagatggagttgaataaggaaaagaaaaatataattggcattacacaaagcggtcttatattggtattggtagttcttattgtctttatgatggtacagatcaacaggttacaggggactgcacgggtaataaattatgcaggtctggtacgtggagccacacagcgtgaagtaaagttagaaattacaggaaaccagaatgaagaattagttcagtatctggatgatattctgagcggattaaaataccaggatggacattatgatctggtaaagcttcatgataaagaatatcaggataaattacaggttcagagtgactactgggaaaaattaaaaatagaaattgaagcggtgagaagcgggggatatgaaaatacagatattgtaaatatgagtgaaacttattttaagatgtcagatgaaacagtatctgcagcggaaaattattcagaaaagattgcaagaaagattcgtaccatagagattttgtcagcacttgatatgttgtgcctggtaatattggttattatgcagacgctgatggcaatgaagatggcagtgcaaaacaagctgttagaacagagggcatatacagacagccatacaggattacccaataaaagtgcatgtgagaaaatacttaataataaagagatcattactgaaccgacagcatgcataatgtttgatctgaataatttgaaaacggtgaatgacacaatgggacattcggcaggagaccagctaataatgaattttgcccggcttttacgcaatgtgattccggaagaagattttgttggaaggtatggcggggatgaattcatggcagttatatatcataccagtaaagcggaggttgaggatattttaaaatacttacgcagggaaaaagatagattaaatggcaatgaaaatcctatgtcaatcgattatgcatgcggatgggcgttatccgaagactataaggaatgtacaatgcagatattattggataaggccgattcttatatgtatgataataaacaattatgcaagcagcataccgtttaggtgttttacggagcgtcggcaggcggatcggaactgtgttggggcggcttgaaaagggaaagatttttctacgttctatttgacagtgcccatatccggggaaaccatgctgccatcggtgtctcactctgcggcctgccggaaagtccgctgcgggaaattaccctggaagacgtatcgatcgctgcagaagacccgctgcgggaagagtatgtggaaaagtaaaatactttttctctggggcgtctgtgcttacgaatgcttgactttccgcaggtttggtgctaatcttaaaaaagtcgatacacacaaacacgaggaaaaagagagtacatctgcagatactttacagagagatttccagctgcgcggttgcagcttgctgcgaggaaatgaggaagggcggatggaagatggctttggagtggcaggactgaacactggacgttactaaggacagcgataagttctgacgggaccgcctgttacagcgggggatattggttgcgatatccgcagaggcacagagtgcaggctctgtgtgaatagaagtggtaccacgggagctatcccgtcttctggtggctatatcagccccgaagacgggatttttttgttttattaggaaggagcagacaaaatgagtgacaagggaaaattttatatgacgaccgcgattgcctacacatccggcaagccgcatatcggaaatacgtatgagatcgtgctcgcagatgcgatcgcgcgttataagagactggagggctacgatgtttatttccagaccggaacagacgagcatggccagaagatccaggagaaggcagaaaaagcaggcattacgccaaaagaatatgtagacaatgtggcaggcgaggtaaagcgcatctgggatctgatgaacacgtcctacgataactttgtccgcacgaccgatgcagaccatgagaaacaggtgcagaagatttttaaaaagctgtacgatcagggagatatctacaagggatcttacgagggactttactgtacgccgtgtgagtccttctggacagagtcccagctggtggacggcaagtgtccggactgcgggagagaggtaaagccggcgaaggaggaggcatacttcttcaagatgagcaaatatgcggatcgtctgatcgagcatattaacacccatccggagttcattcagccggtatccagaaaaaatgagatgatgaacaatttcctgcttccgggattgcaggatctgtgtgtttccagaacgtcattttcctggggaattccggtggactttgacccgaagcatgtggtttatgtatggctggacgcgctgaccaactatatcacgaagatcggttatgatgcggacggcaattcttccgatttatttaaaaagaactggccggcagatctgcatctgatcggcaaggacatcatccgtttccatacgatctactggccgattttcctgatggcgctggatctcccgctgccgaagcaggtattcggacatccgtggctcttacagggcggagacaagatgagcaaatccaagggaaatgtgatctatgcggacgatatggtggatctgttcggcgtggatgcaacccgttactttgtactgcatgagatgccgtttgagaacgacggtgtgattacctgggaactggtggtggagcgctttaattccgatcttgccaacatccttggaaatctcgtcaaccgtacggtttccatgagcaacaagtattttagcggtgtggtaagaagcacaggcgtgacagaggaagtggacgaagacttaaaggcggttgtgatcggagccagagacagagtggcacagaagatgaaggatctgcgtgtggcagatgccatttctgaagtattcggcgtgttccgccgctgcaataaatatatcgatgagacggcaccgtgggtacttgcgaaggacgaggcaaaatccgaccgtctggcagaggtgctttataatctggcagagtcaattacggtaggcgcatccctgctgtacagctttctgccggagaccgcagagaagattgtggcacagcttcatacacaactccgcggttttgaggaactgaatcagtttggcctgtatgagaacggcacgaaagtgacagagacgccggagatcttattcgcacgtctggatgcaaaggatgtgatgccgaaggtagaagcgatccgcgaggcacagaagaaggagtttgaggcggagcagagagcgcttggcgaggagacttctgcagaagaaaaagtagaagacgtcatcgacatcgaggcgaaggaagaaatcacatatgatgattttatgaagcttcagttccaggtgggagagattatttcctgtgaggctgtggagaaatcaaagaagcttctgtgctcccaggtaagagtcggcagcgaggtgaagcagatcgtttccggtatccgcaagtattacacgccggaagagatggtcggtaaaaaagtgatggtactggtaaacttaaagcctgcgaagcttgcgggagttctctcagaggggatgcttttatgcgctgaggatgcggaaggcaatctggcgctgatgacgccggagaaaccgatgccggcaggtgctgaaatatgttaaaaggagacaccggagcaaaacggacatggttttatgaaaacggtgcatttgtggcggcggcgcttgccgccgtcctttggcatgtggtattgtccacgaatgtcggcgatgatatggtctattttaaaacccttctggacggtaacagttcactcggcgagatcctggcacatcgctatgagacatggtcatcgcgcatggtgatcgaggcggtgttaattccactggtgcactgtccgctgctctggaaaatccttgatattgtcatctttacgtccctcccggtgctgctctgcggactgctgggtgtgaccgggcgcggacgctggtttgtaaccggactggtgctgctctatccgtttgcggatatggcatccgccggatggattgcgacgacgaccaattatctctggccgctctggggcgttctggtgatcggcatggtgttaaagcagcttcgctgcggcagaaaagtgccggtgtgggaggcggcagcagcgcttctggcgtgtgcttatgcgggcagccaggaacaggctgcggtgctgctgcttctgctgcttggtatggaagtgctgcattatatctcagaaaatcgtatgaaacagccgcttctctatgcattgtgcggcatagatattatttccctcatatatattttcagttgtccgggaaatgcaatccggagcgcgcaggagatggcggggagaatgccggagttcgctgattttacatttgcagagaagctctacatgggacttgccaatgtggaacggatctttatcgcggagcttgatccggtctattgcgttgtggcagcagtgcttgtgctgcttgtgtatcgtaagacaggcgattaccgtaagacgcttttggcggggattccggcgttgctgctgtttggacaggcgatggtgcgtgtcagccacccatccttgaaaaaggtgttcgtgcgaccggaacagacgacacactgggactggcatgctctggtaacctatatgccgctggtatttctggtactgtctgtttgggggattctatacgccctgtggcagctggcggacggcgcgtggaagcattacctgtggacggcgtttttactggcaggcggttttgccatgggggtggtcatgggattttcaccgacaatttacgcatcggcaaaccggccgtacctctatctgtattttgtgctgatctatgtgtgcgcggatgccgtgtggaacatgggcggcatgaaggctgtctggaagacaggcagtgcagatgctgcgcagagcggaagcggtgcacacagtaaggggaaaatgccggtgccggaaaaactgatgtttactgtactcgggcttctggtgctggcaaacattctggatgtgacccggatgtgttggctgcttggaaggcttctgtgaccgtttataacagaaatccgctgtttcatacaggaaacctaacgaaaaattcaatttcggccgatgtataccatatgaacggattcagtcagggatacattcagggaggaatgtggatatgggaatcagcatcaatgcaccgggaagtgtgaacagtcaggcatcgatgacaggcacactttctatccgaaaaagcacaaatacgtttgagcagatggcgggggtcagtagttcagggggaacctcgaaaaaacagctcaattataatcacagagatatttccggacagctgctccgagcgaagaagccgcagagtgcatccgcggcgctgacccgtgcaaagagcaaggtgtctatgcttcagcgtgcggcggcatccggacagtatgattccagggaagtggcggatgcgcttgcgcatgcgagacggatggtgcgctgtgcgcagctgaaagtgcgcaatctgcgcgaggaagagcgcgagcagcagtctgcgcagaaggaaaacagtggtaagagccagcagaaggaacatgaagtgaagcgccgtgtggcacagaaagagcgtcaactcaagcagaaggtagcgattgagaatacacaggaagtgcttcggcagaagaaaaagaagaacgagatggcgcagaagcagcagagacaccgctcgcaggagcggggtaagattgcggaggcggatttcaaatatatcaagtcacagctcgaggatggcaaaggctttggcggcggcagttcttattgtgaggacagtggatttacactggatatcagtgatgccgcaatgtcgatggtggaacttgagatgatggcacagaatcagatcgaagcggaggcagaggcggaagtggaagcggagatgtcgcttaccgacggaggaactcttgcagttacgacagcgggagccgtgacggcgggcagcggagcgggaactgcacctgacgcagcgccagccgcagccggcgtatctgtggatgtgtcagtgtaacaaaacggcgagggacactgccccatgaagcaggcggtgtcctttgaaggctaagtcatattataagaaaatcacacgtttcgatttcaggtagaatgcacaggaaatatttttttcaataaatctttcctatgcagttctacctgaa

SEQ ID NO: 11507 - DNA, 7345 bp, Unknown
  gut microbiota DNA sequence
gaatgtgttttggataatatgacttagcacttcaaaggacagcgttgcctgcctatgtggcagtgctcctgcgctgttttgcagcgacagcggtcagggcaaacatggcggcggcaaagaggagctggatgccgatacatttccagtaaaagcccagatcgaagacttcctttccgaatcccgccagcatattgttggcgcggatgtaccagtaggcgggaaggaaacgtcctacggcaagtacggaaccggagagcatggactgtgggacaaagacaccgcagaggaaggacatggacagaccgacgatatttgccagcatatttaatacattgtcatccggcgagaacgtcgagatgagcagggagagtgcagccgtaaaaagcagaaaagcgaggctgtttaagattgcatagccgacatagggctgtagcatggctttccagtagaatacgagaccaagcagcagaaagagcagccagatgccgagactgtacaggagacagccggatgccagggcaagagtacgtgttcttccgggaagagcggagcacgccgtccgggctttcatgtcgcggctgtttaaggtaaccagaatcggagccatgccggcgaacaggattgccagaaagatatacggaaaatactggaagaaataaaaaaccttgctgttggtgtcggcgtcggacatctgaaaagatgtgacggagactttgggaaggtcggaaatggtatgatccgtatggtcgatggcctcggcaatggtgtcaccgcctgccagatagagctgtagtgcctgcacatactgcgtaatctggttgtccacgtactggctgctgctgcttcccggaattgtcagggaggagacaaggtctttggtctcgccggcgagcacccggtcttcaaatccttccgggatgaccagggcatagttgagtgtgcggtagtagatcgcatctaacagtgcggtgtcatctcccggctccggtgttgtgacctggtggatggatgcgagataatcgcacagagcgcggcttgcatccgtgttgtcttcatctgtgatggcgatagagcgctggctggctttgaagttctcgttgatggaatcctgcgagagtgtcgacagcagcagagtgatcatcgcgtagacgccaaaatagatcaatgcggcatttcgccgtttttttgcgattgcgaaaaatgctttaaagactggcatattttttcctccttaccagtgcaagaccgccgagacagaaaagtgccgagagtaacaggagtcctgcgatatttgtaaaaaatcgtgtgtaggatgggtacacgacgagtgaatacagcgcgtcagagatgagagctgcaggattgatgcggttgagaagcgggcagaaatcttccacaagtgcacgcatatttccgatcatcagaccacttaaaaagcagcagatcataattgcagccatcaggaaaccaaacttggtctctttggaaaactgcccgatacaaccgaccagaaatcccagactcagcccggcaagacaaccgcagagacaagtcagtaccacaccgcaaagatgtgccccaaaatcaaccttaagaaccagcgtcagataggcgattgcgatcaataaggaagaaaattcaaaaatcaaagctccggtcagatcgccgagggcggcaagcagccggggaaccggcgagacattgcgtctggcacccagatccgacagatttgcctgattggagatggcaagcgtgttgccgatcatggcggcatagaggcaggtcatggcaatcagattgaaaaagtaagtaagggattcatccacggagccggcaccaagggattcgtgccggatatagctgacttccgtagaaaccgcatcaagcagtgccggaagcttcgcgggatctttcattgcggcctgggcgatggcactgtattctatgttgaaacgatccacaagcacacttaaaatactctggtacaggggagcggaagccatctctgcggagagtgtcagcgataaaggatatgtggaaacatctttgatagatgcggcgtttctgtaatcggaaacggttggcaggtcggcggtaatgatgccgtagacttcttttgcctttagcagttccttggcatctgcagcggaagcataggtaacttcaagaaactgatcctccccgggttcggacagggaatcaaacatggagcgcagctcggcggattcctcttccatcacaaccgcaaccgggatggcggaaaaactttcgtcacttcccagaccgccgaatgcaaaatggaacatcgttccaagcagcaacgggaaagcgacacaccagaatacctgacctttatcccgcagcagattaagcagtgtatatttcatcgtatgaaaaaacatggtggtacctcctaatcacgcagttcttttccggtaatttccagaaagacgtcatttaaggtcggaagttcggaatagactcttccgaaagacacattttgttcctgcagatagttcagaatgtgcggcagattgtgggaaccgccgctgcacagcacttttaagcagtgatgttcaaaggtcacctcatagacgtgctttatgtcacggatcgctgcaatctgcgcaggaagaagatccagaatatcaatcgagatgatctcgctctttttgatcattcgttttaattcttccgtggttccaatggcaagatttttgcctttgtccataatggcgatccgggtacagatctgctccacctcctccatatagtgggaggtataaatgatcgtggcgccattgcggtttaactcctggattccctccagaattttattgcggctctgtgggtcaaccgccacagtcggctcgtcgagaatgatgagctttggcttgtgggcaattccgcacgcgatattcagacggcgcagcagaccaccggaaagctttttcggataaaatttgcggaaatcgttgagcccgacaaaatcgatggcctcttccacatactggcgccggagcgctttgtcgcggacatacagaccgcagaagtagtcaatattttcatagacggtcaattcctgaaagacagcgacattttgcatgacaacgccaatctgacgtttcagatcgtagctgtccggccgcatttcccggccgaagacccggacggttcccttgtcaaaggcaagcagtgcaaggatgcagttgatggttgtcgtctttccggagccgtttggaccgagcagaccgaagatctcaccttcctcgatcgtgagattaaagtgatcgagggcgacgagctcctgatagcgttttaccagattttctatttctacaacaggtactgacataacaaatcctcctcgtttgatggtaattacattatagcgggtggcgcccggcgctgccagtgagcagcgtcagatgtttgatgtgacaaatgtcatgaatctcttatttttcaaaaaagatgtggcggctgtcttataatgatgatatggttatcataacgtgtgcgggaaagtggaagatatcccggaaatatggcggcatatgtggacagggagagggtagaatgaagcggattgtggataaaggactgttgcttgccggcggtctgcttatggcgggacagtcgggaaggcttgcagcgccggtcatagcgttgctgttggcgatgactgcggcggcatatggcagctgtgtggacaacagacgatggcattgtgtgtgccttgcggggatgtttgcggtctgctttatcctgccggaactctgttttttcgtgccggttcttctgtatgactgtgcggaaaaaaaggagatgcggctctggttcttaagtgttccggggctcgcttttttctatcgggaacagattatccggcagtcctttttgtgggcggcggacggtatgctgatcgtggctgcgatattgctggcatgcagaacgggcagaattctgtatctggaacaagagatgatccgtcttcgggataccagcacggaattgaatctggtgctccaggaaaagaataagaacctgatggaaaaacaggattatgagatctaccttgcgacactgcgggagcgcaatcgcattgcaagagagattcatgataatgtggggcatatgctttcaagaagtattctgcagatgggggcactgattacgattcataaggaggagccgctgcacggacagctcgccggggtgggggagacgttaaatcaggcgatgaacagtatccgtgagagcgtgcacgatctgcacgatgagtccattgatctgcggcagtccattgcggaggcgacccgtgagatgaaggagcactatcagctcacggttgattacgatatgtctccggagattccacgcaatgtaaagtactgctttatcacagcggtaaaagaagccatgtcgaatattgcgaaacactccgatgcggataagatctccgtgattttgcgggagcacccggcgttctatcagatgaccgttgaggacaacggaacggtgggacgaaagggacagagcggaccattgtgggaggaagaggtcgtccgtatggacggaaaggaagggattggtctttccaatatgaaggagcgcgtgcaggcactgggcggaaccttccggattcatacggaaaagggatttgtgatctttatttcgattcccaagagggataaaatgtagatacggtaatgaaggctgggagagagaaaaatgagagttctggtggttgatgatgataagctggtggcagtatccctaaaaacgattctggaagctgacggggagattacggttgtgggtcttggagaggcgggagatgacgccatccggctctatcgggagcagcatcctgatattctgctgatggatatccgcatgcagggaatgtccggattggatgcagctgaatgcatcttaaaagaagatcaagcggcaaaaattttgtttttgacaaccttttccgatgacgaatacattgtaaaggcactgaatatgggagcgaaggggtatctgctgaaacaggattttgagtcgatcgttccggcactcaaggctgtctacggcgggcagagtgtattcggcggacagattatgggaaagattccggtgctgctggcaggaaaaggcagcttttcctatcatgattacgacatcagtgagaaggagcaggccattattgaactggtggcagaaggcttaagcaaccgggagattgcagaaaaattgtatttgagcgagggtacggtgcgtaattatatcagcaccatactggataaattaaagttacgagaccgcacacagctggcagtcttttattataagaactgcggctgagccggcggtacagcaatcgcacagaagctgtgccgacagacagcgacatgaaagagacggcaatgcagcaacagggaagatgaggaaaacaatgatatttgagacacatgcacattatgatgatgaagtatttaatgaggatagagagcaattattagctgggctcccggaaaagggaatcgggagggtgattaacgtcggtgcgtccattgagacgacgaggacgacgctcgcgttggcggaggcgtatgattacatctatgccgccgtgggtgtgcatccgagcgatattgacgggctgaacgaggagacatattcctggctcaaggagcagacggcacatccgaagacggtagcggtgggagagatcggtctggattattactgggacaaggagccggaagtacaggcagcgcagcgagaatggttcgtgcgccagctgacactcgcaggggaaacagatctgccggtaattatccactcgcgtgacgcggcggaggataccatgcagatcttaaaagagaccggaagattccgggaacatcccggcgtcattcactgttactcgtactcgccggagcaggcaaaagagtacgtgaagatggggtactgcatcggtgtgggcggtgtggttacctttaaaaatgcaaagaaactcaggcagacggtggagcaggtctctctggaacacattctgctggagacggactgcccgtatatggcgcccgagccgcaccggggaacccgcaacgattcctccaacctctcttatgtggctgccaggattgcggagatcaaaggcgtctctgtgcaggaggtggagcagacgacctgggaaaatgcctgccgtgtattcggcgtccggtaggtgtctgcccgaatcagcagaagcgggaatattccggggtgtctgcccaatagcgcttcgggattaactgcatctgcaagcttggatttttgcgggattctatggcaatgtgatcaaaaaaggtcagccagagctgccggaaggcttcctcgtcggaggaataccggctgactttctccagatccagatctgcggcatctgtgagaatgtagttggaaagcgctttgtgcaccgcgacagactgatgtgtggcgtcatagatcataaagttctcggagggcagacggtcggtgaaatgctctgccagatatggaaggacgttgtctttcggatggattgtggcaaagagaacgccgttctcaagctcggagaagcgcaggaattcgagatgatggcaggcttcgcggttggtcgcccggcagagctcaaaaatccggtagacacacggttcgcctaaggaaagaagcactttctgaccgtctccgcttgcgagtgcgaggaggatggtctcatagatggcgtctgccttgtccatcttcctgccggaggatggctcgccggacattgcagcctgatagatcgactcatagaactgcatgccgaaacgggacgtgatggtgcggatcaccttgccggtcttatccgcggaaggagccacgtgaatatattcggaaaaaagctcgtaattctccggttcgccggtggcaagccggatattgcggtgaccgagccggcttgcgcaggcgtcatagacaccggtaaagataccttcaagactgtcctcacagataaatacatacatgtaaaatacctcttttctatgtgtaatcagggcggtgggctcacagggcaagcccggtgtcaaacagcgacaactgctgataaccggtgttgcggagctcctttggaacctgcgtgtggtctgccatgagatgagagcagatatagtcctcgtcgagcttcgtgcggtacatcatccggccggaacaggtgatgaagtacagggcgcgctttagcacaacgccgatctttttcagatcgtcataggtgagcgcggtatcccgtctggcggcgacgatccgctgggcggacttgtatccgattccgggtacgcgaaga

SEQ ID NO: 11508 - DNA, 7885 bp, Unknown
  gut microbiota DNA sequence
cgcatatgcagggatgccgaatgcgaatggaatgaatccgggaggcgcatatgcagtggtgccgaatccgaatggaatgaatatgggaatgccgcagcagaaacagaaaggcgacggcagaggatatggcattgcatcgctcatacttggaatcgtgtctgtgctgctgttctgcacctgcatcaactgggtgacgggaattttggcgattattttcggaatcattcagatcacgaaaaataaggagcatggtcttgcaatcggtggaatcatcacagcggcgatctcaatggtgctttccgtcgttttatatcttgccatgtggttcggaatgacaaatgcggggattacatacgaagatctcctatacgatcagtatgatgacagctatgacagcgatggaagtgatgcatggtacgacggcgatggaaacggcagttatgatggcggcggaaacgacggatggtatgacggtgacggaaacgacggatggtatgacggtgacggaaacgacggatggtatgacggtgatggaaacgacggatggtatgacggtgatggcagtggcggctatgattactataatgatccctacgattatttcagagattactatgacgttcaggagccgggcggcaatcagtttatgtgagcgttttcggcaatgaagtgatagcatcgcgcttttcggaatatactctaagtgacagagcataaaggtcagagtagaagtgcggatagcaggaagctggttttataataaaaagaaaagaggcagactgatctgggtgacagcaggaatggcatgtatggcggcggggtgttgtgcagctttttacatgcaggtattcctgcgtgcgccaacagaggtcagggaggcgatggcgatggatgaatcggtaaaaaaagtggcaattacattcgacgacggacctaatccggactatacggagatgcttctttcggggctgaaggaacgtggtgtgaacgccacgttttttctgttgggaaaagaagtggagcagtatccggagatcgtgaagaaaattcatgagggcggacatctgatcgggacacactcctatgagcatgtcaatctgagcaatctgaccgatgcggcagcgatcgagcaggtggataagacgaacgcggcgattcatgaaattatcggcgagttcccggagtatatccgtccgccgttcgggtgctggaaaccgaatctggattatgagacgacaatgattgaggtgctctgggatgtcgatccgaaagactgggcgacgagcaactcctcggtcattgcgcagcgcgtgttgggggatgtcgaggagaatgatattattctgcttcatgatgcgtcggagtcgtccgtgctggccgcgtttaagatcattgatgaattgaaggcgcaggggtatacatttgtgacagtggaagagattctgctggagtgagacgcggtgggacttgcaaccctccgatcaatttgttacagtatagaaaatgatttccggagaaaatcgtgcacaacagagaaaatgcatatttttacttgtaaaaagggcatatatcgtgtattgtaatagaagtgatgcaattttgacgttgcgatctgtcatatttttggaaaaagcatgattaaaaccgtgaatcattaaaaaaatgcaagttttacatgaagaaaattcaaaacggtcagatgtgcgctgtgcacggacatacgccggaaggcagtgaccgggaatttttatacatcagaaagcaggttttgacatggacttatttgaatatatgagagaacagcaaaaggaaacggaggcgccgctcgcatccagacttcgccccacgacgctggatgagatggtagggcagcagcatattataggaaaagataagctgctgtaccgtgcaatcaaagcggataagctaagttccatcatactgtacggtccgccgggaaccggtaagacgacgcttgcaaaagtgatcgcgcatacgacgagcgcagagtttttacagatcaatgcgacttctgccggcaagaaggacatggaggaagtgatcgcgcaggcgaagaacaaccagggaatgtacggcaggaagacgatactctttatcgatgagattcatcgcttcaataaggggcagcaggattatctgcttccgttcgtggaggacggcacgatcattctgatcggtgcaacgacagagaatccgtattttgaggtcaacggagctttgttgtccagatccatcatttttgaactgaagagtctgtcgaaggaggatatccggacattgattctccgcgcggtaaccgactgggaaaagggactgggcgcttacgatgccgtgattgatgacgatgcgctggaatttctggcggatgttgcgaacggggatgcccgcgcggcactcacggcgatcgaactcggcgtgctgacgacggagcggagtgcagacgggaagattcacatcacgcttgcggttgccagtgaatgtatccagaagcgcgtggtcaaatacgacaagtccggagataaccattacgacacgatctccgcttttatcaaaagtatgcggggttccgatccggatgcggcagtctactatctcgcgcggatgctgtatgcgggagaggacatcaagtttatagcaaggcgtatcatgatctgtgcggcggaggacgtcagcaatgcagatccgatggcgcttgtggtcgccacatcggcggcgcaggcggtggagcgcatcggtatgccggaggctcagatcattttagcgcaggcggtgacctatgtggcgagcgcaccgaagagcaattccgcggtctgtgccatcagcgatgccatggcggcggtgcgggataccatgacggcaccgattccggtgcacctgcaggatgcacactataagtcatcacagaagctgggacacggcgtcggttacaaatacgcgcatgattatccgaatcattatgtgaagcagcagtatctgccggacggtctgaccgaccgcacgttttatcatccgtcggagaatggctatgagaaaacaatccgggaatattttgaaaaaataaaagggatgcagccttagaaataaggttcatataaaatgtatatacagatagcaggaggaaggaacaatgcagtcatatcaggagatgagcaaagaggaactgttaaaagagaaggaacatctggaagcagaatacaagaagttccagcagcggggattgaagcttgacatgtccagaggaaagccatcccaggaacagctggacctgtccatgggcatgatggatgttctctcgtcctattccgatctcgcatgcgaggatggaacggactgccgcaactacggtgtactggacggaatccaggaggcgaaagtgctgattggcgatatgattgagtgcaatccggaaaatatcattatctacggcaattccagcttaaatatcatgtacgatacgatttcacgctccatgacacacggtgtgatgggaaatacgccgtggtgcaagcttgacaaggtgaagttcttatgtccggttccgggctatgacagacattttgccatcacagaatattttggtattgagatgatcaatgttccgatgcttccgacaggaccggatatggatatggtggaggctctcgtcagcaaggatgaggcgatcaagggaatctggtgtgtgccgaaatactccaatccgcagggaattacctactcggatgagacggtacgccgttttgccagattaaaaccagcggcaaaagacttccgtatttactgggataacgcttactgtgtacatcatttatatgatatggatcaggatcatctgatcgagattctggcagagtgtaagcgcgctggcaatccggatatggtatacaagttctgctcgaccagcaagatcagcttcccgggttccggtctggctgcgattgcaacttctgcgaacaatctggaggatattaagaagcagttaaagatccagacgatcggtcatgataaggtgaatcagcttcgccatgtgcgcttctttaaagatgtgcacggtatcacggagcacatgagaaagcatgcagcttctctcagaccgaagtttgagatgattctggacacattcgacaaggagttaaaggatctcggcgtcggaagctggtacagcccgaaggggggatattttatcacctatgagacgctggagggatgcgcgaagagcgtggtagataaggcgaaaaaggcaggagttgtgatgacaccggcaggagcaccgttcccgtacggcaaggacccgaaagattccgtcatccgtatatctccgtcgtatccgtcgctggaggatcttacaacggcaacacagatttttgtagtctgcgtaaagctggcaagcattgagaagattctgggggaacagcaggcgtaagcgcgtgagcggggaatgatatgaaaaaaataattggaatagtgacaccgattcttctgctgattttaccgtatctgctttttgtggttctgtctgtgggcatgggaagaccggacagagattcgtctggagcctatatcatggcgggcgattccagattgcagatgacgcagacgacaatctgcattgtctacacggtggtcgtgctcttaaatgtcgtctgggtcatctatcagacggcggcaggaaccggcgcgcaggcgctgcttctgtgggatatgctgatgaagctgtgctatattccgtattatctgctggcggcgtttatggtgctggcgggatttgcgacgtttatgtttggcggagtcgcgattatcggcgtgatgtggattgcggatgtcctgtttttgataccgccgtccatctacggactgtgcggctgcatccgggcgtgcagtgaaaaaaagctgtccgtgggggcagcagttgccctgtcgatactgcactttatctttgtgctggacgttgtggcggcggtcgtcggattctgtaccgtacacggcagacacaaacgtcagaaacagatggaggctgccagacagcaacagatgccataccgggattgaacaagtgaatgcaaaacataaccgcgcgaaccgaaactcgttatcatctgctattgaaaacagggcagatgataactcagacatcggcttcgcgcggttatgttttgttcagtggtgccaacaaggggcacgcacaaaagtcctaaaattgtctgtggtttgcggacacaccacgtggaatgttccaaacttggaaaaacacagataatcaaggatgttcgacgcggcatggttagaaataccggattttgcgattagaattgccgccccggttgcatttggaacgtcatacatctctattacttataagaaaacgtatcctgttataaattcggatcatgcctgtgtctgggcagcctccgtctcatcggttccgttcttccacttgttgaacttctccacaacggcatcataggtgcgctgtgagatgtccggaagatcctgtccccaggacttggttgcttccttgaagcccttcttgaaagcgtcaagaagaagatcagctttttccggatcgttgccggagagtgcttttgcaaaatcaagaatacggtctgaagtctggtcgacgccccagtaaccgtcatcagcgatatctgcctgcgcctgtgccctggtggcttcatctacggtaaaatcaccttttgcaaggaagctccacatagaatctgcggtaccgatggcaacaccctgcttagtcatcatcttttctacaagactgcgaagctgggaggtacgctgctcggcatctgcctttaacttgttgacaagtgcgtaatcggtcttctttgtaaccgtgccggatgtctgaccggaactcttctcatatacgacaccggtatcggtctttgtgctgctctcactctttttctctgtatggtccgtctttgctgcggtataagtagaagcctgctgtgctgccactgagtttgtaatactgttaattgccataattcattcctccattcccttggatcggtttaaaataattgacaggaggcatccatgcctgctctttgtctcatcttctatatcggcaggaaacattgcccggtttagatttttgagaaattttattgcgtaaaaagaaggagagataattgaccttttttacaagtcatggtaagattcagtctgtatacaaaatacattaaaaaaacatgggggcattatgaaagagatttcggtaaaagcactggcaaaagtaaatctcggacttgatgtggtacggaagagaccggacgggtaccatgaggtgcggatgatcatgcagacgattcatctgtttgaccggctggagattacccgcaatcagtcgggtaggattacgatgtcgaccaaccttgcgtttctgccgacaaatgagaacaatctggtatacaaggcggcagcacttctcaaagaggaatttgacattggggacggtattgatgtaaagctgcataagcacattccggtggcagccggcatggcaggcggaagcacggacgctgcggccgtattatatggaatgaaccgcatttttgatctggggctttctaaggaggatctgatgacgcgcggtgtgaagctcggcgcggatgttccctactgcattatgcgcggaacggcgctcgcggaggggatcggtgaaaaattatcggcgcttcctccgatggtcaaatgtccggtgctgattgctaagccgcagatcggggtttccacaaaatttgtctatgagaatctgaagctggatgcggataccgtgcatccggatattgatgggctgatcggtgcgatccgggcgaagaatctggagcagatcgtaggacacatgggaaatgtgctggagacagttacgattcccaattatccggtcattgcagagatcaaggagcacatgatggagcacggtgcagtccatgcaatgatgagcggaagcggtccaacggtctttggcctgtttgccaacggggatacagccgtggctgcatacgaggcaatgcgtgaatcaaatcttgcaaaacaggtttacctgacaagcatatacaacaatgcgcggtgaggagaagacgggcagaaacagataacaaagcagaaggaggtacttatgacagaggatctgacattgaacatgaatgcataccttccgcttcgggatgtggtgtttaacacactgcgggaagcgatcttaaaaggagagcttaagccgggggagcgtcttatggagctgcagctggcagcaaagcttggggtgagccgcacgccgatccgtgaggcgatccgtatgctcgagcaggagggactggcggtcacgattccaagaaaaggtgcggaagttgcgcggatgacggaaaaagacatggaggatgtcttgcagatccgggatgcactcgacgaactggcggcatcgatcgcctgtgaacagatttctgaggaggagcttgctgagctcagacataccatgcatgagttcgaggaatccacaaagacgggggacgtcaagcggattgcggaggcggatgtgcggtttcatgacatcatctatcatgcgacgcgcaacgtcaagctggagaacatgctcaacaatctgcgggagcagatgtaccgctaccgcgtggaatatttaaaggatgaaaagaattttccgattctgatccgggagcacagccagatcgtggaggggcttaccgcaaaggataagaccatgctgacggcggcgatgcacaagcatgtgatgaaccaggcgacagcggtgaaggaaatgatccgggagcaggaaaagtgaataaatttcccgaaatggaacaaactaacagggacaggcggatgcctgccc

SEQ ID NO: 11509 - DNA, 3037 bp, Unknown
  gut microbiota DNA sequence
caaatgtgccattattcttatcggtcatatgaataaggcatctggtaataaggcggcttataggggcatgggttctattgatttctttgcagtagcaaggagcgtgttgttagtcggcagagtggaaggagaacctaatatcagagcagttgttcagataaaaaataatttggcacagttcggacatcccaaggcatttgaactgatggaacgtggttttaagtggatgggagattatgagattacagcggatgaagtgcttggtggtattgccccaaaagcaaataaattggagcaggcaaagcggatgcttcgggaactggcagagacttctaatgcggtacagagtaatgagatttttgatatggctgaggaacaggggatttctaaaagaacattggaaaatgccaaaaaggagctgtgtatcagggcaagaaaaatcaatgactcatggtattgggaactggataagataaagcagatttaagggaagaccgcaacaatgcagactatataaaatttgcggtgacaaaccttgcaaggttgcaaaatttatagaccttgcgttgttgcggtcttgatggaaaggatggattgatagattgaaaaatgtgcagatttctgaggaactattttttgcactccttaaatatcatttattgaaaatggatgatgttttaccggagataaagaaaggtttggaagaaaaattggaagctatggtcaggcgggatttatatacaaaatacaagactgctccaaccgaggaagaaagagaaaaagcaaggcaggaatatctgaaaaaggtgggaatgcaccggagtttccgctggtaaacttttccttcagtgtgtaggactggagcgtgacacgctcctgtaaatacgattaaagagaaagcagtgtgagggaacaaatggcaggaaccggacttctctcacaagccctcggcgtttgagagcgaaatacacccatcgcacaaatcttcgatttgtactctgtgtatttcgcccttgcagggggctgacattcgcaatccgctatgctacttgctcatgaacgcagctgcttcgcagtacagcgaaagagcatcgctgtataagcatttacaatgcttacctgcgttcaaatgctgtcgcatttgtgcccatgtcggatacggcaatgagttcgtaaacggacacctatgtgtccactcacaatggcataatcaccatcatttttcaaagaaagggggcaatatctattgtaagaaattcatttatacagatgtcaaaattgacaaatttaaaaggcaggattaactatatctccagtcacgcaaggcaggaaaatttgtacgcagtttatgaaacaactgaccgtaagttttggacggaacttgccaagtgtaatcaggaggagtttaagaaaagcggaacggaaggcaagtgcattgaagcaagggaactgatcattgcactgccggaaagctttgtggattatgagccggacaggctgctgaaactttttacggaacacttcaaacaaaattacggtgtggagtgtatcgctgctttgcaccataacaaacgcaagaccaattatcatatccatcttatcttttcggagcgaaagttgcttgatgagccggtggagaagattgccacaaggaatatgttttatgatgaaaacggaaagcatgtacgaaccaaaaaagagatactggatcaagtaggacagcttcggtgtggctgtaaaatcattcccaagggcgaggtatatgagcggaacgtatttaccataaaagacagccggtttaagagcgacgttttccttgatgaagtaaaacgctcctatacagatcttatcaatatttatgtgcgggatgataaggagaagctgaaagtattcgataagaatggtgtgtatctgccaatgaagaaaattggaaaaaacaatcccaaagcagagcagattgaagagaataatcgggttcgtaccatgtggaaccagacggtggacagggcattggtcagcggtgtgccggaggaacagattttagaagtgaaacagagtgaaatcggacagacagcaaaagcgtctattcagaagtcagggagaaatccggcactgtttaaaagcctgattatgacggctatatatgctttggagcttctgattagtaaggtgtttaaaacagctttggaaaaggctgataaggtgacggaagggggtgtaaagtcagagcctgagcagatgaaagttcgggcagtcaatgagcttgtgatggcgaaaagtgaaccgataccggaaatgccgaagaagtccaaacctgcttccaactatccaaggcttgcagatatttatagcaagttggggaagcagaacaaagccatttgtcaaagggagcaacagcttgcaagtgttgagaaggagattgccggaacaaaagggattttcaagggaaaacagcgtaaggagttgcaggagcaggcagaacagttaatgatacagatagccaatatcaaacagtatttgtcaagtatcgtgcagagttatggctataacaatgtaaaggagttcttggctgaataccatacctgtaaagctgaatactgcgattatcagtctgcagttgcaaggtgggaacagcaggccggaaataaggcagagtcggacagcttaaaggcaaggcttcaaagaaaggcgcaagaagtaaaggaacgagaaaacaacagacagagccagcattaccggagcgatagaggtggcagataggaaaatatataatcatattgacaaacaagaccacaagtgatagtctctaaataagactactgcttgtggtctactggctttaggaggatacatatatggatattcaattaggtgttattgaggcaagatatgcagatatgatttgggagcatgaaccagttacttcatcggaactggtaaagatgacggcagtggagtttaactggaagcgtacaactgcacacaatgttttgagaagattgattgataagggattgtttcagaatgaaaacggact

SEQ ID NO: 11510 - DNA, 22188 bp, Unknown
  gut microbiota DNA sequence
atgaatatcttgattatgagatggataatgctgttacctttttcagtgaaaactacaatcaaaatatcaatattgatgattatgctgcctcacgaggcatgagtgtcagctggtttatccgaaatttcaaaaaatataccggttctacaccaatgcaattcattgtgggaatccgcatcaacaatgctcagatgttacttgaaacaacaacttattccatcaatgagatttctaagattgtcggatatgataaccagctttatttcagtcggctttttcacaagttgaaaggatattcgccgagagaataccgaaagctgagaaacaaattctgaaatcccacgatgtggtcttctttctgataatattacttatcaaagcaaagcacgatatgcttattgcgcctgttacgggagcagtccctgctcctgcatctcacgcgccaccttcacatattcccggctgttgcggtaaatatcttttttctccgcttccgtcagctgccgcacgaccctcgccgggcttccgagcaccagcgatccatccggcacccgggtgtgctttgtgacaaggcttcccgccccgacgatacagtcacagccaatctccgctccatccaggatcgtcgccgccatcccgatcagcgtccggtcgccgaccgtgcatccgtggacaaccgcctgatgcccgatggtcacattgtcaccaatcaccacatcgccctcaatgctcgcatgaatcgtacagctttcctgaatgtttgtctctcttccgatcgtgatggttccctcatccccgcgcacggtggagtaaaacagcacacagctgtcctccccgatcgtcacgtctccgaccaccatcgcctcgcgtgcaatccgcacacctggaaggtctgtaatccgcttatagttcatttttccacactccttatcccaactccgcattgaatttctgcgcatttacacggtaaaaatcatcccccacgctgtcgatcacgtggtaagccgccgtggaatccatcatctcgaagatcacactctccccgctgcaaagctccggaatatcaaaatccacctgttccggtacggcggtgccaagcgtggacattacctgctccactttccgcacctgcaatgcatccgcctcaattttaagacagatatactggttcttcgcaaaggacgccaacaccagaaccggataattataatcaacggacggatgctccatgccggttttttcatttatcattgtgccgcccggcacatattttaccagatagcagtgctttgctgtctttatcgtctcttccgtttcgatctgtgcaagctccggattgaagatcgcaatcgcgccgtccggcgcatactcctgatctgtcacaagctttttattgatatagcagtcgctgatcagcgcatagtgtccgttgtagagagagataattccgagtttcggagaagcccccacatagcgcgcctcctccgcttccagatattccacaagcggcagtgtctttgaaacaatcttttttgtcactgcggtcaccgccaccggagcggttgactttttctccggatacggatgtccggcaccgatcttcacatccttcgcgcatgtcttgccatgcagggtatacggggtatataaaacctcgtaataataacttttggtattcagcttcggcatcgtctcacagtcaatgtctgtctgcttgaaatagacggttccctccttgtcctccagatgggcttccagttcttcctccggtacaataaaaccgaaccctgcactgaccggctgcttgatcatgtattttacgatataaccgcgcagtctctccggtttggattgttcctgcttctcctctgcaatgacagtcttctctgagatcagagcgacatccttcgccgcgcaaagcttgccctttaaagtctgctcaagcgtaaatgaaaccctgcgccccagaaccagctgcgatgcctcaccggcatctgtgagattgttgacatggaaccagtattccccggaaatataaccggtaccgttatccgtgcggtaagccgtaatggatccaaaataccgcacctgtgcgatatcgccggtctgcagcaccgtctcttctgcgccatcgtctccagcaagaagcgtcagtttttcatccgtgtattccttcagctttccggcagttctctctccattcgagagcagcacttccacgtcctgtcccacaaacttcttcgcataaaaaacagagaccggcagcatctttacctcgccgttcccatcaatccacactttcgcataatccgcataaggatacatcttctccagcgtcacactgaccgcctcctgcaccacctcacccggttctttggcgcaggtgtaggaaaccacgtagatattgcccggtttgaatccaaagtcaatctgctcctgtgaaaacatgacatttccgcgcggcaatccggcattctccatcttcgcataattctgtgagacatagcagttcccgataaagccgttcgtccggagtgcattcgggaaaaataaaatgattccccttcctgtataccccgcttccgccggttcttcctttcctgccgcatccaccagccggacatccttggcaatccattcacaatccgtaattccaggcacgaaggagacctgatctccaacgccgatctgcgctgctccggaatgttccggcactctgcaccagaaaccatcttctgcatcccggcttcctactgcgatcttccacgtatccgtcttcccccggctgcccggttcccgcacacgcaccactttcccgcagtaacggatttcctgcatatcggcaaacggaatcatggccacgccctcgccgatcaatacgaacatggtgtccgtcacagccgacacgacaccctcccgacagctcccgtccttcatggtaacatgcagtgaatcgttggtctccggaagcgggaaaatctccttcaccccggcaaaatcgaccggaacctgtccgctgcctgactgctccagcatcccggttccgtcctgctgcaatctgccgaccaaaaatgttccatcaaaaaaactgtaaattgctgccgtccggcttaatttttccgcgcagatcttgtgtgtgtgcgataccagccggatgtcatccgcgcagatctttccggatgcaagcttcagatgacaggacacggtacacgcaaaatctccataccgcatgagttccagttccgcagcatcacggcaggcttccggcgcaaatgtaaaattcccgatcattccggtatcacgcatcacatcataatctgtcagttcccctgccagccggatatccgccacatccgaaagcatgatctccctgccctctacagtgatcgtctccgccgtgatgttttgcagaatgccttccgccctgctgtcatctttcagcgtcacttcgacccggtttaataaatagatcccgctctctctgaccgttatatcttcacccatacaagctactccttctactatccgtcatgtatttatggtattacagcacccgcgcttttgcaaggaattctttccacgcaaaccgcccggagattcacggtgctcgtcaaatctgcatacagtcatacaatataaataatgtctttctgcatttcataatctcccggcggattcatgcaactttctgtaccatggttgtatttattccggctgctctgtattctgaaacttcgggtctacagccgataaaatacgccgtgagacccgttttctggaatattttgatcattttttctatctgctggagcgttctcgggtctacagcctacaaaatacgccgtgagacccggaattttacaatttccgggtctcacggcgtattttttgcttccagtgcccaaaagccatggatttatccctctttttctctcttatcaagcggttttggggtctcacgcagctatttttcctctgtagacccgcgccagccttctccaggctttctcacaaacgttttctgcaataaaaaatatgccacgacacattttcgcaccaagcgcggtcgcctgcggcatgtctctccttcgcgcaagtgcgcatcctgcccggagggctaaaagcaccttgtcaagcgtcttcctgtaccgtaatattccgcacccagatatattttttataatgtaagtacacagcaggaatcttcacaatctcgtcgaggttcacgatacagtacaccaccatgaccggccatttcagcacaaatgccgcaaagaagccaaacggtacggaaaagcaccacattgccccaagatttcccttcatgtcgaacttggaatccccaccggcacagaagatgccgtccagcactgtcgtgttgaccgactgcgccatgatattgcagccgcagaagatcagcatgtactgcagatattccgccgccgtctcactgagcggtgcaaaacgcacgatcaaaggagagatcagcatcagaagaccgccggtggtcatgccgaccacgattgccatgcgcgtcagtctgccgccgtacacttttgccttgtccagttctccggcaccgagcagatttccgatcagcacgcccgcaccgccgctgacgccgcggatcaggcacgataacatattcttggcgatcgtggtgatggaattcgccgccactgcgtcgcttcccatatgtcccataatcacagagtaggacacataggcgattccccagacaagcgccgcgccgagcaccggcgtggtataacgccagaaatcttttgtcagaatggcatccgccgcacggaacattttcttccagatgatctgcacacgcccggactgcttcgtctccaggtaactccagatgagctccaccagacgggcggcaaccgtcgcgtaagccgctccctgtattcctaacgcaggaagccccaacagcccgtagatcaagatcgcattgcagataatattcacaacgaccgctgtacagctgatccgtgaactgaccgtggcatagccggtatttttcagcaaaatcaggtaaatctgtgaaataccgcacagcagatatgacagggacaccgcgcgcagatagaccgctccgctctcaattaacgcaggatcggacgtaaaaatgcgcatgagcacctcgggtgccaccgccgcaaacacggtgaacgcaccgctgaatatgagattggtgcgcagagcaatcggcatgacctcctcaatggaagccgcgtcctttttcccccaatactgcgctgccatgattccggagccggcggagataccgctgataaacagatttaagacaaactggatctgccctgccagagacaccgctgacagagaggtctggctgaccgccccaagcataatggcgtccgtggcgctgactagcgccagcataaactgctgcatcgtgatcggcagcaccagaagctttaatttctggtagaattcatcgtggaaattgatttttgcaaacataattttcatcctttacatgtataactcatgagattttatcatctatgccttgccgccgtcaatttcctttcttgccttttttcagtcagattccggattttttttacatatcctgcactttttacatattcgatcttttcactatggtcttttcaccgtccactcgtacgttccggcaggcacattctcacttcttccatccggaagaagcactaccgcctccaccggcgttgcaagccggatatggcagccgtccggttcgtaccgccatgcgctctcgatcttccctgccacggaaagatagcttccggatacgcctcccaggcgctcgtccggataaggtgcaaaatgcagttttgcaaagcccggtttttccggtctgattcccaggatatattgatagtaaaactcccccacactgccgaatgcgtaatggttaaaggataccatattttcaccggagcccgccattttctcctcgttaacagttccgtccggctttaaggcatcccagcgctcccaggttgtcgttgcaccgcatttcacctggtacatccaccccgggcagttctcctgcagtaatacatcataggcaagtttctgctctcccgcttccaccagaagcggcagtagatgctccgtcgcaaaaaatcccgtctgcagcccgtttttacggatgttggcaacaaagtttttcttgacccgttcccgcagctcgccctccggcagtacatattttaacgccataatgtaggcagactgataatccttcgccacgattccgtttttactcacgaattttttgatataagcgtccgtcgtcgcggcaagctgtctgcggtaccgcgccgcatcttctcgctttccaagccgttctgccgtctcgctgatggtctttaaatcatgcacgatgaacgcgtttgacaccggattgttgtgcatcgcctgccatgcgattccttttcccatcgcaagccagtcgcctagggacggaccaatccagagatttttcttccccatcttgcggatctccgcctccacaaaaagcttcatgctctcatactggcgcggcagtgcctcctcgtccccgaactgacggtacatcatctccggcagaatcgtgaccgcattgccccagcccagcatgctgataaatccgatcccggcaggtcctgtctgcggcaccgtggcgcacacatatccctcggtgttgtcaagctgccccagctcaagatcccgtagaaaatttttccagaacgcatccgtattaaaattataagcccctgtcagtgcaaacacctgaccgtccccggtatagcccatgcgctcatcccgctgcgggcagtcggtcggcacttccacatagttggatttctgtccccagacctggttctcatagagcttctgcaccagcggattttcgcaggaaaaatatccggtacgcttcatctctgtgtgaagtgcgtatgccctgatcatccccggctgatatgccgcaccggaaagttccatataacgaaatcccatataagtaaagcgcgggcggtattttttcttctccgcacctgcatggtagacgatcgtcgcctttgctttgcgcagatttgcggtgtacaggctgccgtcggcatttaagatctccccgtgccggatcgtaattgtctcatttttcaaaaaagaaggatctatttctacaattccggcaaaattctgcccaaaatcaaggatcgtcacatctccctgcaccgttgtctcccgcaccgacatctcatcctgcaggcgcacctccgtaagtgtcggctccagtgcgaacggcgtctcctttgtgtaggcggccgcatgaccggtcacgttctctcttccgtctgcaaaataaatctcaccatcgtactctcctgcatattcatacggggattccagttcctccaccgtctcatcggagacgatctttctgcttcccgccgcatcctccagttccagaatccatgcgaccgccggctgctctccgtatatctgcgtctgattttcacagagaaaacgcccgcagtaccacccctgtccgagatagaccgtcagcgtattttccccttcccgcaacagcttcgtaacctcgtgtgtctgatagagcacacgtctcggatagtaggaaaatcccggcgcaaacatctgcctcccgatcttcgtgccgtttaattctgcttcatacacgccgagggctgtgccgtaaaacacagcttttttgacctgtgaagccgtaaatttctgccggtatacaaaaacctcgccctcccggtattctttttctgaagtgatccactgttttcttaattcttccatctgcatttccatccttattctgccatctcccgctctgtcagatccgtgcgtttaaaaactgtgcgcttacctccagcgaccgtagtggagagttgtccacccagtttttatggctttctaaaatcacggcatccacattcacgttctttgcctgtgcaatgaatgcatccagactcatattgccgcagccaagctccatgctgtccgattttaagatcggcgtcatggcaggcttcaaaagccgcgtgccgcggtcattgatatgatagagtttcattctcgtgtccagttttttcatcagggcgagcgcgtccacgcccgcctccgtcggccagtaggaatccagctcaaagttgacatattctggatctgtctccgaaaggagcagatcatacgccgttttctgcggctcaacgtgcagaaattcacagttatgattgtggtacaaaagctcaatgcccgcctctttcaaaatttttccggaggtattcagatcccggcacagcccctgcaccgcggctttatccgcgtaatcaaagcggtacattcccgtgatgacaacatattttgtgccgaaggcttctgcctcttttgcaaccgtctccggctcccgtctgatcgttccaagatcttcatggatgctcgttacacaaagtcccgcttcttttacaagagtattccagtcatagctgccgccttttccgaccggcatccccgccgccttcgtgagcatccgcaccagaaaagaggtcggtttcaccataaaaccgttcagttcgattccgtcgtagcctgccgccttgatccgccgcagcgtctctgccgtctgcttttcatttttcgttactgttccaagcatgatctgctgtactgcttttttcatccctctgcgctccttacttcctattccttaattctttggaattttctgcaatgcgtcgtttaacgctttcatctgctcctcgctcacggcgtctcccgcctgctttaagagacttgccagtgtcatgcgctgcatcatccgctgcaacgccggattgtccttcacgctctccgccacatcgccgcggcttgcggaagcctgtgccatcaggcgctgcacaatggcgtttgccatctcatttttcgccagttctcccagcgtatcggaaatcgaatagtggtcggctttaaaatcttctttgtcaaaccagttgaccacgtcgccctgcttgttgaaaatgtaagccgggttcggtgtgtccacttttctcactgtaatctcatcggtgcagtccccggacactgcccggatcgtgtgcgttcccgtaatcggcaccctgaatctgaagatgcgtgcaccttccttggtctcctgctctgctccatccacaaaaagcgtgaccttcttctggttagagtacactttgatctccgtcacatcctccgcacggtctgtgtatctgctgccgcagagatgcacaaatggggctttgctccagtatgccttgtatacatagaacgcatcctttttgatcctgcggtccatcgtcacaagccctttctggttctcgccgtgcttgccaccctcgtcgcgcccgtccgcagcgaaatcaaacagattccatacatgcgttgcccacagatacgggcgctcctcaatcatttttgccatatgctcgtggtaaacgcactgatattcctccgtgtaatcgccccgctccggattcgcactgtggtacgccggattcgcgtccgcgccgtattcggagagtccgatcacccggtcggggtaagtgctgtgatattcgtcaaaaaagctgtcgttctgatccagttccccgatgtaccagccaaagtagagattgtagctgttcatatccggtatctccagcatcgggctgtccgtctctaacataaagacatccgccataaccgtcggacgcgtcttatccagttcatgacacagatcatttaatctacggtgattctccagcagttcttcgttcaccgcgcttgctgccgtgatctcattagaaagtccccagcagacaatcgacggatgatgatagttctgcacgatcagctccttcatctggcttaacgtattttcggtgccgtccgtcatgtgcatcgtgatatacggaatttccgcccacacaatgattccgttctcatcgcagagatcgtagaactcctgcgcgtgctgataatgtgccaggcggatcgtgttggcaccaagctctcttacaatcgccatatcctcccggtgcatctcgtatgtcagcgcattgcccgcgcccgcacgatcctgatgacggctcacgccgcgtagcggataagatcgtccgtttaagaaaaagccctctttgggatctatcttaaagctgcggcagccaaacgtccgctccacgacatcaccgcccggaagttctgcttttaccgtatacagatacggatcctccacaccgtcccagagatgcacatttttaagcgcaaacacggcttttgcataaccgttttccacgggaaccgtctgtgtctctcccgccacggtgaccgtcacgtccggtgcttcccccgtcatccacagttccaccgtcacgtctgcgtccgcctgtttctctgcagcgtccagaatcgtcacctccggcgtcactttcatgccgtttccgcctgcatagtccatcacaaaatgcactttaggcaccgtcaccagctttaccatgcggtacagcccgccgtaaaaagtaaaatcggctttctgcggatacacctttgtgttgtcagagttatccacatatacttctaacagattgtcctctgtcaactgctccgtcacatctacccggaatgtagaaaatccgccctcgtggtggaacagcttcgttccgttgaccacaacatccgccgtcatcgctgcgccgttaaattccagatacgctcttcctcccttttccagttccggttttgcaaaatgacgcacatatttgcaggttccgcgataataatcgtttccgccgtcctgcccgtcaaccgcgttccaggtgtgcgggagcgtcaccgcttccccgctttcactctgtggatttttataaaatgtccagtctttttccagcactattgtatttctcatctattccgttttccctctcttttcttctctctatttcatttcctcaatcactttttccacttctgcctgttttttctcctgaatgctcttctgtacttcctccatcttctctttggagagcggcgtctcgcgcattgcgcagagcgtacatacccagccaatcagcgggagtccgaaatacatgctcatcgtcatccagaagattgccggtgtggacgggtcggtcggctgtggcatcgtgtgcctgtagccgatcaatgccaccagaccggttgcaatcgctgcagaaaacgaggatactaacttgtcaataaagctgtatgtacctgtcactgctgccggaatgaatttaccactgcggtctaactcgtaatcaatgatgtccgccatcatcgcattgcttgacatcgtcacgcacatttttgcaccatttaacaccagggtcaataatacatatacaatcatcataggaagcgtcgtcgcaatcagggtcggatcaatgaaaataaacaataccacaagcaccgccgccacggtgatgcacacatacgtccacgtcaccatcgcctctttatttccgtgctttcctgcgtatttcgccccgataaacgcgaagatgatcgaaggaagcataccgattacacttaagattgtcccaagctgcatattgccgataataattccgaacagcatcgtcgtcacaaccgcttggcttgccgtctggctcgcgatcttatccgaacttgccgcaacgatgaacgtctgcaacgcacggttggatttgaccagctcccacatatcttttacttttaccggctccgccttcttcttgctcgccacgcccacaaaattttccggtttatcgatatccgataccgcgatgctgcagagaagtaatcccacacccgatactgccacgcagacgatgcaggatgctgcaagcatctctaccgaatagacatttccatattttgggagcaatatcaccgtaatcacgatgttaagaatcatcggcaccagatagttataagctgtactccagacgcctaccatcgggcgctgcttcgggtcgttcgtaagcatcgccggaacgatctgcgctgtgacgttgcacatcgtatagccgatcacatacaggcagtagagcagcacgaacagcacgattccatgtccctttccactcgcccagcagtacatgatcaggactgccagtgactcgatcagccatcctgccaccatcagaatcctgatctttccaaaccgcgtgttcatcttatcgatgatgatcgcaatgatcggatctgtgacgccgtccaagattcttgttgcagtcaggataatgcctaccaccgctgttgcaatgccatacccttcgtttgccacatagcttgccagtccaagcagcacataaaaacacattccaatcccagaactgcatcctgcaagcgctaccctccatgtctttgcacggcggtagacaatgccgtttgtctccacagactgttcttttttctttccaaacatttttataccctccagacttttccgtattttgccgcttccgtatgtctgctatatctgcggcctctgttttctatggctttattctagccggtctttttcctttctgtgtttacaaattcgttgttatgtactaaaattcatgttataaaatgatgtattgctatttttctaacattttcacgattttgtaaactccgggttttataaaatcttatatagtaacatcagattacaagagatgcacaggaaaaatacggctgacgctgtattttttcactgcagaatggaggattttatgagattaccggaacattttttgatcggggctgccacagccgcccatcaggtagaagggaacaacatccgcagcgacttatgggcgatggagcacatgaagcacaccagctttttggagccgtccttagacgcggtcgatcactaccaccgctatgaggaagatattaagcttctgtccgacgccggcttaaacgcctatcgtttttcgatcgaatgggcgcgcatcgagccggaggagggcgtgtttgatgcaggggccgtcgcacattaccacgacgtcatcgcctgctgcaaaaaatacggtgtggaaccgtttgttaccctgcatcatttttccagcccgaaatggctgatgaccaaaggcggatgggaagcttcgactacgcctgccgactttgcccgctatgttcattatattatggaagaactcggcagcgaactgcactatgtatgcaccatcaacgaggcaaatatgggcattcaggtcgccgcaatcgccgagcgctacaagcggcagatgatggcgcagatgcaggcagcacagacagcgccaaggagcggcgacagcgcggacggtacggtgcaggtcggcatcaatcttgagaaaatgatggaaaatcaaaaggcaaccgcccttgaaaatatggaagtcttcggcgtggaaaaagtagaaaactttacctccatgcgcaccagagagggcgatcttctcatcatgaaagcacatgagctcgccagaaaagaaatcaaagcgctctatccggacattaaagtcggtctgaccttaagcctgcacgacattcagccgcaggcgggcggcgaggcgcgcgcagcctctgagtgggatgaagaatttttacactatctcccttatattaaggaggatgatttcttaggcgtgcagaattatacccgctccctgatcggtccggacggtcagcttccgaatccggagggtgccgaactgacccagatgaattatgagttttacccggaagctttagagcatgttctgcgcagggtggcagaagattttcacggtgacctgtatgtcactgaaaacggaattgcaacttccgatgacaccaggcgcgtcgcttttatcgatgccgcacttaacggcgtcgctgcctgcatccgcgatggtctcccggtaaaaagttattttcactggagtctccttgataattttgaatggcagaaaggctactcgatgacttttggactgattgcggtcgaccgcagcacacagacaagacatccgaaggaaagcctgcgtttcctcggaagctggaaccgctaaagaaaggaatacccacatggacatcaaagaacgtctctctttttttcaggaaatggttcaatgtgaatacccgcttcatctctggcactacagcccggagtttgagctgatcgagacagactgtccggcagaactcatgctgccggacattatctccatgctgggtttttcctctctcgtactcgcacatatcgaatccgggaaccgcatgccgctgattttggacaccgagttcggacttctctggatcgccggttttgagtatcagggctttgcgctgcagcagatccacatcgtcggtcctgcttttaccggaagcaactcgcatctggttctgcgtaaaaagctggattcctaccagcttaccgtcaagctgcgctctaaaattgtaaagcagatcgagagtgtgccgatcattccgtcttccgtgctgctctcctacgccatcatgtttcactgcgccattaccggcgagcggatcaccgcggatctgatctcttttacctcacacagcacgacaagcgttccggatgactcgccgcttctctccggggagcatccgggcatctggatggcggaacagacatttctctccatgatccgcgagggaaatccggaatacaaaaaggctcttgcaaaatccatgaccttaagctccggcgtcaaggccgagatcggcgattcactccgcatgagcaaaaataatctgctggtgctcctaaccctgtgcagccgcgctgcgatcgatggcggtctgaatccctccatcgcatacaccctaaacgattactatgccgggcgcatcgaggaatgtaaaacgactgccgacacgaccaatttaagccgcgaatttctcgatgattacgtccaccgtgtccgcgccgcaaaggagacgaatgcacattccaggcagattcagaacatctgcgactacatcagtctgcacatccgcgaaccgctctcgatctctctgctctccgaacggctcggctacacggaatattatttttcccacaagttcaaggaagtgaccggcgagagcgtgaatgcttatatccgccgaaaaaaaatagaagaagcaaagcttcttctatcgggtacccgcatgagtattcaggacatcagcgatgaactgtccttcggcagccgcagtttctttttctccagctttcagaaggagaccggcatgtcaccgacggcataccgcggggagcactgtaaggggtgaggggagaacctgattgccccaacatttctttttgaaccgtttatccagatctatttcccgtatcacctgctctttcattccagatttttgagataatcgttcttctaaatcatcctgtagagtagttgatattatagcagacgaaatacctgttccacggaatcagtaagattctccatggctttttcccgctgcatggcctcctctaacgtgcacaccccgcgcacgatcgggaaaaatgcgtcgatgccgttgtcattgcacgcagttgcttcttttgtgaccgaaccggcgaacgcaatcactttacagccatacttcttggcagccctcgcaacccccacgggcgcttttcccattgcagtctgaagatccagccgtccctctccggtgagcacaatctgcgctttctttgcctcctcctcaaaatggatcacgtctaatatcagctcgattcccggaaccagtctcgccccaagataactgataaaggcatatcccatgccgccggctgcccccgcgccctcccgggctgcatagtcaacgccgatccgctcggcagtgatcgcggcgtaatgcttcatatccgcgtcgatacgcggcatttcctcttcccgtatgcccttctgctttccataaatataggtcgcccctttttctccgcagagcggattcgtgacatcacatgcaatctgaaaatcacattctttcagttccggcatcagatgctccagtgaaacgaaatgtattttaccaagcgcatccgctccctctcctgcttcctctccatctttggtcagaaacttcacaccgagcgctctaagcattccgattccgccgtcatttgttgcgcttccgccgattccgatgatgaatttgcggtatccgcgcgaaacggcatcccgtatcatctcgcccactccataggtggtggcttttcccggatttctctgcgcttcctccacaagcgtaatgcccgcggcctgcgccatctccataaccaccgtcttttcatccgcaaggattccgtagtaagcttttacccggcttcccatcggtcccgtcacagacagttccactttccttccgcccagcccctctatcagggcatctgttgtgccctctcctccgtctgccagggggcagaccgtaacattggcatgcggatagacgcgcagcaccccgtcacgcgccgcattgcccgcttccatggaagtcatactccccttaaacgaatcgatcaaaaccattacatccatctttttctccttacaggcatgcaacagagacactttgcaatgctcactctgcaatgccttttttcatttttgtccacagtgttgtagggctgatttccagttcttccgcaatcttctgcctgcttccgttattttttggaagtgtcagcatattaacttcactgacatatccataatcacatctgtttcaaccgtgaaactatcttatacactctcaacatactcataataggattttctccaccagtcgcacttgtgtcacaccattttctatacacgttaccttttatctacttttctattttttatcatgttcgctgttccaatttacaccttgtaaaaactccaacacaagcctattattcagcagagtctcaaaacacccctctgctacgatattcaaatgattcattcataaggctacaaaacacacatccattttcgctccttaatatcccacaaaccgcagaaaatcaaggtttccttgaaagcagacagacggtttcaatattcccctgaactttgattttatactgcatagcgaaagtacataattcactttaggctggggtaaaaaatttatcccatgaaaccattctctccctctcgtccaaatgtaaattattcaaaaaagctaagttgagcgtcttttaatgactttacttttctatccgtaattttatcatccgaagtgatatttccacataataatggggacgcttgattgtacaatcttacattctcttttactttctcatcattaaaatttgcatagcaatatttgcaaccattaagacaagtattatgaatataagaaatgacaccacctcaacccttgatttaccgtcatgagcgaagcggtgtcaatacttacaagttttgaatacaccttattcaatttcgataaagtcattataggtaaatccacatagaccacactccgtatattcggcatatataggaacatgaataatctgaaaacctccaactgttgaggtttcatctcccagttcatctatgtcgaacccaataacatccctgccactaaatattgttttattatcacagcatggacacttagcatcttttatataacgctcatctaaatgtggacttaaccgtcttgctattatacgctttatattttcttctttctcttttcctttctgaatattacttttataaacaaacagattacatcttgccagttctttttgaaatgctattttagaataacttattgtagctttcttaccctcatcaataattttacaaatggaatcataaactcctttactttttaattgattaagatgccacctataataatgacaatttaatacatctctcacaaatggaagaacatattgagaaaagaaatcatctaattcacaatatttcattatcctctttcctctatgaatgattgtattacgaagattattcaacgcttttaataatttataattgctaacaaacaatatagcaacttcatcagtaagtattccattttctaccaacttttttaatctatctatcgcctccgaaaattcaactgactttaaatttttcgtatcctcactgtttaggctaatattcttaagcagtttattcaatataatcgggtcgcccttgtcatctacagcaaataagacatgctctttttctaaaagtcttttggtttcgagttcaaagaaatgttgaatgtgtatagcaatattcaaataactcttaatatatcctatgccgtttttctctgctttataatttatcttctctttatcatctctctcatactctgaaagatatacgcatacctgatgatatgtttcaaaatactcttctaagcctatggataatgaataaaatgcaacattatgattgttttccaaaaaagtatagtactcatcacttaagattttatctatattcatataatctccaatccaaaatgcctcagtgcatccttaacatactccaccttttcctgcggacactgctttacttctggattctctttcttggacttattataattctcgcccatatccagactacacatccgcttaacctgtgcaatataagaagtatgcacattcacaccatacttgttcttcacatattccttaatcttcggatatgtagctttttcttctggtgtgtaattactttcttcatcaggcttcattgtaacctcaatcttaggtgtatcttttttgagagataatttgaccaccgtctcaacatggctcgataggtccggattgatgtcggtcatcgggaacctattcaggctaatatggtatgtatcaaaatatctccgtttgttcgtggaaacatatcaacaaattctgtggcaaaaatatcttgatacattctgctatccatatcgctgcctgaacctcgttcgtccacggaaatagttcaacttttttattcgtttctactattatagtgattcaaacataaaagtcaaattttgcgatggatcgccatcgtctcaaccttgtccgttcttcctacaaaaacagatcaacggctatttttagccctaactgatgttcagttttccatgcactcgaccttattatgctgggaaattcgcatcaaacagagaagcaattctattacttcttcgcattctcttccaattccagcatatatttatcaaagtcagacatgaacaatctgtcctgaatgacacgatatttttcaaattcggtctcagcttttgccttggcaatctctgccgtaatcttgcctgtatcctgaaggacctctctgtcatcagccatcaggaataaatccagacgctttgcccagtcctccattgtcatcggaatgtgacgttctgcacggtcctctgccagatccaggtatgccgaaacgatacgctctaatgaacgcatttcctgctcagaaagataattttttgcaacactcacatcactttttacgatcttgccttccggtgcggctgcccaagtggtcagtcccatatgtggcttatctgcgtctgctcgctcataaatcagctctgctgccgtatgtccgtgaactgcataatgcatcttgttctgcaccttagcaaagaactgctttgtcgtttttgctgtgcggtcgtaatcaagagctgtagcatagatgtccgttatcttctgatagaatctacgctcagacaaacggatctcacgaatctgctcaagcaagcgatcaaaatattctgttgtaagcactgatccaccattttttagacgttcgtcatccataacccagcctttgatggtgtagtccttcacgatgccattggcccacttacgaaattgcactgctcgctcattgtttaccttgaatccaacagcaataatcatttgaagattataatgtttcgtatcacgagtgacctgacgtgaaccttcggtttgaactatccggaaattccggatagttgcgtcttcctcaagctctgagtcggaataaatcttcttaatatgctcattgattgtacgaacatctacatcatatagtgtggccatcatcttctgtgtcagccatatattctcatcctcatagcgcatctcaatactgtcctgctgatcgccgacagaggcaacataggtcaaatattccgctgcgctggaacggatggttatttcatctcttttctttttcaaataggggcctcctttataaatcgaaatgagtttttgctattgtatttagctgacttgctatttcgtcaaatggcaaattcaaatccagcgttctgacagcaatctggtttccactcatctgatacacattatttggatatatctcttcatcagtcttggcatacaagagcattcccgaaaccgtgtggtccttctctctcagttcatattccttgtttttcacataagtaaaaatctgatagagattgcccgaatgaagtgtatgcttgtcaaattgcacctgtgtgctgtgctcatagtactttgcgtcaataataagaactttctcaccactttggagcataatgtcactttgcatcacagacaacatagaattttcttcattgtccagctgccaaggaatctgtgatgcatttgcggtaatctgatttttaaactctttcctgtaatattccaagatgaacttctcatacaatcgacacattcgctgctcgtctagaaagtccatcaactttgtgtgcccattcgattgtgtttgcaatagaccctttactaccaggtagcatatcgaaattagcatacgataagtctggttatttcgattgtactgaacattccaatttaccgtatatgaatcaataaaatccacctcgctgaaatacaccattaactttctaagatttttcttgcgctgtttcgatatattcgaacgaaggagaagttcaactgtagatttgatgatctgattcatgatgctgttaaccgaaaactcatcgtatgtacagattagctgtttccgtaacattgactgtgtcttgatggactctgcaatatcaatctttcctcgcagagaagagagcgcctcggtctgcggaatatattctttaccaagtcctcgctttagctgaatcgcgatacctttttctaagatagccgccatcagctcagcagtattatgaaattgttctgtagctatattcttataaccttgctcattcaatacctgaaatgcataggacagcatataatagatgttttgaatcggtatcacttaatcgtactccttagattttcgctccaatctttcaccttcataagttcatcaaaccagtattctttcaataaaggtatcagctcatattccacaacaccataaagccaactatcgtcaattgtatcaggttgtaaattgcagaagtagctgtgaccaatacagaacccttcgcccagagattcatcgacggaaatctctctaagtcagcaaccaccagttcaactggtggtttgctataagccctccaaagggctatgttactgctcgccccaaagggcggtgtcacaagcatttttactggtccgctataaagcggtacttcttgaatcttcttttcttgattcttctgcttgttcttttatatacttctgtactgcctcgtctgtgatattaccgattgtttccacataatatcctcttgcccaaaatgctttatcccacttactctgcaactctgggtaacgatcgtatagcattagggtgcttttaccctttaaatatcccataaaatctgagacacttaatttcggtggtattgcgacacttaaatgcacgtgatctacacaaactgctcctgcaattatttctacatttttatatttgcatagtgtatttaagatttcacgtacatcctctcttaccttcccatacaatacctttttccgatattttggaatgaaaacgatgtgatattggcatttccatctagtgtgtgatatgcttttattgtccacttgaaccacctcctgtgttgagtttggcttgcgacaccattctcaatataccacaggaggtttttcttttttatcctcaccgtttccaactattccattctccccagcatagctgggggattaggcttttcatttattggagcgaatataatttcgtaaaagag

SEQ ID NO: 11511 - DNA, 9438 bp, Unknown
  gut microbiota DNA sequence
ctagcgttttggcgggttctaaaaaaactattcgttcagcagattgtagtcctcgatggaagcgttgatcgtgtccgccatcttctgcactgcctcctccggtgtctccttgtcatttaacgtgttctcgatctcggtctgtaccgtctggcgtgcttctggaaatacagagagaagcgctcccgcgtactcgcccttggtgtcattcaactggtcgatcgcggtctggaactgcgggtactgctcgatgttctgcttgaatacatcctcattgtacgcatcgttggtaaccgggaaatatcctgtctgggttgcccagtatgcctgagactctgccgataccagatattccacgaacttccaggttgcctgtgcctttacgtcatcctgattctggattgcccagagggatgctccgccgatggacacaccgccctgatctgtatccttgatgcccggaaaatatgcggttcccacctcaaaggagccgttgacatcgtttaagatctgctttaaggaagcggtggagccaagcgtaatcgccgcttttcctgcagagaagtctgtcagacctgcatcgccgccaactcccacattcggtgcatatcccttgtcgtagagatccttccaggcggatacgatcgagagagccgcaccgttgccgtcaaaatccacggctgtcgccgccgcgcttcttccgttgtcattgtttgcgtaggtcagtccctgcttgcagataaactgctcaaagaaccatccgtagattcccatggaaagtgcctctcctgcaccgcccttgttcacaagatcgtcggcaatcgcatcgatcccctccaggctcgtcggcacctcggtgattcccgccgcatcaaacatatccttattgtaatagagaatcggcgtggatgtattaaacggcatggagtagagctggtcgtcgatcgtgtagtaagcggcaatattcggcacgatattggagttgtcatagccgttcgcatccatcagctcctgcatcggaatcacccagccggagtcgatcatgaaacgggtgccgatctcatagacctgaatcagatccggaccgcttcctcccaccatgctgctctttaatttgttgatcgcatcatcgtactcgccctcaaattctgcatccaccgtaatgccataggtgttctcctcattgaactgatccacaagcgcggtaagtgcctcgccgtttacaccgctcatagagtgccagaatgtgatcgtcgtcccggaaagatccgcatctgccgtggcggacacattcgtctctttttccgtcaccgttgccggatcaccctgcgcactccccgcttcccctgcagcgtctgcggacgtatccgccgtctgcgccgtgcttcccccgcagcctgcaattgctgctgcaagcatggatgctgttaacaatgatgcaatgattctcttcttcattcctcttttttctccttttgaattagtgagttccttttttctatgtcagcccttgacggcaccggaaaacataccgtggatcagctgcttttgtcctaagataaacacaaacagcgacggcagaatcaccatcacaactcccgcgattaccatcgtaatcgactgggaatccacactgtttaacatgctgataccaatctgcacagttcgcatctcctcggttccggttactaacaacggccacatatacatgttgtaagcgttgatgaaggtatagaccgccatcgctccgatcgccgacttcgtcagagggatcagaatccggacaatgaacaccagattcggacagccgtcgatctttgccgcctcatacagggattttggaaaggtcagatagaactgacggaacaaaaagatccccatagcggaagtgatatatggaatgatgagcactttgtaggaattcagccagccccatccgcttaccgttaaataattggaaataattgtcgcttcacccggcaccatcatcgtcgccatgatcagcataaaaatcacattttttcccttaaagtccagaaatgacagtgcaaacgccgcaagggagcaggaaataatctgtccgaacgtaatgcatcccgccaccagaaacgaatttaaaataaaatgaaacagcggaattttggtaaacgcctgtgcaaaattgtcaagcgtcggctgcttcggaatcagattcatctccatcgagaacaattccccggatggcataaacgcaatggaaagcgcatacaaaagcggaaggatcaccaataccgacaccaccaggttgacgccgaaacggctccataatctgcgccgttttctgccgagttccctttttttcatggtctcgtgcagccgttctatctcttctctcttcggatgtgccgcagtgcgcggctcgagcctgatatccatcaatacttcactcccttcttttccagacggaacatgagcaatgtcagcagcatgacaatcaaaaacagtaccacagactgtgccgccgccccgccgaagcggaaattaaaaaacgcgtcgcggtagatcgaatagacgatcaggttcgtcgattcacccggcccgccttccgtcaagattttcacctgcccgaacgactggaacgccaggataatattgacgatgaccgtataaaacaggatcgggcttagtcccggcagcgttaatctggtaaacttctgccactcgttcgcgccatccacagacgcccgctcatagatcgactcgtcaatattggcaagtcccgccgaaaaatacagataattgatcccgctgttcaaccacgccgtcagaagtgccacgcacaccagcgcatagcgctcgtcatgcagccagttgatgtccgaccgcaggaatttgtcgagaatgccgatcgtcggatctaacataatctcgaaaatcagtgcagcggcgcttgaggcgatcgccatcggcagtgcgtacgccgtggaaaagacccggattcccggaaaatttttattcaccagcagcgccgtcacaagaccgagcagcatgctgaccattaccacgatcaccacaaaaatcagggttacaagcaggctgttataaaaagattctgacgtaaacagatcgatatagtttccgaagccgacaaacagctttgcctgtcccagcttgtcggttttatacaagcttaaatagatcgtttttgcaaacggataaaataagaacagtccgaatacgataagacacggcaccaaaaacaggtacgggctgatcttttgtcttagctttacaaatgcattcatgttgtctcctttcagatgcgcatttcactgtcgcagtcaaacagatggatcgctgtcacatcgaagtacagccggcgcacctcacctgcccgggcgtcatattccgccggaatctttgccacatactttttcccgtataaaaggaaaaacaaaagcttctcggctccgagcagctccacctcaagaatcatcgcctccacgtaatccgccccggcgcttacacattccggtgcctcccacaggatgttttccgggcgtatgccaaggatcacgctgtcgcttccgtgtctgcttatccgcgctgcatcctccctgcacggcatcatgcggtactccccgaccagaagcgccggagcctcctcccaggaaaccacctgtgcctcgaaaaagttcatggacggcgttccgatgaatcctgcgacaaaccggttgaccggctttgcatagaggttcgccggtgtatccacctgctgcatttttccatcccgcatcaccacaatccgtgtgccaagcgtcatggcctccgtctgatcgtgcgtaacatagatcgtcgttgttcccaccgcatgctgcaatgccgccagttccacccgcatctgcgtccgcagtttcgcatccagattggacagcggctcgtccatcaaaagcgcccttggattgcggataatcgcatttccgatcgccacgcgctgtttctgcccgccggagagttctcccggtcttctgtccagcagatgctcaatgccaagcatctttgccgtatcgtatactttcttttttatctccttcttatcgaccttcctcacgctcagggaaaatgcgatattgtcgtacacgctcatattgggatacagcgcataattctgaaataccatggcgagattccgctcccgcggctccttgtaattctcgatctctccgtccacccacagctcgcccgacgagatgtcctccaaacctgcgatcatgcgcagcagcgtcgatttcccgcagccggacggtccaaccagaatcaaaaattctccttcttttatctcaagcgaaaagtcatgaattgcttcataaccgttccggtatacttttcccacatgttctaacgccaattcagccaaaataaaacctcccagtgctctcttacattgcaaactcaacagtccttattgtaagagttccaccgggaggcagctatcaaattcctgtaatattttttgtgttttcagtaaactttatatggtttttataaagtttgtacaattcgtgtaaattttttctgcttgacggaaccgccttttccatctaccataaaggtacagccgtaaaccagaaggctgtttagaaatgaggttaccatgaaaaaagtgaaacgtattcttgccgcagccggcgccattcttctgcttttgctgtatgcatccacgctcgtctgcgctttaagttccagcgagaattttatgaatctgctgatggtctccatctacgcgaccgtcatcattccggttctgctgtgggcgtacacgctcatctataagctcgtgcacaagtcgtccgaagaggacgccgagcaaaaggagccgccgcaggggcagggaaaatagatacaaatttcaggataagagaaaaaccgacagaatgttccagaatacaaacggatgcggggattctttgaaacaaaataagagaatttcttccctgcccgccgggacatcgaattccgtgtctttgtcacgcttggacaatccacagggtgtgtccgacaaccgcagacaatgagcggactttctagtgtccctaatgggcaccgcttcacagtcaatataaaaccgtgcgaaccgaactcgccggcatctgctattgaacacagggcaggtgccgactcagacagcggcttcgcgcggttatattttgttcagcggtgtccaaagggacacacgaaagtcctaaaattgtctgccggcttgcggacacaccctgtagagtgctccaagtttggaaagacatggatcatcaaggatgtttcggcgggcagggttagaaattccgcattttgtgtttagaatgtccgcatcctttgtatctggaacatctatcgtttttctcttattacggagtccatctccctgcccgtgcagtggctcttttgatccgtcctctactcttccgtactgtcctcggacgcggcgctctcggtcacgtctacgcccacagccgcctctacgccctcagtcgcgtccacactctcaggctcctccgtctcttcctcctttaacaattcctgcggtgtcttggagaaagtgccggagagatcccgcgacacgagatagatcttatcgctctctgccaccttcaggtaatactgcccggtcactgcatttttatctccgagctgtagcgtcgtcgtgccgtctgccgtggtgagggtaatgatccccgacggattttccagaccatactgcgccagatcctcgccgtctgtaatctcactctccgccgtaaggcccgtgaccgcatccagcatggcgttgatctgtgacgtgtcgagggtgagtgaaatatccccgtcccaggtccactctccgtccgttttcgtgtaggcataaacctgaccgcccagcacgtacgagaatgccgtcacatcatcggttttaaaatcgacgactgtaagcttctctgcttcctcctcgctcgcctctttttcctcctgtttctgattgtatacatgaattcctccataggctgctgcaagcactgcgaggacaagcagcatgccaaggaactgttttttctgtttctccattatttctttctccttaccgcccagatcacaacaccggtcacaatcagcagaatcggcaggataaccgttgccgcaagtccgccgatcagcgttccgagtgacgtaaccgtaatcgttccaagcgtatactccttgaccggaatgacgcccgtcgactctccgtcgtcaccggcaagctgtcctaacacatccgagaacatggacacatttcttcccgatacaatcgagtccgcattgtcggtcagcatttccgtggagccaaacaccaccagtttcatcgtgttgtcgtcatccacatcctgttctgccgtcagcgcaatcgtaaacggtcctgcaatgtccccgtcttccagctcagacgtctccgcatttgccacatccgtcttggacaccgcctgatcacttgtgacaagcagcggtgtgtaggtaatatcttccgattcctccggatagctcaatccctcgctgtacggtgcgaaaatgtacccgcccgtcacagatgaagtataggctgtcgactcaatttccggcaacagataatacggtgtactccggtagcatgctgatgcactgttttccatcacaatgccagctacccgttcaatgccgtacgtctccagaaccgaagcaaaattcggcagatcctgatactcgaagctgcaggcgatgagcgctcttccgccgccctgcaaatattctttcacctttgcggcatcatcctctgagaagtctgatgttggtccgttgatgataattgccgccgcatcttccggaatcgcatcttccgtcagcaatgtcagctgcgacaccgtcatattggctttctcaaccgcctccgaaaaaccgccggaaagcgtattttctccatgaccggtaatctcgtagatgaccggaagttcactgtccgctttcgtcacatactgcagggcactggtcagctgtccctccgcatcatacccgtccacagagcttgaatatgtagaatagtcataagaatattcatagacgtcgctgtagtccaccactctcgatctcgcgtccgactccacaatcatactgttctggctcggcgcactgtccgtgtactgctgataaaaattcgggctcttctccggatccttgtagaccacctttaaatgtttggagagatcttcataacgctgcagggtctccgctaacgtactgtccgccgacttctcggacgaaagcacatagatcgtgacatcctgcgacagattcttcacgtaatcctttgtggtatccgtcagactgtacatctttgtggaagttgcatccacagccgtccaggaggaaggcatctcctttaccaccagattcgccgcgattgcgaccgcaaatcccaccacaatcatcgccacggaaaacattcctgtggtcagttttttcgtcgtcatgctccagcgtctcttctgcacacactggcaggtcaaaaacagacacaatcccgtcacactgacaaaatacacgacgcccgtcagatccagacagccgctcataaaactctgaagcggggtatacagatcatatgcgcccagtaccttggtgatcagatggtcgccgatcaatcccgtgatgctgttcatcatatatcccagaaaaaggaatgcaaacgccaccaccgctgcaattacctgactctccgtcagcgccgacgccagcataccgactgcgatgcaggtacatccgtacagccagaagcccaaaaccgccacataattttctcccatcggcaccgtgccaaaggcagccagaacaagcggcgttacagcaatcaccgccacggcaacggtaaaaacgcccaccatggccagaaattttccaaaaatcatctttccaagcgaaaccggcgctgtgagtaccagctggtcagttctgctgtgccgctcttccgccatggaacgcatggtgagaatcggaacggcaatcaacatgataaacgagatcgccgaaagtgtgtacgacacatacggatatcccgcccgcagattatacgctaaaaagtacagaccgtacagtgccagaacggcagcgataaacagccatcctgtgatattctgaaaataacttttccactctctttttaaaattgcaatcatgcctgttctcctttcccgtctgctcctgtaagttcaaggaaaacatcctccagcgattttgtctccgtgtgcatttccagaaccggaatctcttcttttgcgcaggcatgaaacaatgcctcacggatatcttcgccccgctccgccgtcacatgaaacaggacttcctccgctgcttctcccggctctctgctcacttccgccacacccggaagttcctttaagagttcctccatgcgctgctctttctcttttaccagaagcgcgatttcctgtgctcccgacatccgctccagcagatgttccgtcgaatcgctcgccacaagttttcccttcgacaggataaacacatgatcgcagaccgccgaaatctctgtcagaatatgggaactcaaaatcacggtgtgcttttttccgagctccttcatcagttcacgcacttcgatgatctgcttcgggtccagtcccaccgtgggctcatccagtataatgacatccggataccccatgaccgcctgtgcaaagccgacgcgctgccgatatcctttggagagattgcggatcagcctctcactcacttccttcgtgtgtgtcagctccataatctcttctgtctgtgtttttcttacctttttatccagacctttcagctctgccacgaaatccagatactcccgcaccgtcatctccgtatagagcggcggtatctccggcagataccccacgcatttttttgcctcctgcggatcggcaaaaatatcgtgaccgttgatcttcacctcgccgctcgtcgcgccaaggtatcctgtaatcatattcattgtcgtggattttccggcgccgttcggtccgagaaagccatagattttcccgggttccaccgtaagcgtcagatcatccaccgccacatgttccccatattttttgaccagatgattgatttcaatcaaaaccatttcctcctttttcctgtttccgtatctagcctacgaaagaaatgtgttcaaaagggaatcattctgtgataattctgtgaaaacaaacccaaaggaattgtcgcaataagcatagaccactttgggtgataagtaatattataagaaacacacttggggatttcatgtggaaatgcagatggaatattcgtttgagaaaaatgtgagcatttcttcctgctgaatgtttgcatcggattccgtgtctcttccacgtttggacaatccgacgggtgcatgtccgacacacc

SEQ ID NO: 11512 - DNA, 3081 bp, Unknown
  gut microbiota DNA sequence
catcgtgcgctgatatttctggtatacctccggctgtttcgttctggctgctatgatattgacaaacaagaccgccttctgcgtataggaaagcgtactgtcatactggaaatacatctgaatcatgcgcggaactccgcccacctcacgcgcatccagcgacatcagatacgcctcatagagccctgtaagtcttatcttctgctcgattccgagctcataccaccggtggtactcggtttcgtaacactgtgtgcggatcagatatgcacagatggcagaaagcatctcctcctccggctccacctgatacgccgcctctaagatctcgtacagtacccgcgacttctcacgcacctccggcagcagatgcctgatctgctgtgcaagttcctttgtgaggactccctggcgcatcgcccaccgcaggactttcaattcatacgttcccagtctggttaaaagatagggatcctgccagatcagataatagctttccagatagagatacgggctgctgcatccgccctcgatccatgcttcaatcgccttatactttcttggactgctgtaatagtaggattcccgcaaaaacaaaagaatccagaacaacagcgaactcttcggattcttcttaaaaaggagttccatctcatccgtcagcttatcgacataggacggttccctctcaatcagtgtgcacagatacagatagtatccccattccggcgtctccctgtccctgcagccgcgcttataatcctccataatccacgaagcttcctgcttctgtcgattcacaatcaacgcctgcgctttcatcagcgcatacatctcacactccggttccattgccatcatatgatccaggagctccacggactgattcgcccatgcgccggtcacaatctttttcagccggtaatcaatatatagctgtgcaagccgcatccgtccgcgctgtaattccaaatgctcctccgatacggcttttgcgccgtccgtcgtggcgcacacttcaaacgtaagcgtctgctccggcaggacaatcgaaagtcttccaaaattcttcccggcatgcatggcagcttttttcacataatatggcacttccagtgtgcttccgataaaatcctcatccgtcagctgactcttttccggcaaaagaaacggcgcgtccgactcaatcgaaatggagagatagccccactcatcccggtgcagcttcaggctctccctgcggtcgccggcgacctgctcaaatgaggcatgatccgcaagaagcgtaaccgcaaccggctttttctgtctgcacccgcgcagatattcctccaccttctgccatgacgccgtgccgtccgcctccccgtcatagagaagacgctccctgacctcggagggctttagtatatttttaaaatgaccggaataaaacagatgatatgcctcctgggcactgctttttgccagtcccgtaaaatcgttcagattcttaatgcgtcccgcagaagtatccgcatacaatctggatacagacacaacaaaagaaaggttatattctccctggttgcagattagaaaaaaatcacccttgacaatatccccttcgatcagtccattgctatgaaattggtaccggatccgcacctcttccccctcaaactggggtgtcagacattccattctggaatcagaagtatagactactccccgaaacggcacatggttcgtacttgtgataatgaaatctccggtgtaatctctatcctccgtcacctcaatgtcgactttatctgcagaaaaagaaagaagcggtctggcgtattggaactttccccttgctagctgttgtatccgtttacgcaaattgacacctgcttttctattgcttttttgaacgcaatgactataatagattataaactaatttggaggagtaatcaatgataaaacacaaggaccattttcatggaagtgatctcgagaaaatagaagaaatctacggcattaaaaaggaagaaattgtcagtttttccgccaatgtcaatccgttaggagtatctccgctgttaaaacacacgctgtccgatcaaatcgacgccattaccagctatccggacagggagtacacttctctgcgcagatgcatcgctgcatactgcggaaccgagacggagaatgtcattgtcggaaacggctccaccgagctgatctccctttttattcaagtcgagcatccgaaaaaggcccttgtcattggtcctacttactctgagtacgaacgtgaaatcgcgctgggcggcggcaccacactctattatccgctccgggaagccgatgacttcaagctcaatgtcgaggattttctctcgcacttaaatgagagcattgatcttctcgtcatctgcaatcccaacaacccgacttcctcctcgatcccgcgcagcgacatgcgccacatcttagacgtctgcaagcagtacgacatctatgtcatggtagatgagacttacgtggaattcgccgataatatggcagaactcacggcagttccgctgacaaattattataacaacatcgtgattctccgcggcacctccaagttctttgccgctccggggctgcgtcttggatacgccgtcacaggcaaccgcgatctgatcaagtccatcaatacacgcaagaatccgtggacaatcaattctcttgctgtcatcgccggtgagacaatgttcaccgacagcgcctacatcaaagagaccaaatcgttgatctcctccgagcgcgcccgcctgtgtaagctttttaataagaatccggacttcaaagtatacgatccaagtgccaactttgttctggtgcgcatcctgcgcgaagatctcacctcgcaggatctgtttgaccgcgccatccggcagaaaatgatgatccgcgactgttcgacgtttccgtttctggataataaatacatccggctctgctttatgaagccagaggacaacgaccgtctgatccgttgtctcttccattagaattaaagagaagcgggatctgtgatattgtgagattacccgagaaccg

SEQ ID NO: 11513 - DNA, 5538 bp, Unknown
  gut microbiota DNA sequence
actcccctctcagggcgcgacattatatcacaagcatagtaagttcaacatataaaaactgcattttacattctttgtatgttccacccaatgaaaaacccccgggacatctctgtcccgggggtttttcgaggagtttagttatgaaaatgttaatctatataaaggaatcttcaccgaaaggttctgcagaaatatgacctttattccacatctctgagctgctgggaacgaagctctgggaaaccgtcctcagctcctttcgatgatgttagtatacggaaaaaatgtgtccgaagtatgtcgattttcataaagctttctaaaaaaacgttcaatgttatttagatttctttaatattttatttctatttttttataattgcctgcaccgtgcccgactggagcagccggatctccagctgtttcatctgctccgacgcaagactgttgcacaattccacggttccttgctgcgctctgccactgcacagaccgcaatccttaagcctgcgttctgtctcccgcgcggtccccgctccgccgtcaaagatctgcactccggctccgagaagcttctggattgtctcccgcacaaacggataatgcgtgcagccaagcacgacacaatccaccggatggctttggtacggttcaaacagatttgcaagaaacgcttcgagttctgcgccctccagcacgccctgctccacatactccaccagccccggacacggcagccggagaatctcggcatccgactcaaaccgctgcatcagggcatgaaacttctcctcgcgcagggtcatcggcgttgccatgacaagaacgcgcgggtgaccgcccgcgtgcaccgccggctttagtgccggctcaattccgatcaccggcatatccgcatatttttcccgaaggatccggatggccgcgcttgtcgccgtgttgcatgccaccacgagcgcctttacgccgcgtgacagcagatattcggcatccgcacaggtcagcttctgcacttcctccagcgtctttgtaccgtagggcgcattcttagaatccccaaaaaaaatataattctcgttcggcatctgtgccaccagttcccgcagcacactgattcctccgactcccgaatcaaacacaccgatcggacattcctgtctgttttcatacttttccactgctattcctcccagactgcctcgcttccgttctccgtgcgcgtgacataaagtctgtgttctatctgttcttttaattctgtcacatgggagatgattcccaccaggcgctcgcttcccgcaagctgtgacaatacttcaatcgcctgttttctggactgcgcatccagtgtaccgaatccctcatcgataaacatcatgtccagatgcacggcacccgccttgcggatggcaatatccgaaagtccaagcgccatggcaagcgctgccagaaacgactcgccaccggataaggtacggatatcgcgctcactgtccgtgaccagactgtacaccgacagatccagaccttcgttggatttgcgcccgctgttttccgtctctttcagcttaagcataaactgatgtccgctcatcgtcaatagccgtctgttcgcctcgtagatcacctgccggaaataccggcgctgcacatacgtctcaaaatcaatcttcgccgagcccgccaggcgcccatccgccgtgcagtacagtcttttcagcacctggttttccgcatcgagccgctcgtgtgcggcgaaatattccctgcagcgctccaccactttcgcatccgtctcgtatgcggtgtgcattgcaagaatctcctcatgaagctcctgctggcgctgtttttgcgcctccagttccgtctcccatgccaagatcccgatctcctgctttccctcggtcagcttctgcatagtcagaagcctgccctcactttccacgcgattccggacgtatgcctcagactgctgcacgagcgtctcccgaccgctctctgttaggaacgcctcgtggtatgcctcctccgaagaaaatccggcatcacgcagcgcctgccggtattctttctccaattccagacactcctgcacaagtccagcattcttcgtctgctcctgcgtcagcattccctcttgtctggaaatgtcttcctttttcttttgcagtgtttcctctgcatcagcaaggcgcttcgtacgccggtctgcctcatccgtcagctgctgcagcgcttcctctgccctttctttcgtctcaaatgataactctgcgcggatccgtgccgtttcccgctggtcttcttcccagtcgcgcttgagcgactcaagcttcaggcggtccaccgcctctcccgtttccccgggatgttttttcccctcccgtgaaaatcgctccgcctgccgtccacgctctgtcagaaacctcttttttgctgcaggttcttctgccgcctgctgtgcggcaaacgtataaagttctttctctccgtcgccgcacgcatctcccgcaagcgccagaaactgctgcttcgcctgctccagacgcagctcctgctctgccgccgcgcttttctgccggtcaaattcctgatacgccgtatcgcgcgccgtctccgcctgctcccgctgttccttcgccgcctttaccgccgcttcgctgaccgcattctcagcaagggacgccggatgcggatgtgtcagggagccgcagaccggacaaggctctgcctcccgcagattctgtgccagaatgcccgcctgttccttcaaaaaaagctggtacacgcgctcatattctgcagacgcctccgcagaccgggcggatgcccgctcccatgtttttgcggcgctggtatacttttcctccaacaaaagctgcccgtttttttccgcaagcagccggctggcgccttcccgcaccgcacgctcataatactgcttcgccgactcgtacgcctgctttgcctgctgttcccgctctactgcctcacccaggcgctcatacaccggaagctgttcccggatgcggagcattttctccgcgtcggcttccgccgcatcggcgctctgcatcttaagcgtattaaagtcctgctcctgcctgccatgtgcttccttttcctccgcgataaggctcttcatccgctccaccgtctcgtcggactgccgccgctcatccagacgctcattgcagcgcaattccttcacatgcaccctctccgcacgtactgccgcctccagctgttctttccggcgcgcttccacgggctcttcttccttcagcttctgtacctgctgttcacaggctcttaatccctcaaacagttcattgacttccttcgccttagagattgccgcagtcagtctccggatctcctcccgcacggtctcctgcgaagcggtcagctccttctcccaagtaccgatctgctccaccgcttccggaagcggaagttctttcagttcttcgcgcggcagaatcacgcgcgccctctcctgctcggcagcccgctcattttccgcaagcacccggtccatctcgaatgaacgccgctttaagttctcctggattctccagtatgcgtccgtgtgaaataatttggagaaaatttttttccggtcgtccgactttgcatacagaagttttaaaaaatccccctgcgcgatcatggcggtctgtgtgaactgttccttcgacagcccgatcagctcttcgatcttcgcatcggtctggctccttttttccggatacaccgttccgtccggcagcgtcagttccacgcctgccggaaccttctgctcccgcaattttccgtttttcaattcttttacgatcttatattccggatttctccgcacgcggtacgcctcgcccgcatacaaaaaaaagaattccacataggtctccgtcacgcttttggcatactggctccgcatcatggctccgcttttgcctccgccgctcgcctccccgtacagtgcataggtgatggcatcaaaaatcgtagtcttaccggcgccggtatcccccgtgatcaggaacagtccgcccgtctgcaccgtaaaatcaatctccgtgcgtcccgcatacgatccgaacgccgacaggatgagtttttcaggcttcattcgtccccctccatttcctgcgcaatcacctgacgcatcagttcccgctcctcaggcgtcatctctctcccattcatctccgaaaaaaacatggcaaacgcctcctccggccgcacttcggcaagcttctcttccgtgtccgacaacagcttcctcgtccgcgcgttgtcgatccgtatctccaggatgtggtcgtatttttcctccagacgctccttcggctggaacgcttccacatcatccgtgagggtgatgctcacaaatgcgtggcagacctcctcccccgcctgctccaaaatctcatgcagcgtcccggtcagcttttttacctcccgcaccggcggaagcggaatctgccggatcacaggcggctgtcccttttctcccagttccacgaccgtcacgctcttctcctcccccgcctcgctgatggaatacggaaacggcgccccgcaatagcggtatttttccgctcctatatgctgtgcgcggtggatatgtcccaatgcagcatagtcgaacggcgcaagcacgccggcatcgacattttcaacgccaccgacatagtggatttcggagtcacaggtcgcaggctcctttccgcccgccgtataaaactggtgtgacaggatcacgcatcttcgcgccggatctatctcctcgcgctcaatcaggcgccttaccgccatgtcatagccttttatttcctcgtcaaacagctttctcacataacccggcttcacaaacggaagcagataaaaatccacctcaccgtatccgtccgcaagcgtcacgcggcggatcgtctccccctcctgcatcggcggaagtcccgtgatatacacctcatgctttgcaagaatactgctggcaaaatcaattcttctggcactgtcatgattccccgcaatgatcatgactgcaatctgcggctctatctcgcataatgctgacagaaacgcatcaaagacagacactgcctccgccgaaggcaccggcgtgtcgtaaatatctcccgcaatcaggatggcatccgggtgctcgctttttgcaagcgccacaatctgcgccagtgtcttgcgctgctctgccgcgagattgtagtgatgcagctgttttcctatatgaagatccgacaaatgaaacagtttcaaatcgtttcctccccgctaagcttctgctaagtttcttttcttttctacgtgataaaaagttttcattcaccgtcgttcatggtataatgaatctataaacagtgaacatggagtaaagacgaacgcccatgcctacatgcggcggacggatgtggcagcatactaccggaggtgacagacgatggaacaaccacaggatttatttgggaactataaatattgtgaagaatgcaaacgaccgcttcc

SEQ ID NO: 11514 - DNA, 15470 bp, Unknown
  gut microbiota DNA sequence
acaaacaatttcatgtataagagcccgaaaaaaattttgcacgcaaaactttttccgggctctatttctgccttttcttaaattgtatctgaattgtcacaccggtctatgcggtagccgtattctccagatctcccaccagatactccatgatgtcgcacagcgtcacgattccggtaaccccgccgtaggcgtctgtcacgaccgcaaaataattctgctgctgtttcatctgctcaaaaagccggtttgccttcatggaatccgctgccagcatcggtttttgcaccgcgcactgcatcactttgtcacgcgtgtggtctttcatgcggaaatacgcttttccatcgaggattcccacgacatcctcgcttctccccgcaaagatcggataataggtatgtacgctctccgccagaatccggtcccagacggcttcatcctcctccgtggacagagataccatctccctgcggtgcgtacagatcgttccgaccgcaatatcgtcaaacccgaacacgttctgtatcatctctgtctcctcggtcggaatggttccctgctctcttccctcggcgagcaacagccggatttcctcctccgacaccgtctcctcttcctcctccgggtcaacgccaaaccgtcttaaccagaaattggtcgatgcggtaagaagccacaccagcggtgcaaagatcttcgccaccagggagagcattcctgccattttaagcgccagctcctccgcctttttcatcgccacccgcttcggcacaagttccccgaagaccagattaaaatacgctaaaatcaatgtaatcaccacgatgcacgcggattttaacgcctcctctgcaaccggtattccggtgcccctcaaaagcgtcaccaacggctgtgcaaagttttccgcggcaaacgcactctgtaaaaatccggcgagcgtgatcgccacctggatcgtggcaaggaattttgccggctgctttatgagcgcctccagctttccggcgcgcctgtctcccgcctcgcagagctgtcggagttttaaatcactcatcgagattaccgcaatctccgcgcttgcaaatacggcattcaaaaaaatcaaaaccatcaataagaatatgggctgcaacatgtctgctcctttctgtttccggcgtcctgtgatacgccctcctgctgcctgttacgtgttgtgtcatttacgcacaaaaaggtatgaccttccggtgtccaaaaaagacctccggtaagccatacctttacctattcataacactgcatggagcagccgtattctctttttaaaagcctgcatatctgtgtatcgctgtcactgtccgcactatcgtccatgaaactgtcactctccttcctgcgatgctaaatggaccgggaatcccgccattcacgtcatttaacataccacaggaaactataacagtcaataactgcacctctacagatactgctaaggtttcaggcagcggacgttttctcctcttcctgccgcactccgccctttttcaccagcagaaccgcaaacgctgccaccgcaaacagcagcaccgtcactgtaacacctgccgccgtgggctggtaggcaatgtccagccagccggtctcgctgcgcacaaccgccatcacattcgccccgatatgcgccagaacgggcgcatacaaaaagccggttctctccagcagccacgcgagcagcagacctaaaatgcccgcatacaaaaactgtaccacgttccagtgcatcacgccgaaaataaccgccgagagcacgattgccggcgcactgccgcacagcagggatagtcttctctccacgacaccacggtacaaaagctcctccgccagcggaatcacgaggcaggagccgagcagttcaaacacaaccccgccggcaaaaaacgcctgattcgcgctttgaaagcctgcggacgcctcaatgagcggcgtcatggcaatcacgttgttgacagccatgccaagagatgctcccgcaagcagcgcccccgccacagtgcagaaaaactttgcgtccggtctgatgccgcgcctgccatagacagtctcccgcgcagcgcgatcctgcccataatgcatccagacgaacggaatcgtggcagccgcgcagagcatctgccgcagcatgtaggattcctcccccgcgccgagcagcagcgtcagaaaaaagtaggcaagcgatgacaccacataatagataccgatcggatatatgattctccagattttataagcacctgtcgtcttcactctgcctctccctctcccgctgcgtcattctcaatgtatgtctccacctcttcgatgcggtcgaagaccgcctccgcacctgcggcgagcagttcttccctggtaccgaagccatagctgacaccgatacagcggattccgaacacctttgctccggcagcgtcatacttcgtatccccgatcaggcacagttcgtttttcccgatatggctgcccgccatgcggcgccccagttcctcgagcacttccgctttcgtactgatcgagccgtccagcgtggaacctaccacctcatcaaaatatcccagcagatcaaagtgctctaatattcttctgcacgccgtctctggctttgaggacgcaagcgcgagcagataaccatgctccttgaaacgcgcgatcgcttccctgacgccgtcgtagaggctgcactcgaagattcccttcacgtcaaacctctctctgtacttttccacagactgccacgcttccgcttccgtcatgccatacttttcgcgaaataccggatctaagggcggtccgataaagcagcgcagctttgtgcagtccggctcatcgatcccgtaagcgcgcagtgcgtattgcacacactttgtgatcccctcctcggaattgatgatcgttccgtccagatcaaataatacagcttttatcatcgttatttcttcgttcctttcgtgtcgcggcccgccacatgcagccggtttaacatcacaggctttccttttacttccgtctgggcgctctcgccctcgccgagcagatgaatcgcggtaagcgcatccccgtccgcaagccgcatgccgcggacaccgaccgcaccctttttcttctccggaatggtatccaccgcaatccgaaggaagaaatcgcgctcggactgcatgacgatcgtctcatctcccgcaaccggatgcacgaaaagcacctcgtccccgtcggtaagcttcgtcgccgcggtcgtgcgctttgcaacgtcaaactcgcttccgtccacaatcttaagcatcgccgtcttcgtgccgaagatcagcttgtggctgcggatcgctcccaggttcgtgatatagacaaagttctcctcgctgctgttgtaattgctcagattgtcaatcggcgttcccttgtcgcggaacttgccgaacggcagatccagcaccttgagcagatgcatctgtcccttgttcgtaaaaatgcagatcttatcggtattcttacaggtcagcacatagcggttctccgcgtcggccgcctcgcggttgcgctcatacgccgccatgtcgatcgtcttcgcgtagccaaaacgatccatcaggaataccacgtccatctcctcaatcttcttctcctcgacaaccgcctctttgagattgtcaatgacggtgcaccgcggtctgccatactcctttttgtaggcctccagctcgcggataatgacctttgccatcgccgcgcggttgcttaagatttcattatactccgcaatgttggcaagcgtcttctcgtgctccttcagcagagcctcgatctcaagtccgatcagcttgtacagacgcatctctaagatggcatccgcctggcgctccgtaaagcgcaggctctgcgcgtccttttgggactgcgccgacttaaaggcaatcccctcggtgattccctcggtcagacaggctctcgccattttgacgttcgcactgccgcgcaggatctcgatgataagatcgatcacatcgcaggcgtggatcaatccctcctgcacttccttcttctccagctcctttgcgagcagcgttgtatactttctctttgccagctcatactggaaattcacatgatgacgtatgatcggcacaattcccatcgtctccggtcttccgtccaccaccgcaagcatattgacaccgaacgtatcctcaagcttggtcttcttgtataataaattctccagattggcagcgtccgctcccttgcgcagctcgatgacaatgcggatgccctcctttgaggactggttcgtgatatccacaatgtcattcgtcttcttcgtctccacgaggctgtagacatcgtttaagaactttccgatattggcaccgatcatcgtatacggaatctcggtaattaccaggcgttcctttccgcctttgacctgctcgacctccacttttccacggatcttgattttccccacgcctgtggagtagatggctgtcagctcgtccttgttggcgatcacaccgccggtcgggaaatccggtcccgggatatactgcatcatctgctcggtattgatgtccggattcttcatataggcaatcacaccgtcaatgacctcgccgaaattgtgcgtcggaatgctcgtcgtcatgccaaccgcaattccctccgcaccgttgatcagaagattcggcacctttaccggcagaacctccggctctttctccgtctcgtcaaagttcggcacaaaatccacgacatccttgtcaaggtctgctaagaacgcctcctgcgtcagcttctgaagtctcgcctccgtgtaacgcatggcagccgctccgtctccctcgatggagccgaagttgccgtgtccgtccaccagcgtctgtcccattttaaaatcctgtgccagcaccaccaacgcaccgtagatcgaactgtctccgtgcgggtgatacttacccatggtatccccgacaatacgcgcactcttacggtacggcttgtcatagcggatgccgagttcatacatatcataaagtgtccgcctctgtaccggctttaacccatccctgatatccggcagtgcacgtgagataatcacgctcattgcatagtcgatataggatttctgcatcagctccgaatactcggtgcggataatctgttcttcctgtttcatggtaatcctcatttcctgccgcttcttcctgcggctctctcatcccgcgcatgatcctgccgcacggtatcgcatctgtcatgcgtccacggtcgcatccgtcgcatgctcatagataaaggtcttgcgcggcggcacgtcattgcccatcagaagttccgtgatgtcggacgccatacggccgtcctcaatctcaatccgctttaacagacgtctcttcggatcgagcgtcgtctcccagagctgctccgcatccatctcgccgagacctttgtaccgctgcagcgtaaaactgcccttgtggctccgtctatagcgctccagcgcctcatcatcgtagaggtattcttcctctccgcggcttggaatcgccttgtaaagcggcggcattgccacatagacatgtccctcatagatcagttccggcatgaaccggtagaataacgtcaaaagcagcgtggaaatatgcgctccgtcgacgtcggcatccgccatgatgataatcttgtcatagcggagcttcgtgatgtcgaaatcattgccgtagccctcggaaaatccgcagccgaacgcattgatcatcgtcttgatctccgcgttggctaaaatcttatcgatgctcgccttctccacgtttaaaatcttaccgcggatcggcagaatcgcctgaaagctgcggtctctcgccgtctttgcggaacctcccgcggaatctccctcgacgataaaaatctcgcagatcgacgcatccctgctctcgcagttcgcaagcttgccgttggagtcaaaggagaacttctgctttgtcagaagatttgtcttcgccttctcctcggtcttgcggatcttcgccgccttttccgcacaggaaatgacggtcttaagcacttccaggttcttgtcaaaatagagctggatctcgtcgccggtcaccttcgccgtcgcacgcgacgcgtcctgattgtccagcttcgtcttcgtctgtccctcaaaacgcgggtccggatgcttgatggagacgactgccgtcatgccgttgcgcacgtccgcgccggtaaaattggcgtccttatccttcaagatgccaagctctctcgcataggcattaataacagtcgtaaacaccgtcttaaaaccggtgatgtgtgttccgccctccgcgttgaaaatattattacagaagcccagaatattctcatgaaattcgttcgtgtactggaacgccgcctcgacggtaatgccctcagtctctcccttaaaatacacgacatcatgcagaacttccgtgctcttgttgagatccttcacaaaccccttgatgccttccggctcgtggtagacgatatgctcggtctcctcccctctccggtcctcatagatgatcgtaagctccgggtttaaatatgccgtctcatgcatacggctcttgacctcgtcctccttgaaacgcgtcttctcgaaaatctccgggtccggcaggaaattgaccttcgttccagtcttcttcgtcctgccgatcttcggaagcagtccgttctcaagctccaccaccggcacaccgcgctcatagcggtcgtgatgaatgtagccgtctctgctgatctcgacgtccatataggtggacagtgcattcacgaccgaggaacccactccgtgcagtccgccgctggtcttgtatgcggaatcgtcaaacttgccgcccgcatgcaacgtcgtgtacacaattcgcgctgccgacacgcccttcgcgtgcatgccaaccggcacgcctcgtccgttatcttccactgtacaggagccgtccgcctccaatgtgacatatatggtatcgcaggcacccgccagatgctcgtccactgcgttgtccacaatctcgtaaataagatgattcagaccctttctggacacacttccgatgtacattccgggtctcttccttacggcttcgagtccttccagaacggaaatactactctcgtcataagtctctttctttgccatgttcttcttcctttccttgacattcctctggataatataacatactgggaaaacccgtgcaagcaacagaacgtatgttttgtaaaaattttctatttttgtgcaaacagacgaaatacgcggaaaagaatccgattgctttctttgtccgcgtattatcatttgcttttctgttgtatcttacatgttcatcagctcagctgccttatccttcagatcagaggaaatctccttcaccgaatctgtggatgcggcgatctcctcggtgcttgccgccagattggtcatccgctcatccacttcccggataatctctgtcagatgatccgactcctccaacagctttccgatcgcctgactgatctcattcttgttatcgttgctgtcgtttgcggttgctctgctgttctccgagagattcttgatctcctccgccaccaccgcaaatcctctgcctgccgcaccggcacgggcagcctcgatggaagcgttcagtgagagcagattggtctggttggcaatcttcgtgatgtcgttgttgttgttctcaagcttatccaaaagctccgtgatcgtctcaaacgactgccgcatctcctggcagaatccggtcacgccggtcatcgcatccgtaatcgccgtgctctcgctcgcattgctgctattcccggcagccatctgcccgatggcggaatccagttcctgaaaatcggaattcagtccctcgataattcctgcaatcagatcgcttctgcgctggatctccacattcgcctgctggctttcctccgcagccgcctgtgccgcacgccctctttcctccgcctcgttcttgataaaatgaatacaggaattctcactgttgcacccgttgtagatcgctgtcgccatatcccggcaggtcttataaccgcaggcgctgcagtcgatcgcacgatccatcgccgtctgcttgttcagacggctgtatactgcttctaactcctggccctccggcacgcggatctcattccccttcgaccggtcggtataccggcgcgtaaaatccgccggatcaagctgcgcaaactgacggttcagctgtgccagccgctgcttcggcgtcgccgatctcgcccacggtcccttgaccttcttgctcttctcccggatcttatgcagctcgtagagcacatcatccccggcagtcttctccggctcaacgcccgtaccgtagatgcatcccatcgcacagttcagcgcatcgaccataaacggcagctccttgtgctctgcgacacgcttgcgataggcatccaggaattcatagacatggcgctctccctcgatctgccggataaacacatcctctccgcagaaccagtagacattctccttcagccctcccggcatcggatagatcgagccgagaccgtattcgatctcatcgctgacccccggtccactgatccggtgcttcctgcagtaatccatcaggtgatcgaatgtcacattataagaaacatagccgtctgtatccggatcggaaatctcgttcttcttcgcaatgcacggactgatgaacgcaagcttgtccgtgatatgtaaatacttcttcgcgtagattgccgcacacatcatcgggctgtgtaccggcatcagcttcggaagcagctccggtgcatacacctcgatgtagttgaccaccgcaggacacggctgcgagatcccgcccgtaaactgattcttcgtaatataattgatatacgcccaggtcgtaatgtcggcgccaaagctgacactgatgatccgctttgcccccatctgtcttaagccgcctaaaatctgctcatactctctgggataattcgccagaaatgccggcgccagaagcagtgaaatggattcgcctctctgcagatccgcaaaaaactgctccgtatcatcggcatattccctcgcctgatgttcacaggcatcaaaacatgcaccgcagttgatgcactgtgcatggttgacctcaatgcgtgacttcccgtccaccacgacagcctgattcgctgtcagaatgggacagacggaaatgcaccggttgcacccaatacagttctcattcgtgtaaacatagccagccataactcttccactcccttatgctgtcttttgtttaattttaacatatagtgttgttttcatcaactaattcagtgcattatcactatttttgacatactgcatgtgggaaatgaccatcattgcaatcttgaatgtcatcgcatcatcaaacttgcggatatcaagcccgatcaccttctccaggcgctccagacggtacaccaacgtgttcctgtgcacataaagctgtcttgccgtctcagagatattcagattgttctcaaagaacttctgaatcgttgtcgtcgtctcctcgttgaacacatccggaatttcatccccaaatacctcatgaataaacatctcgcacagagacatcggaagctgataaatcagtctgccaatacccagataacggtatgcgattgtctctttttccacatagaagattttccccacctcaagcgccatctttgcctcctggtaggatttcgcaatatcctgcaggttgttcacacggttgccgtagccgacccggacgcgtaccatcgcctccgcgtgcatattgtccacgatcattgacgccagggaggccagatcctcgtcctctcccatctctctggtatctttgatgagcacaatgctttgctcgtccacctctgtgacgaaatccctggtcttcgccgcgaacagattcttgaccagttcgatcgccgtaccgtcctttttcccttccagctcgatcacaaataccacgcgctccgcctgctcgatgtgaagcttctgcgccttgttatacatatcgaccacgagcatattgccgagcaggatattctgcataaaattgttccggtcaaactgctccatataagcagacacaagcgtccgaatctggcagactgccagttttccgaccatgtacgcgtcctccgcagaagatttggtcaaaaggacatattccagttccccgtccacatacaccttaaagaaatgacatccggacagcatctggctctccgccatggaacccgcaaaagaattcacagcgtactccatatccccttccgtttcaaacgtcgctgccacctgctttcccttatccgtatatagtgccagatcaatcttggaaatctcttttatctcatctaatgctgcctgtatcttgtgattcgaaatcatgtgtctcacctttcctgtcaaatattactgtacattgacatgcctcatgtgttccatacgttaataaaaactgggtacaacatgtgcacccagttttacttttaagtcctattcaattctaacggattagttggtaattgtcaattctgtttctttgtcgaatacgtgaatcttctccggatcaattgccatcttgatgtggtcgcccatacgtgcagttgttctggaatcaacctttgcagtcatgcttgcgcctgcaactttgaagtataacagtacctcagaacctaataactcatatcctgtcacatctgtctcgaatgcagcatccttatgagcctcgatctcgatctcggaatcaccgatatcctccggtctgatacccataataactgtcttgccattgtatccgccgtcagctaacttcttagcttttgcaggaggaagaataacagttgtgttctcgaaggaaagggttaccttctcaccctcaaccttgcatacagcatctacgaagttcatctgcggagatccgatgaatcctgctacgaataagttattcggctcgttgtataacttctgcggggaatctacctgcatgataacgccgtcctttaatacgacgattctggtaccaagtgtcatagcctcggtctgatcatgtgttacgtagatgatggttgcttttaatctgttatgtaaggaagcgatctcggaacgcatctgtacacgaagctttgcatccaggttggagagcggctcatccatcaggaataccttcgggttacgtacgatggcacgtcccatggcaacacgctgtctctgtccaccggagagagccttcggcttacggtctaataacttctcaaggtcaaggatctttgcagcctcctcaacttttctcttaatctcatccttcggaacttttcttaacttaagaccgaatgccatgttgtcgaatacggtcatatgcggatacagagcgtagttctggaataccattgcgatatcacgatccttcggctctacgtcgttcatgagctttccgtcgatgtagaactcaccggaggagatctcctcaagacctgcgatcatacgaagtgtagtagacttaccacatccggaaggtcctacgaagataatgaactcctgatcctctacttcaaggttgaaatccttaacagcctcaaagccgttcggatatactttgcaaacgtttttcaatgataaacttgccattggtacgatacctcctaaaatttgttcgtttttaactactcttactatacaaaaaaaacagccaaaataccatagaccgcctacacaaagaatttttgcttttcttgtagaatgtcacagtgttttggttgttttttctattctttcgtcaaaccgacaggttttccatcaaaaagtaagcactttgacgaacgcattactgttttccagtgcttccgaatccgccgcggtttttgttgccgaggctctccacctcgtcaaacgtgatcttcggctgattttcaaaaatgcggaactggcagatgcggtcattgacgtgaatcaccgtgtcgcgcaccgcatagaccggcatccgccacatatcgtcatccccgcagtaggtgccatcgataatgccgcagctgttcgtctggatgattccgtaatttttgaaagtggagcttctcggtaccacatgcgcctcatagccctccggaagctccatggcaacgccgagtggaatcagacagaactcccccgctttcagtgtcacttcctcagacgcccgaagatcgatccagtccgactttccgtcaatataggtcagacgttcaatcgcatccgtaaaatatttaatcctgatctgtggcatgtatgttcctcctgttatgtcgatttctttatgtttcccactccggggcgccatgtcgcatttctatgcttcccactccggggcaccatgtcgcatttctatgcttcccactccagggcactatgctctgcacgccggtcgcgcatcatcagttcccgcactgcttcttttgccggcttatcctcaaaaagcacacagttgacttcctcgatgatcggcatatcgaccccgtatttttttgcaagcgcgatcgccgccttggcggaatacacgccctcgaccaccatcttgacctcatccatcgcctgcttcatggtatagccctgcccgatcagcattcctgctttgcggtttctgctgtgtctgctctcacatgtcacgatcagatctccgattccggtcagaccgctcagtgtctccgcctttgcccccatcttgatggcaagacgcgacatttccgtgattccgcgcgtgattaacgccgctttggtgttgtccccgtagccgagtccgtccgccataccggctgccagtgcaatgacgttcttcagggaacctcccagttccatgccgagcacatccgggcttgtgtacacgcggaacacctcattcatgaaaatatcctgcacgccctctgccaccttgcgcttctttgctccggcaacaacggtcgtcggcagtccgacgccaacctcctcggcgtggctcggtccgcacatcacggcaacctccgccgcaggtacttcctcttctacaatatcggagagcgtcatcagcgtattttcctcaatgccctttgccacacagacaatgatctgtcccgccttcacaaaaggcgccatgctttttgccgtgcttctggtgaatacagacggtaccgccagaatcagatattccttatcttccactgccgccttaagatccgtggtaaattccatatcctccggaagcttcacccccggaagcttatccacatgttcatgccgttcgcgcagcatcgcgatctccgcttccacaatcgaccacaccgtcacctggttgccgttggtgtgcaacaccttcgcgagcgctgtcccccagcttcccgctccgattaccgctacttttgccatatcttttattttccctcctgtttgttcttcttgaacgtgaacttattctccgtgccgtgcagcagacgtccgatgttgcttctgtgacgccacagcgccatcgccgtaaagcaggcgctcaccacatagaactccggaaggtacgcggcatcgatatgcagatatcccatatgtccgaagatcagtacctgcaccagatagctcgtcaccaccagaattgatccaagcgacacatatcttgtgatcgcaatggaaccgatgaataagaccagacagaccggcgccgccagcggacacacggcaagaatcatgcccgatgtgcaggcaattccctttccgcccttgaacttgaggtaaaacggaaaattatgtccgagcacagctccgaaaccggcatacagttccagaatcttaaccgcatccggataagcgttccagaacagaaccttcaccagaagaaccgccagaatcgccttgcacagatctcccgcaaacgtgatcagtccagccttgattccaagcacacgcagggaatttgtcgtccccgcgttgccacttccctcactgcggatatcaatcccctggctttttccgtagagataccccgtctgaaacagtccaaacagatacccgattcccaatgcaataacccttgctcctatcatcactgctcttcctttctctcccgaataatgaatttcagtgccgttccgcggaaaccgaacgtctcacggatacggttctccagatacctggtgtaggaaaaatgcatcaattccttatcgttgacgaaaatcacgaaggtcggcggctttaccgcaacctgcgtcgtgtagtagatgcgcagacgttttcccttgtctgacggcggctgctgcatggcaactgcctctgtcacgatctcgtttaagacaccggtcgccacacgcatgctattgttcgcaataaccacatcaatcagctcaaaaatcttatttaagcgctgtcccgattttgcggagataaaaataatctcggcatacggcataaagcttaaaatctgacggatcttctccgtgtgacggtagatcgtcttgtcatccttctcgatcgcatcccacttgttgaccgcgatgataattccttttccgcgctcgtgtgcgattccggcaatcttggcatcctgctccgtgacgccctccgtcgcatcgatcacgatgatgcagacatccgcccgctccaccgctgtcaccgcacggatgatgctgtagcgctcgatctcttccttaatcttattcttccgtctaagacctgcggtatcaataaagacatattcttttccgtcgtaggtaatgtcggtatcaatcgcatcgcgcgtggttcccgcaatgtcggagacaatcacacggtcctcctgtgccagcttgttaatgagggaggacttgccgacattcggcttaccgatgatcgcaaccttcgggcgctcgtcctcctcctcgtccttcgcatagtctgggaagtgcttgaccacttcatccagcatatctccaagtcccagcatggatgccgccgagatcgggaacggatcgccgatgccgagattgtagaactcatacacgtccggcatgaacttctcaaagctgtccactttgttgaccacaagcacgaccggcttgccggaacgtctgagcatatctgccaccttggaatccgaatcctgcagtccctgtctgacatccgtgaggaaaataatcacgtccgccgtcgcaatggcaatctccgcctgctctctcatctgcgagagaatgacatctctgctgtccggctcaataccgccggtatcgatcatcgtaaaatgataatccagccagttgacgtccgcatagatacggtctcttgtcactcccggcgtatcctttacaattgaaattcgctctcctgcaagtgcgttgaacagtgtggattttccaacattcggacgccctacaaccgctactacgggtttactcatctatctgacctttcc

SEQ ID NO: 11515 - DNA, 4862 bp, Unknown
  gut microbiota DNA sequence
taaagagaagcgggatctgtgatattgtgagattacccgagaaccgaaagttccggaatagaacagacgggggcaaattctttgaagcaaaattcatgtatttcttccttgccgcagctggcatcccattccgtgtctcttccacgtttggacactcacggagtgtgtccgacaacccgcagacaatgagcggactttctggtgtccctaatggcacctcttcacagacactataaaaccgcgcgaaccgaaactcgccggcatctgctattgaaaataaggcagatgccaactcagacatcggcttcgcgcggttatgttttgttcagaggtgtccacaagggacacacacaaaagtcctaaaattgtctgccggcttgcggacacagtccgtggagtgttccaaacttggaaagacacggatcatcgaagatggcaagcgcggcatggttagaaataccggattttgcggtcagaattgccgccgtccgttgtatccggaacttccagttatctgttttttgcaatatcacggatcccgcttttctttttatgtaaactgcttcatctcgtcagttctgcctcggatcgttccgatggccccctttacttcctccgcatagttccggttctgctcgcttatctcacgcacctgctcggcgcttgcagtcacttcctctgtcgctgcagacagctgtgagatattctccacaatacggttgttggaatccgacagtcctgtgatctgtcccgcgatctcattgatatctccgataagctgtgacatattttcattcagacgttcaaaagactctgccgcaaccgcaatcttctcattctggctctctgtcgcttccaccgaagactccaccgaagtcataacgtcgcgtgcattttcattcagctcgttgatgatcgtggtaatctcctccgtggacttcttcgtctgctcggcaagctgtctgatctgttcagcaaccacggcaaatccgcgtcctgcctcaccggctctcgcactctcaatggatgcgttgagtgccagcaggttcgtctggttggagatattgaggatcatgcctgcgatctcctcgacctccttggtcttattctgcaggcgtgtcatggactccgtcacttcatgattcgtcgccgcaatctgctcggactggttcttcaattcttccattacctgcagattctcctgaatattctcattggaatccgtcgccacatccaccatctttctggagcgctcgcccgtctcgtcaatagccgactggatactctgtgtcatattattctgctcttcgatattcttcgccgtcgtgttggttgcggaagaaatctcctgcatgctctgcgcaactgtctccgaagtgtgcaccagttcatccacaagactggtactcctctcagactcatcccgcacagtctttgagatgtcaaggattccttccagcatcaccttctgtttctcaccctcggacgctgcagaacccagtgcatgatcgctgaatgtcttggctatgctgcccacccggtacataatgaaaaataacagatacacacataatacccggcacaagctgtccacatcctgcaaaccaatccccttgattacacgaatgacctccaccagtgtaaataacgccgtaaaagcgatacaggtctgtttatatctcttcatatcataatacggaatctgcaatgtcagaatggcaataagtgcaaaatagataaactctgcatctgtctgcattccaatcaacgcaaattctacgccgacaccgatggcaacaaccctctttaatctcacatcagacttattgcgcagataaaacgccagttcaaccaccgcaaataaaataatcagcacaacatttccgaccgccgtaccgactgcaatgctcttgctcgcaagcttcgccagcagatacaccccaaacagtacccataaaataaccactgcaaaaatataaaatgtattcatatagcggtagcgttcactcttatctttataaatgtaattcctgtctgaacccgatgtctgacccatagtcttactccctcctgtcactctttctctatcgattcaaaatctttttttattatagttcatttctcctattttttctactgtttttcaattattttgactaattttttacacattccttatcctcgcgcaacacaacgcatccgcttcttttccgtaagctgcggcgggttgctccagcgacataattctactccgacgcagtgagatcctgccgaagggctttttcattcataggacgtaatttcctatgaaaaaatccggcggatacttccgccggatctctcatccccactctttttcatatgccgtatacaaaaactccacgcagccgtctacgcggtacagcctgaaattctgtaaaaacaaaagtgccgcctcgtacattttttcatcctgctcgtccgcaaggcttccctcaagcagataactcatgccgttgtggtattcccgtccgtcctgtatcgtgtagtggcgccacagttcttttcgttgcgcacatgcggtctgctcccgcataagcgtctccagaaactgtacgcacggtctttccgcctcgctgtaatgattccggtacagatacacaaaatggtgcggcggttcgattccgggattcttcaagccatactggttgaccggataattgtccttctgctgcacccagccaaacaccccgtgaaatgtcaatccgccaaccgccgcaaactgcgtcctctgctctaattcctccggggaggataccttctctcccagttccgctgcaattcttccggcaaccacaaaaagccgtctgtgcatctgtgcacagcggtaaaaataccaggcgtcatagtacgtcgtgccggaccagttcaagccgcagcgcgccgtcaggcgctttcccgctctctccatggaaaatacactcatccgcgcattggcacgcaggaaaaattcaaggacagtctccgtgatttgcggctccgtcttcctgcctgtgccgcctcccgtgtccttacacttctggcagcacaggccaaacagttctcccacaccgtcctcgtccagctttttttcgtgatagtcccgcaggatggcattggcaatctgatagagaatgttggctttccactttcccaccatgcgcacgatccccatgatatcctcataggattcacaccagagttcctccggatcctccgaatgttcaaaggtgtctcttccggggcggatccagctctcgccgtcgactgccggtctggctttttcgctttccgcctcccgctccttcgcctctttgagcagagactccagaaagagaacgctccacttttttctgccggtcttctccggaatccggtctgctgcgctgaccttttttgtcttcacccgctctgcttccattcctaacctttcgcattgtagcggctgccggtctgccgcgtctgattactgtccgacgcatagcggctgtaattgccgctggtcgtataagaagttgcagaaagcgctgccgcctgttttctgcagttgctcttcacacccgaagccagcacctgcacgcggttcgacagcgtgctcttatccccgaaaatcttctgcaccgcctccggttttaccgtctgaaacaccgtcttatctaacaacagcgtgccgtctctctgcagcgtgattccgatctgttttaaggcggtctcccgcgcggagatctccgttttcagcttctttgcatacgtctcgtccacactgtccgacaagtcaccaatcttgcggatcatcatattgtaatcggatacaaaactttccatttccttcgtaagctgctttccggtgtcctctccctcctggtaaagggatttttctccctcctccagaaaacgcttcatatgcgtctccacacgctccgccgccagtcccgtgatctcataatcgtagctttttttctgattctccacgattttgtcgccggatacggctgtcccgttttgaaactgatttaaaaactgcatccacgcagatgtcctgtagtttttactctttggcgcgctctgcgtcgttcctttggatgatgcgcgtgtctttgtgctgctggaaaacgcacgcatctttgccagccggttgttcctcgcacccagaatggcagactggtctctgttataaattctcatactcattttccccgtttcttttctgtatccctatcgttcgttaagatacgtctcataagccgacgcaaaatcattaaacttctgtttcgccatcagaatggattccccgttcttcagcaggatcgttcccacctcaaaactttttaccgcggcaaaattcaccagatacccgcgatggcagcggaaaaacccgttgcctaaaatttcttccacctccttcattctggcataatatgcaatgattcccgtgtttgtgtgaagcaccaccttacgccccacactctctgcatagagaatggttttctgatccacacagcaataggttccgtctgttttaatcagcagcgggcgcttcctttctgcccctgcttttctctgtttcagttctcccgcattgtcaaacgcttttctgcggaaccatactggaatctttttctggcactcctctatgccactatccgaaaggaaaagaacatccggcattgtgccgcttccctcaatttcatctccgcaaagaatctgtacatcctctcttacatattcgccttccatctcttttaaatacttacgcacggatgcctcattcccgcacgccgcaatgtataacactcatattcctccccgctttcgcatccatgctctgttttctactttatata

SEQ ID NO: 11516 - DNA, 1954 bp, Unknown
  gut microbiota DNA sequence
gcttactgtattattgtattatcttattagtacagatgatttagtagaaaggagatgacactatggcatggacccttgattctgatcgtcccatctttttacagattgtggaacgaatccagacggacatcgtttccggccgctaccagccgggagataagcttccgtctgtacgtgatctcgcagcggaagcatccgtcaacccgaacaccatgcaaaaggcctttgcagaacttgaacgcaccggtctggtctattccaggcggaccagcggacgttttatcacggaggattgtcatatgatagaacagttaaaaacctctctcgctaccgagaaaatggaagaatttttagcacagatgcggcagctcggctttcagaatgatgaaatcctgtcgctcatgaatcagacgatgaaaggggaaaaacaatgagtaccttgttggaatgtaaagatctgaccaaatgttacggcaaaaaaaccgccatcgaccatatcaacctcgccattgagagcggacatatcatcggtctgctcggaccgaacggaagcggcaaaaccactctgatcaagatgatcaacggtctgcttgcccccacctccggttccatcttcatgcagcagaatccgatcggcgcagagagtaagaagcatatctcctacctgccggatcacacttatctgaatatgaacgagcgggttcgcgatattatccggtatttttccgatttctatgaagattttgatgagaagcgtgcctacgacatgttgggaaaacttcagattgacgcctcggatcgtttgaagaccatgtccaagggaaccaaagaaaaagtgcagctgattctcgtaatgagccgtcatgcggatctgtatattttagatgagccgatcgcaggcgtcgatccagcagcacgcgattttattttaaatatcattctgtcgaattacgaaccggaagcttccattttgatctcgacgcatctgatcgccgacatcgagaatattctggatgaagtcatcttcatcgatcacggtcagatccggctcaccgcatccgtggatgatatccgtatgaacaacggtaagtccgtcgatgcacttttcagggaggtatacagatgttaaaaaaattatttaaatatgaatttaagagcacggcaaagatcatgttgatcctgtacgccattctgatcatcaccacctccgtaggttccgtggtgctgtattccttagatctggatcaggcgggtgaaagcaaactggcatccattctatccgtctccgcgattgtcctttatatccttgccatttttgctgtccttatcgtgatgtacgtgtacctgtgtgtccacttctaccgcacaatgtattctgctcagggatatctgacacacacgctcccggtaaaaacacttgctccttttcacgtaaaactgataacctccttcgtgtggatgtttctctccatggctctgatgactgcctccatcgtggcgcttatcgccagcgcctcccacggaaccgcatggcaggattttacttccgcctgggaggagttattcggtcaggacgtattttccttccatttcatcttccagatggtattgggcgtaatctgctcctgcttaacctacctgctctgggtgtttgcaagcgcttcgatcggacagcttttctccagcaataaagtggctgcctccctcgttgcaggcatcgtcctctattttatgcagcagattttctccatgatcctcatgtttggaaccggtatgttccagtcgggagataattccgtgaatttctttgccgttaccacaacgatcgacaatacgaccacatcgacggcaagtatcctgccgagttcactgtttgtcaccagcaacatttactcgatcatcgtcattgtcattttgtaccttgtgtgcgcgagaatcatcacaaagcatctga

SEQ ID NO: 11517 - DNA, 4888 bp, Unknown
  gut microbiota DNA sequence
ttagaaaaatcaatcttttcagactcagtttttacatttttttcaggtgcttcagaagctgtattatttacatcatttttcttatttacaccatctaaggacttcattgtcgggaacaacagtacatcgcggatggccgggctgttggtcatcatcatgaccatacggtcgattccaaatccgatacctccggtcggcggcataccgatggaaagtgcatttaagaaatcctcatcggtgtggttcgcttcctcatctccggctgcaaaagccttctcctgggcagcaaaacgcgcgcgctggtcgatcggatcattcagctcagagtaagcatttgccatctcccagccgttcatgaagaactcaaaacgctctacatagtccggattctccggcttcttcttcgtgagcggagaaatctcgatcggatgatccatcacgaacgtcggctggatcaggtgctcctcgacatactcctcgaagaaaagatttaagatatcgcccttttcgtgacgctcctcgtactcgatgtgatgctcatctgcaagcttcttcgcctcggcggtatccttcacctcgttaaaatcgacgcctgcatacttcttcaccgcatccaccatggtaatgcgctcaaacggcttggagagatccatggtatgctccccgtaggtcagcatctcggaaccggtcacttcctttgccacatagcggtaaaggttctcggtcagatccatcatgccgtggtaatcggtatatgcctgatacagctccatgagtgtgaactctggattgtgtctggtgtccagaccctcgttacggaacacgcggccaatctcatagacacgctccatgccgccgacaatcagtctctttaagtaaagctccagagaaatacgaagctttaaatcctcatctaatgcattgaaatgcgtctcgaacggtcttgcagccgcaccgcccgcattcgacacgagcatcggggtctcaacctccatgaagccctgtccgtccagatagcggcggatcgtgctgatgaccttggaacgcttcacaaatgtgtccttgacatcctcattcatgatgagatcgacatatctctgacgatatctggtatcggtatccgtcagtccgtggaacttctccggcagaatctgtaagctcttggaaagcagtgttacctctgctgcatgaatggaaatctcgcctgttttcgtcttaaaaacggtacccttcacgcctaaaatatcgccgacatcatactttttgaaatccgcgtaggactcctcgccgatgctgtcgcgcgctacatagatctggatacgtccctttaagtcctgaatattgcagaaagatgccttacccatgacacgtttgaacatcatacgtccggcaagagatacctccttgccttccatctcctcaaaatgctccttgacatccgtgctgtggttcgtcacatcatacttagtgatgacgaacgggtcctttccgttctcctgcagttcgtgtaacttatcataacgaaccttgagcagctggttgacgtcctgctgctggttattattctgctctgccatgcttttcctccatttatcctgcgccgcctgtccgcgtgaagcggagtccgcagacgttcatgttctactcgtttgatgatctgtgaatggaaagtatcttgtactcaaactctcctgccggtgtcgttaccgttacggtatcgccgactttctttccaagaagcgccttaccaaccggtgactcattggaaatcttgccctttaagctgtttgcctctgtggaacccacgatcttgtaggtcagctcctcgtcaaattcacaatctaagatctttacctgacatccgatgcttaccttatctaagtcagcctcttcctctacaaatacctcagcgttcttgaggatcttctcgagttcctcaatacgtgcctcaatatctctctgctcgtccttcgctgcatcatactctgcattctcggacagatcgccctgctctcttgcttccttgatcttctgggagacttcctttctcttgacaacctttaaatcctctaattcgtcctccagttttttgagtccttcatacgtcagaatgtttttcttgtccattactctctacccttctttgtgatttttatcagttcaattctcataaaaagcttcttcaaatcggtcacgtccaagcttttctctctggtgatgcatgctcttaacaatcacagtattataaccgataggcaccatgatgtcaagattttcgccctgtttccagggctttttgtggatcggaatgtaggttgccgcggcgcagatcatctctgtccggtatgctccctcccactcaaaatccaggattaccttccgggtcagaaacgtttctctcacccccgcctgtccttcccacgcagacagtctggtttttggaaaaaccatcaccaccagcccgttctcctcatacattctctctgcaaacgcagaaaaatatgcggggcgcccggtgtacaccgtaaggtaattcagatcgtcaccgatctgttcgagcacatcgcgcacatccgccggttcaaagacatggctccgctcctcgtcgatcaccacaagctccacgcgctccgggcgaaagctttgcgcctttaagatcgccagaaataccggtcggaaatttctaagaaactcattggaataggacatttcctatgcctcgtatccgtttttctcattatatgactccacttcccggaataatgcctcgagctgctcgtaattctccacctcgttgattcttcctcgaagcttggacgaattgcggtaccccgcggtgtaccatgccgcatgcttgcggatctcacggatgcccgtgtagtctcccttgcagtcgatctgcatctttgcatggcgcagcagcatctccgtcacctctgaaaaatccggccgggaaaggtgctcccccgtctcaaaataatgcagaatctgacggaaaatccagggatttccctccgctccgcgcgcgatcatatagccgtcgcagccggtctgctctgccatcgccgccacatcctccggtgtgcggatatccccatttccaatgacaggaatagataccgcctccttcacctggcggataatatcccagtccgcatgtccggcataatactgctctctggtgcgcccgtgcaccgcgaccgccgccgcaccgctctcctgcgcaatgtgcgccagctcgaccgcattgacgtgcgcatcgtcgaatcccttgcggatcttcacggtcagcggttttttgatcgcccgcgccgtcttctctatgatctccccggcaagcctcggatttttcatgagcgcggagccgtccccgttgttgacgaccttcggaaccggacagcccatattcagatccagaatgtcaaacggccgctcctcaatctgcttcgcaatctcactgataatatccggatcggagccgaaaagctgcagcgataccgggtgctcctttggatcaatggtaagaagctcctccgtgttgcggttcttatacagaatcgccttggcgctcaccatttccatgcacaccagccccgcgccctgttccctgcaaagcaagcgaaatggcaggtcgcttacgcctgccattggtgccagtatcaaattattttctaaggttacatttcctatctgcagtgttcggattattgccacgctgccaccctcattttctacttatttaatcttcccggatttacggttctgctttttatagatgagattcatgcccttcaatgtcaggttcgggtcatacacatcgatcattgtggtctcatttgcaatgattctgcccagtccgccggttgccacgaccttgacctcgcccatgttcgcctcatcgatcatatgacggatgatgtattccgtctgtccgatctgcccgtagacaagccctgcctgcatggaggaaatcgtctccttcgcgaggatgctcgccggcttgcggatctcaatctccggaagcttcgccgcatcttcccacaatgcttttgcggaaatgcggattcctggagctgtaacgccggatacaaacgcgccgtccttgtccaccagatcgtacgtggttgccgtgccaaaatcaaggacaagcaccggtccgccatacagctcatacgctgccgctgcatccacaatacggtccgcaccgatctggcgcgggttctcagtcacgacacggataccggtcttggttcccggctccacaataatcggccggatgctaaaatacttgataatcgccccctcaagggaatgcatcacattcggaacaaccgatgcgataatcgcatcctcaatatcgtcatgtgaaatcgaattctgctccagcaggttgctcaacagcatcccgtattcatcggatgtacggggcattttcgtcgtgatacgaaaattcgataccacctcgtctccccggaatactcccacggtaatatttgtgtttcccacatcaatcgtcattatcatcgtccgtaccccctatattcccacatataaaaccttataatacatctgcagcgcttccagcagctcctgttttgtctgctgtaactgacggatcttaagtccgcagccgatctcgtcgtacagcagatcattttcatcgcaggaggtgcggaattccagttcacccgtttcgctgaacaccagctggaaaataccgcccacatcctccgtaaaaagcacgcacatgatcttcaactcgttcttgatctgctccggcagacccttaaaatcttcgttcaggtaaaattttttattgtatgcgctcgcaccgcacagtaccacttcttccatctcagacattcctttccaaaccgtttccacggac

SEQ ID NO: 11518 - DNA, 22323 bp, Unknown
  gut microbiota DNA sequence
aactcgccggcatctgctattgaaaataaggcagatgccgactcagacatcggcttcgcgcggttatgttttattgcaacataaggatggctgatttatgccatccgttgcttggtgctggcaagcgcggcacaaaagtcctacaaattgtcttccgggatgcggacatgacctgcggagtgctccaaacttggaaagacatggatcatcgaagatgcaaacattcggccggttagaaatgccacattttttgaaccgaatgtccatctgtatttccacatgaaatccccaagtgcgtttcttataataatattactaattacccaaaaaattctatgcttattacgacaatctgttttctaatcgtgccgttcctcatcacacgcataggtctcacaaaatcttcccgaaaatgcaggagactcgccacccgcatacaaatgtgaggtatctccgaacccgcagacacggaaagatgccacgccgggacggcgctcctcggtatacaccgtagtgacggacgtcggcgccgcgcaggtgtgatgccacagaatcatcggtgacacattcatcaggtgcgacagcagcacacactccagtccgaagtggcagaagaacacaagcgtatcgcggttcgcctgtgcgacacggtagatgtcgccctcgcgcacatagccgtgctccgccagcagggcatcaaagtttgataccacccaggcatactctgcacctacgccaccgtccggtttcttttgcacacggacgccgtttccctcatgcgcgccgggagccagtcccccacgcatagcctgctgtgtcgcccacaggtcacgccggaagaactcctcttctctcgtccagtcctccggcagccagtcccaggcaatcgactttcgatccgggcaatccggtcggtcgatcttcgtgtcgaactccctgagccacagacattcgtttgcctcgcggttcatcttctgtaacgtcagggacgccgtatccttcgcccgcccgagcggcgacacataaaactccttgacattaagctttgacaggcgttctgccaaaagctctgcctcgcgccaccccttttccgtcagggtgtcatgctcataatccggatccccgtgccgtacaatcaataatctcatactgccgcaaatgcctccgcaagatcttcaataatatcgtccacattctccgttccgatcgacagacggatcgtgttcggcttgatgccctgctctaacagttcctccgtcgtaagctgggaatgtgtcgtggatgccggatgaatcacgagcgacttcacatccgccacattggcaagcagagagaacagctccagatgatcgatgaaatcctttgcagtctgctcatctcccttgatctcgaacgtaaagatcgaaccgccgccgttcggaaaatattttttgtagagtgcctgctgcaccggatcctccgataccgacggatgatgcaccttctccaccttcgggttgttgttcagatattctacgacctttaatgcattctccacatgacgctccacacgcagcgacagtgtctcaagtccctgtaaaaacaggaaagaatggaacggagagatggttgcaccggtgtcgcgcagtaaaatggcgcggatctttgtgacgaacgctgccggtcctgccgcctttgtaaagctgatgccgtggtaactcgggttcggctccgtcaaagacgggaacttgccgcttgcctcccagtcaaaccttccgccgtccacgatcacgccgccgatggctgttccgtgtccgccgatgaacttggtagccgagtgaacgacaatatctgctccgtactcaagcgggcggaccagatacggcgttgcaaaagtgttgtccacaaccagcggaatctgatgcgcatgcgcgatcgccgcgatcttctcaatatccacaacgtccgagttcgggttgccgagcgtctcaatatggatcgctctggtgttctcctggattgcctgctccacctcgtcgtaattgaatggatcgacgaaagttgtcgtgataccatactccgggaatgtatgtgccaatagattgtaggtgccgccgtagatgttgtttgcagccacgatgtgctcgccagcatgcgccagattctggagtgtataggcgatcgccgccgcaccggaagccacggcaagcgctgccacaccgccctccaaagctgcgattctctgctcgaagacatcctcggtcgggtttgttaatctgccatagatatttcccgcatcggtcagtccgaaacgcgccgccgcatgctcactgttgttaaatacataagaagatgtctggtagatcggcactgctctcgctccggtcaccggatctgcctcctcctgtcctacgtgaagctgtaatgtctcaaattttaactttctgtcctttaatgcttttcccatgttatgtttctccttttattttcattttggaagttctgtctgttgataatctgatgataacatgagaaaaccaacctgtctaatatgaaaaaaaaagcaccagttataggttattcctatagctggtgttttctaatctaatcctcttttttaaagattgcattgcgcacttttgcgagtgcattcaaaagaatcgttccaagcacacagcagcagatgatctctcccgctccgacggtcagcatgtaaaacggaatcgaccagtctcttccgccatattccatggtaagtccatatccgtagcggagtaccagcggaatgatgatgatatttgataccaccggcgcgagcgtgcataaaaacttgtgcttgcggagcagatatgttccgactgcgccgagcagcgtcgccagactgccgaagatcacatcatagatggctgctcccgtcagaaggttggcaagcagacatcccacaaacagtcccggaattgccgccggtgtaaagtacggcagaatggtcagcgcctcggaaatccggacctgaatggctcccgatgccaggttgaacgcactgataaaataggtcagcacgacatagattgctgcaatcatcgcagcgtgcacaatgaattgtaccttagagtttctcatattctgttctcctttagttttgttttacgagtggaaggtctcgaacactcgattcatttaacgccggaaatcggcggcaagcccgcttagaccttgtttttatgggctacgcaacgtctgacattttatcacagtctgccaaaaaaggcaacggcaaaatttctcccgtaaaatttttcacgcaaaaaactgctccgcgagcgtaatgctcccaatataaaccaccggtcctgtcatgtcaattctgccgtcccgggcaaattccaccagaagctccccgccgtgcatatgcaccgtcacacggtcgccgacaaatcccatcttgtgcgatgcggcagccgctgcacaggctcctgttcccgacgcgtatgtataacccgcgccgcgctcatagatctcgatctgaatattttcccggtcgagcacctgacagagctgcatgttgatacggttcggaaaatatctggaattttccacatacgggccaagctgcatcgcttttttctggctgacctcctcgagcatcagcacacaatttggatttcccagggagacgcaggtcgcgttatagaaattatcgccaaaaaagatcgcctcgttgacaatctccccctcaaacccgaccaccgggatttcctttgccacaaactccgggtatcccatgtccacgcgcatgagatcgccctgctcgtttaaaaacgtcaccctggtctcacccgcttttgtgtgcagcacatagctctcctctgtcacataccccatatcttttaaatatttggaaaaaatgcggataccgtttccgctcttctccgcctcactcccgtccgggttgaaaatgcgcacccgcattttgtccccatcaaaaaaagggccatagagaatgccgtctgctccgactcccaaattgcgccggcaaagtgcttccacctgcctttcctgcaattcacatgcattgcgattcggatcgtagatcaaataatcattccccagcccatggtatttacgcagtgttatctctgccataaatgtctccggtatctgttcttattctattatatgctgtattggcgcggatgccatctcttcagggatatcctgctcctcttccgtctgcttgttctgctcgatcaggctgcggatcgcctccgtcttctcatgaagaatcttgtcgatctgcccttttgtcacctcatcggtcacttcctcattgccgtaattcgccgagctgactgtcagctccggctccacaggaagctgctgcccggtaaccgcatcctctttctccccggtctgttcttcctttggctccgcatacggtgtcggtatataattcacattccagtattttacaatactgcggtgcatccgttcctgcttgtctctctcatcgattctatccaacatatactgtcgacctgccccacttattttctaatttatttatactacaaattctgccgtacttccataacattttgcatttcctgctgaaaattttctgtataaaaacgccccgaatgaagcatgctttttaacagaaaatcaaaccggaggaaacgcatcatgtcttcatacaaagttgaaatctgcggtgtcaacaccgcgaagctgcctgttttaaaagaagaggaaaaggacgcgctcttcgcccgcatcaaacagggagatgccgctgcccgcgaaacttacatcaagggaaacctccgcctcgtcttaagtgtaatcaagcgcttttccgggaaccacgagaacgtagatgatctctttcagattggatgcatcggtctgatcaaatccatcgacaacttcaatcctgcactgggcgtaaagttctccacctatgcggttccgatgatcatcggtgagatccgccggtatctgcgtgacaacaactcgatccgcgtcagccgttccctgcgcgacaccgcctacaaagccatccacacccgcgagattcttgccaaaacctcctgcaaggaaccgacattagaagagattgcaaaagtctccggtctcacccaggaggagatcgtcttcgccctggatgccatccagagccctgtcagcctctacgatccggtctataccgacggaggagacaccctctacgtcatggaccagatcagtgacaaaaaaaaccgcgaggacaactggatcgaagaactctctctaaacgacgccatgaatcatctgaacgagcgcgagaacttcatcctgcgcctccgcttttacgagggaaagacacagatggaagtcgccgaggagattcacatctcccaggcacaggtcagccgtcttgaaaaatccgccttaaaatccatccgcacctatctctccatgtaatgcctaccgctcccacttgttgcagagttcattgatctggtccgcaaatttgccaagttcgcggttcggcataccctcgcacttgcggatcaccgtcatcaggcgctcgccggctgccacaagtcttgcaaagatattgttgactgcgcgggtactcttcttctccaccgcctctctggagccctgtgccacacaggcgcctgtcagcagatcaaacgcatcaccgctgaagggcgcgtaagcctccagccccagctcctcgtgaatatgcgccgcaaactgctccgtcaccttgtcttcgccatgtacgataaaaacgcgcttcggcttcgggtcaaacatgctcacccatttagtcagctggttcacgtccgcgtggccgctgattcccggaaggttctcgatcttcgcctgcacctcgatcgtctcgccaaagagcttcacttcctttgccccgtttaacagcatattcccgagcgtgcccggaacctgatatccgacaaacaggatcgtggaatcctttctccatagattgtgcttcagatgatgccggatccgccccgcctcgcacatgccggacgcagagagaatgactttcggcttgtcgttaaaattgatcatcttcgactcgtcgctggtgatcgccatccgaagccctggaaaaccgatcgggttgatgccctgctgcacaagtgcgagcgcggtgtcatcaaaacagtcctgcacatttttgccgaaaatcgtggtggcttccaccgcgagcggactgtccacatacacctcaaaattctggaattccggaagcagattctccatcttgatccgacggataaaatacagcatctcctgcgtacgtcccaccgagaacgccggtatgaccagattgccgcctctcgtaaacgtatcgcggatcacgcgggcaagctccacggcataatccggcggtgtctcatgcgtgcggtcaccgtacgtcgactccatgaccacgtaatccgccgatgtaagatactccggatccttgatgagcgggcggttccccggtccgatgtctccggaaaatacgatcttgcgctcctccacaccctcagcagtgttctcagagatccacatctcaatactggaagatccaagcagatgccccgcatccacaaaccggacttttaagccctcacagacgttgatcacgctgtggtagtcgcaggatacaaaatgtcccagaacccccaccgcatcattcatatcgtagagcggtacgacctccggcctgccggcacgcttcgccttgcggttcttccactccgcctcaaacatctggatatgcgcgctgtccttgagcataatctcgcacagctgatgtgtcgccgtcgtcgtaaaaatctgcccgcggaagccatgattatataacatcggaagcagaccggagtgatcgatgtgcgcgtgtgtcacaaacacatagtcgatcgtcgacgcgttcaccggtatctcctgattgacatacagatccggtccctgttccataccgcagtccaccagtacatgcttatccgcaaactccagataatgacagcttcctgtcacctcgtgtgcagcccccaaaaattcaagcttcatatgcattccccccagcatttttttgataagaccattatacacgtaatgtcctgcggttacaattcttttcccttgtctcttttttcacaatcccgggcagcgctactcaaagcgcacaatttctttcttcaggcgtcccatgatttttttttcaagacgcgagatgtaggactgggaaatccccagcatatccgccacctctttctgcgttttctcctcccctcccgccgtgttcaacccgaagcgcaattctatgatcatgcgctctctgccggtcagtccggcaatcgctgtcatgagcagcgagcgctccacatccgtctcaatatcccggtagatcacatcctcatccgttcctaaaatatccgacagcagcaattcgtttccatcccagtccacgtttaacggctcgtcgatggacacctccagcctggtcttgctgtttctgcgcagatacatcagaatctcattttcgatgcagcgcgacgcataggttgccagcttgatgtttttatccggattgaacgtattgattgctttgatgagacctatggtaccgatcgagatcagatcctccacgccgactcccgtattgtcgaacttttttgcaatatataccaccaaccgcaggttgtgttcaatcagttttctccgcgcctcctccgccgcatctgtggcaagcatccggatgcacacgctctcctcccctgcatccagcggcggcggcagcacctccgcgccgccgatatagtgcacctcatcattctccccgaacaaaaagcgtccgattccgttcaaaattccccgcatcccgtaatccgggaccatccattttatgtacatgtaagctcctttcttcactgtcatcccagggatgcatgcagaatcaggtcatattctttgtcctcaagcaaccccttctgtgcgattccaaccgccatatgttcataccgccgcatctgcctgccatcctgcagtatcatctcatccacatccatcaccgcaagaagtccgtcctctgctccaagagcacggtacggcacaaaccggattctgtcttttgtctgatccacaaatttttccgccaggctatagctcaaaatacagatcggctgcccggtatagggatctcttaactggttcccgctgtcccagtaagcgcttaacgccatccggcgcgcatcttttccaagccatgcccggcgcacatggctgccaaaggctcttcttctcccaagataccgaagaagaccgcacgttaccgtcactgcagccgcaatcgccactcctctgctttttgataaaataccgctctcctgcagccactcaaacgccccgccgagcagaagaaccaccagatacaccgccaaccagttctcaaaaaactgcctcctgtcacacctcccgaaacagatgactgtcatcagtgtgttgatgagaaaatgcgtgagcaggcagtacagcagataattgcggcaaagcaggatgcagcacagtccgagcactgcggaaacagccgccccaagcagcagccaccgcattttcctgcatctcttcaaaaaaagatttgcccctgcaacagcaaggaaatccatgagaaaattctggatcaaaaatacgtctgcataaaatacatatatttcctttcacctcggtttttctctgacatgccacctattatacgatgccgccgtctccttttttgtcaaaagtccgctctataatacggcgagtcatctgcccggttcgacataatcttactgtaacacaaaaactgccatgtgcaagtcctgtaatcggactgacacatggcagttcatattatgtcactgtaattctatttgcgtgaattcttcaggaaatccggaatcttgatgtccatctgctgcaccgtgctctccggctgacgcggtctctggatacccggcagaggcggtgttactgtaccatgtcctccctgcggctgataggtcggagcagcggttcctgtggttcttccgagtgtggaaccggataccggtctggtcggtgtctgcgttgcataattcaacttcggcatgatcttgctcgttgcgcccggattctcaagtcctgtcgcaatgacggtgatcgtagcctcatcggtcatggactcatcgtacttcgcaccgaagatgatgttggcattgtcgcctgcgagatcctgtacatagcttgccgcatcattcgcatccataagagaaatatcaccggaaatattgatgatgacgtgggtagcaccgttgatggttgtctcaagcagcgggctggcaactgcaagcttgactgcctcgatcgccttgtcgtctcccttggcattaccgataccgatgtgagccatacccttgtccttcatgacggtagacacatctgcgaaatcgaggttgatgagtgccggcaggttgattaagtctgtaataccctgtactgcctgctgcaatacctcgtccgccttcttcaatgcatccggcatcgtggtacgtctgtccacgatctcaagaagcttgtcattcggtatcacaattaaagtatcaacgctctctttcaagcggtcgataccggaaagcgcattgaccatacgctgttttgcctcgaacttaaacggctttgtcacaactccgaccgtcagaatcccctgctcttttgcgatcttcgctacaaccggcgctgcgcctgtaccggtaccgccgcccataccacaggtaacgaataccatgtcggcgcccttcactgccgaggagagctcttccatactctcttccgctgccttctcgccgatctccggctgtgctccggctccaagtcccttcgtcagcttctcgccaatctggattaaggtcggtgccttgcaaagtgtaagtgcctgcttatccgtgttgatcccgataaactccactccaccgatattttcatcaatcattctatttacagcattgttaccagctcctccaactccgatgactataatcttcgcactggtatctgcttctgtcgtcataatctctagcaaggtagttcctccttcattctctcccataattcatgtcctgtggtaaacggatgtaaacacaccatctatcagagaatcatccggtgctcctcttcctacaccgtctgttctgtatatcgtctttcaatgcagtgcagaatccatactgcccgcttataaactcatatacaatataatatattctttctttcaatttatcaactaattttttcacttttttgaacaaattaaggattttctaatctctgtcaaacacaatatctgtggtgtccggtgtccatgtgtccagatgaagtgttccatacattcccgcaagctgtggaaggatcgccgacaggcgcacaatcttctgtgacagatagtcgtccgaaccgatcgaaacctgtatgccgtagtaggtcagcgtcggtttcaaactgctgtcgtagtgaatctcctgcggcagaaggtcatattttttcaaaatctgcgtcaggctcagaaggttgtttaacacatccggctgatccagcggcagtttctcgtaaagcacgacctcatcgcatgtcactccggtaatctttggtacatcctcaatctcgtccgaagaagtctccacgacgaatccatccttgtcaaaataggcgtactgcccaatggcgtcaatgtaaaagcagcccagaattcctttttcgtataccaagacatgcaccgtgtgcggatcatccagcgtcacttccatcgtgtcgacaaaaggcaccttgccggtatccctgatgcgatatttcagaagaacatacagagaattccacgaatactcatcatttaacaccagctgctcgatctgttcggaagaatagagttcatttccctccaccacgacattctccaccgtaaatactttccagacaatcagaaatgcaatcgctagaagcatcagaaggatcagtgcagccgtcagtccgattttccgtcttcttttcttttttctctgttctctaatcatactttaggtaacctcaaactttattccccttgacacagacagcgcaagccccatttccgagagcagaaacagaatggaggttccaccgtaactgacaaacggaagggaaattccggtattcggaatggtgttggtcacaacggcaatatttaaaaccacctggatggaaatatgcgccataatgccgaccacaagcaacgccccgtagagatccgccgcattgttcgcaatcaccataaatctccagataatcagcaggtataaaaggatcaggcagatcgcaccaaaaagtcccagctcctcacagatgacggagaagatcatatcgttctgcgcctccgggataaaaccgagcttctgcatgctctccccgagtcccttgccgaacagcccgccggaaccgatcgcatagagtccctgcagcgtctgataacctttttcatactcttccgggtgcagccagatctggatacgctcggcgcggtaggatgcaagcgcgataaaaatgacgccgactgcgagtaccacgcctcccacaatcaggaaatgcgaatatttcgggctcgccacaaacagcatgcacaccgcgatgccaaggataataatcgctgtacttaagttattgtatgcgaccaccccgacgacgggaagcacgatcgccatgaccttgaccagcgtcttaaaatcccccacctgcttcgacgtcttgtagatgatcgtcgccaggaaaatgatgaccgcaagcttcgcaaactcggatggctggaacgaaagcggtccgatgtagatccaacgcgcctgtcctttggcttccgtaccgataaagataaccgccgtacacagtccgaacgccatcagatacgccagaccgctcactctcatccagaaccggtacgggattctcgagacgatgatcatcgctatgattccaagacttgtcgcaaacagctgctttttcagataatacgccgtatccccgaaacgcgtggaaccatagtaagagctcgtgctgtagagcatcaccagaccgaaacaaagcagaaagataatcaaaaacagcaggctgtaatcaaaatatcgaattggtttttgttttttttctttttcctgccttcgcgccattctccactcctagtcttcttttaaggcacgcacatattccttgaaaatgcgtccgcgctcctcatagtttttaaacattccccagcttgcacatgcaggggataagagtaccgcatcaccggataccgcgttccggtagcaggtgtcgatcgcctcctcaaacgtatcacagagcacaatattctcaaatccatgtgcccgcgcacaggctgcaatcttctcccgcgtctgtccgatcagcacgagcagcttgacttttccgccaaagctttcaatccactcgtcatactccgactgcttatcatagccgccgccaatcagaagggtcggacggttcatggcacaaatgcccttgatcgcggcatccgggttggtgcccttagagtcgttataaaacttcacgccgcgcttctccgtcacatactcgatgcggtgctcgactgcctgaaaacgcttcagcacttcgacaatcttatccattggaacaccgaggcttaacgctatgccggtcgcagccatcacattctcgtaattgtgcgttcccaaaatattgagttcattcacgttgatgaccttcgtggtgttctctccgtctgcatagtaaatatcctcgccgtccagatacagtccgcggtctaacttctgtctgctggaaaaatacagcacgttcgtgtgaagcgtctcaccgaatgcgcgcaggacttcatcctcgtaattgagcacgcagacctcgtcttccgtctgattctccgcgatccgctccttcgtcttaatatagcactccatcgtgtgatgacggttcagatgatccggcgtgatatttaaaatagcggaaactgccgggtgaaatgtgtgaatggtctccagctgaaagctactgatctccgccaccgtcactgtctcgtccgtggtgtccgcagccacggaggtatatggaattccgatattgccgaccactttcacatcccggtaatagtttgccatgatctcgccgcagagcgccgtggtcgtcgtcttgccgttggtcccggtgatcgccacgatccgtcccttcgcaaaatggtaggcaagctcgatctcgccccagatcggaatcccgtcttttttcagatcctcaaccatcggaagatccgtcggcactcccgggcttaacacgacaagatccagtccgcttctatcttccgctgtcagttctccgaggatgatcttcacatccgcaaagaccgggtgcttctcacgaagcgccgtaagatccagctccttatttccgtcaaacaataccacattcacattcttctttttcagaagttccgtcgcggcaacaccgctgattccagaaccaaccacaagcactgtcttacctgtcagatccatgttcttcctcctataatcctaacagggcgatcatgcataagatcgccgttgtaatcgaaaatactgcaaccactctcgtctcggaccatccgcccagctcaaaatgatgatggatcggcgccatacggaaaatccgctttccgccggtctttttaaagtaggtcacctggatgataacggagagtacctcgaccagatagatcagtccgacaatcacgataaacaaaggcatctgcatcatataggctgccgagaccacaaatccgccgagcgccagtgatccggtatctcccatgaaaacacttgccggatagacattaaacagcaaaaatccaagcagcgcacccacaaccgcacaggtaatcggcgcaatgcctgcattcgttccgatcgccaccacggagaagaacgttgccaccatgatggtgacgctcgacgcgaggccgtccagaccatcggtaaagttcgtaccgttgacggttccgattaccgccaaatacagtaccgggaacgctccccagccgaggtctaaatattttcctccggagaacggaatcagcatggtgagcgggacatccgagtagcatcccatataaactgcgaacacggtcgtcaccacaatctgacagagcattttctgccatgcaagcagtccgtccgatctgcgcagcacaaccttcagataatcatccagaaagccgatcacaccaaatccgacggtcataaacagaatcggaacaatctttggataatcttttacataaaacaccgatgtgatgataatacttgccaatatcataagtccgcccatcgtaggcgttccgtttttcttcagatgggattccagttccttccgctccgtctgtccgactttgagtcttcgcaggaaaggaattacaatcggtcccaacaatgcactgattgcaaaagatacgattaccgggattacaatttcatacgtcataataaacacctcatgtattttatctttgccgaaagcaacatgtgctttttaacccaactagtatacgttatttttcatgatttatcaaggtaaggcaatatgttttccataatttcttttacgaccggcgccgcaatcagacctccgtaataggtgcccttcgggttattgataatcgcaatcacaagcactttgggatcgtccgcaggagcaaatccgaggaacgaggaaatatagcggtgctcgcttctcggcagcgtctgagaagtcgcggtcttgccgccgatcgcatacccctcgatcttcgcattctttccgcctccctccgacaccactttttccagcagatactgcatggtctccgaggtctccccgctgcagatctcctctctcttatcataagaaaatgtctcgaccaacgttccgtccgtctcacggacctccactccgaagtgcggtgtgatgcgcgttcccccatttataatagaagaaacggtcgtcacgagctggatcggtgtgatctggaacgactgtccgaacgagatcgtcgcaagttccaccgggccgacgttttcctgcttatgcatgatcgtcgccgcctctcccggcagatcgattcccgtcttctgtgtcagaccgaactgtttgaaatatttgtaatagttttccacgcccagccgctcgcccagttcaatgaagacgggattgcagctgttcataatgcctgtctcgaacgtctccgccccgtgtccgcttgtcttcgcgcaccggattctgcgatcctccaccagcttatagccgggacagtagaactgatctgtcagcgacaccacgccctcctcgagcgctgccgccgccgtgataatcttaaatgtggaacccggctcataggtgtcgctgatacacgggtttctccacatgcggttcagcagttcctgctttttgtccgcagactccgtcccatccgctcccatctcctcaattaaggtaaacggttcgttcagattgaattccggataatttaccatcgccattagctccccgttctgcgggttcatgacaatcacggacacctcatccgcctgcttttttatgtatgccttttctgccgcctgctcacagtattgctggatattgctgtccatggaaatatataaatcatagccgttcaccggctcaagccgcgtctctcccgcattttcaatctcaatcccgcgcgcatccgtgagggtgaggatcttgccgctcgttccctgcaaataggaatcgtatttgacttcaagccccagaattccctggttatccgcacccgtaaagccgagcaccgtggacgccatggtatccaaagggtaataccgcttgtaatcctcgtcgaccttgattccggaaaggccgtaggcacggatgcggtctccggtctccttgtcaacattcgtcttgacccgctcaatggagctgaccttctccacccgctttctcacttcctcctccgtgagccccagttctttttgcagtgccgcaatcaccttctccggctcatcgatctgactgtgaatcacggaaatggtacagaccgatttgttcgtcgcaaggatttttcccgtggcatcgatgattcttccccgcgctgccttgatatcacgctctctctcatgaagatcctccgccttctgcccgtagtattccgagcagaagaccatcagatagacgagccgtccgcccagaaacatcagcacgaaaaacacggcgaggaacatcagccatatttttctgcggttgaatgtcttgctccggtaaaatgcatgttcctgtgacatatagaaaaaacctcacgaaagttctccatgaaattttattcatcctttcgtgaggttatgtctgttattgctgtccgttatcctgtgggatgtctccactatcctgtgggatatctccgttatcctgcggggtgtctccgctatcctgcggttcatccccgttatcctgtggggtgtctccgctatcctgtggcatgtctgtgccttccgcctcctcttcatttcccggcagggtatccgttgtgtccggcacatccagtccttcttccaccggagtctcctcgtttacaacgtccgtcatcgctgtcactccggtatctgttcccgtaatgtcccaccctgcatgaattccggtggtctgctcatcgcggtagatgttcatgtaaggaagcacttcctctaagatctcacgcacaatattctgtgcaaaagagctgtggtactgctccaccgcattcggctcgtcgaccacgcagtaaatcacaagctgcggatcgtcgaccggtgcaaatccaataaacgataccagatagttgacgccgtcacgtcccgctttctgtgccgttcccgtcttgccgcccattgagtagccgtccactttcgctgtcgctccggtacctgaggtaacggtggaatacatatactgccgcagcgtctcggacgtactctccgagatggtttcccgaagaagtgccggctggatctcctgcacaacgttgccgttctcatccgtaatccgttttaccacatgcggctgatagaactttccgccgtttacaatcgagcagaagcctgtggcaagctgaatcatcgtcgtgttgaagttctgaccgaatgcgtttgtcgcaagatccaccaccgtcatgttgtcgccggtatagatcagagaatcggttctcgtctctcccggcagatcaatgttggtcttctgtccaaatccgaaaatctgctggtagttttcaaagttatctcttcctattttataggacatctgcatcagtgcatcgttgcaggaattcatcagcgtctgctccaatgtctccattccgtgtccgtctctcttgacacagtgaatgtcatgaccggagatcgtctcatacccgtcgcagtaataggtgtctgccgtggtcaccgtcccggtctcaagtcctgccgacacggtaaaaggcttcgccgtcgatcccggttcataggtatacgacacgcagaagttctgccacagctggttcagcgcatccatctttgcgtcatcatccatggcagcgagttcttcctcggtgtaatacgcggagagatctctcgggttgctcagatcaaaattcggataattcgccatggcgagcacatccccgttattcggatccataatcaggactccgatatgggaagctcccgcatccccttcgcggtaggcgcctgtgtacgcctcgttgaattcccggatcttgctctccaccacggactggatattcgcatcaatcgttgtcacgatgttgttgccgtttgtcgcctgcttgatcgttttctcaaaattattatccgtattcagatagccgaactcacgcccgttgatgccgtttaacgtgctgttgtaataattctccagaccgttcactccgacatttccggatgccgtaaatccgatcaccgcgctggcgagcgatccgtacggatactctctctgatattccttctcaaaccatacgcccttgatgtcggggttcacctttctgcccttttcatccgtcgcatcctgcagttccacgaacggctgcatctcgtcgtacgatattttcttcttcagcacaatataacggttctgcggatcattccggacatatccgtaaagctcatcgctgctcaagtccggaaaacactgcacaagcgcctgaatcgtcggcgcaacgtaatcctcatcgctcgttaaaacagaacaatccagtatcacattgtacactgcaatactggttgccatcactgtcccctttgcatcgacaatatcgcctctctggtaaggaatcactttgctgtcgtattcctgctgggacaacacaattttctcatatttttcaccgctggtatattcaatatacatcaggcgcccgatcagaccgatcagcatgcctgccacaatggtaaacatgacaatcagctttttttgcatgcgcctgggaaatttcaacagcggtcttctttttttctttgccatgcgcctctcctgtcatcctactcacgcggaatctcactgtactggttcatgtaatcgtcatcgttcactgtatagtacacaatctgcgattccttcgcataggacattccatattctgtcatcgccgtattccggatgctgtcaagatccacgctcgtattgatccgcttgtatgcctcgtcgttgtcggctttcagatctgcgatctggctctcaaggcttgatatctgattcatgcgcgccgtcatctccgactggatgtggatgtatgcaccggtaaagatgccgaacaccatcacagccatcgtgagaaatgccacatagctcttgctcatgcgcagagcacgctcctgatttcttctggctgcacgctttctgtttcttaattcaatctcgcgttcccgctcccgtctctcgcgttcccgtctctctcttgtgacatgctccgggcggctctctctgatcctgcgatccggtctcgtcactgcaggcgctgcttccatcctgcggacagtattcccgtcaatataatattttctctctgccgcttcatttctcataactgccacttccctcacaacactctaagctctttcaaatacgcggagctttgcactcttcgatctcgagttctctgcaagctctctctcccccggcaatactggcttccttgtaatcactcttcccttggacttttttccacatacacataccgggaaatcactcgggcaggtacatggattctcgttgcgcttaaaattcgtcttgacgatccgatcctctaatgagtgaaaggtaataatacagatccttcctcccggattaagcagatcgatcatcgtatccagattgtcctgcaacacttccagttcgtgattcaattcaattctgattgcctgaaacgtacgctttgccggatttcctccggtcttctgcactttcatcgggatggactcccgaataatttccgacagttctcccgccgtcgtaatcggcttcttctgtctctcgttcactatatgttttgcaatattttttgcaaatttatcttcaccgtaatcgcggatgatcctatagagatccatctcgctgtagtcattgacaatatcccttgccgtaagactctgtctgtcatccatgcgcatatcaagcggcgcatcggcgtcccggtaggtaaatccccgctccggtgtgtcaagctggaacgatgacacgcccagatccagcacgatgccgtccacatgctctataccgatcgcatgaagttcctctttcatgttggcgtaattgctccggatgatcgtaaccttatcgccgaacggcttcaaacgctctcccgcagcccggattgcatccgcatcctgatcgatgccgatgagacgtcccttttccgataaccgttttgccacttcactggcatgtccggcaccgccaagcgttccgtccacatagattccgtccggtctgatgttcagatgttcaattgtctcttccagtagaacggaataatgtttaaactccaacctgcgcctcctgcttagatactgaatccaagatccgccatgtgctctgcgatctcgtccatctcatcctcatcgtaggtattctcctgccatctgtccttatcccagatctccacgcggcttaagactcccacgagcaccacatctttttgtaaattggcatattcgcgcaaaaccggcggaagcagaattctgccctgcttgtccagctccactgcggccgccccagcaaagaaaaaacgggaaaactttctggcatccttcgatgtcatggaaatattgcggaacttctcctcaatattgtgccactcttcggcagggtacacaaataagcatccatccagtcccttggtaaccacaaattcactgcctaactgctctctgaatttggatggaacgatcagtctgccctttgggtccactgtgtgattgtattctcccatgaacataacacaaacacctgccttcagtggttttccacaaagttatgaacttatccaccactttgtaccattctccaccactttcctccacttgtatgataatattaccccaccttgtaccaaattgcaatagaaaaaagcccaaaacttgcgtttgggcataaaaaaaggacctcgcatacatgcctcgcatatatgttccgtcctgtttactgtgtttattcaattgtcagaccctgacaccctcctgactctcaagatattcttctatcagcttgtccagtctggtgcttttctcgtaatagtactcaaacctgttctcctgcaacagtgcttcatccaactcgtgtctcgccgtctcgatcttcttttgtaactcatagattctattcatatgaatcctccttaaaacgctaagattcctatgtctgacgttaacatagcactaaaggtgggcattcccacataaatctgctcttcactgcctgccttacattcattatattactatgtccgaacacgaaaatcaacgaaaacaacccgtcatttttcgacattatgagtgccggattctccactcggcgcgtttattcgccaataacttcatcattgcatccagcgctttgtgattcacctcgacaatatgttctatatcatcctccacgccatgcttgtgcgccagatactcgtcatgcgacttctggataaaagcacagatcgtctccgcgtcgatgagcggctctgcctttttcttattctgcagcttctcatgttcttccttaagctgcagcagccggtgatgtctggcagcctcaccgctcttaaggtacgatcttaagtcccgctttaacttctcctcgtaagaacaatgatccttcaggctgcccgggtaaatggtgttgtgcggaaatgtaaaataatccgccagataatggctgatctgtcccagatcccggtaatacttgcacccctttttcttccggatcagcgcatctccctccgacagacgcctgatatgtctgctgacataaggaaacgttccgtccatctcgtgtctcttatagagaaacgaaggcttgatatccggcagaatacttcccagataaaaagaaaatttgtgatgttttaattcttcatcctttaaattctccaccatatagcgcgccagcgaaatatgtgacttttttctcattcatcggttcccccttttgcactgcatgacttttttcctaattttgctttcattgtacttccatcagacgcactttacaagaggaaaattccaccggaatgcaaaacggggaaccgttttgcattgcctccggctccccgtcttttctcctatttgcagcagaaacttgcgcactctgtctcgccgcaggaacaggcgttgccccctgcgatgccgatatggtccgcgctgcatttcttattctcgttaaacgtgcagttgcaggcctcacatgccacatcgatcttctttgactcatgctcttttacattgcatccgcagtttttctccccgcgctccacaaagcttccgcagcaggtctcattctgatgcaccgcctcgcttccctcaaccttgatgtcgcccttgcagcagcagcgatcctcgttgtaagcacatccggttaccgcacaatccagtaatgtcatatctcttttctcctttcggtccttgttctctggaatgatacattcccattcttaagtatctccggagcaatttcttttataaccggttttctttttccacagcaggaagaatttgcctgttataaaagagtgtgcgcttgccgcac

SEQ ID NO: 11519 - DNA, 304 bp, Unknown
  gut microbiota DNA sequence
catacagaagattttgatgaaaatgattttttatcaagacatccgagaatatcgtaaacaaagtttacgaccaaaccaaacgaacgaaagttcaagatcgaagcaattcgatccgcgttattaaacgcaaagacccagtttctaacgctatagaaactgtaaacgaggtcaagcaaaaaagagcgcagggtggatgccttggcactaagagccgatgaaagacgtgataagctgcgaaaagctacggggaggagcaaatatcctttgatccgtagatgtctgaatggggaaacccacatgagca

SEQ ID NO: 11520 - DNA, 145 bp, Unknown
  gut microbiota DNA sequence
tgcgaaaagctacggggaggagcaaatatcctttgatccgtagatgtctgaatggggaaacccacatgagcatacctcatgtatccatacgccaatccataacgtatggaggggaacccggtgaactgaaacatctaagtagccg

SEQ ID NO: 11521 - DNA, 3778 bp, Unknown
  gut microbiota DNA sequence
agttcccacaaatcgtagtggtcaaggaatgcctcgatataccccttctggcagttgctgacaatcgaaagatgatagccgtcccgcttcaacgccgcgagcgtctgcggcacctgatcgtagagtatgcccccatgctcccgcagataatcattttccacctgacagcattcctttaggagcagtctccgtttttcttcggggaattccgcaaagaggatatcggcgattacgtccatcgtttttcccattaccccctgaatgtcctgcgttgtcagttctttctccctgaccccgtactgccggattgccacattccaggacttcgccacattctctgcggaatcccacagggttccgtccatgtcaaatatgattccacgtttcatgacatcatctcccgttctctctcttttgtctaggcttcctcggaaagtccatacagtctcgtgtattttttcttcatgtagcgcacgagcggctgcgcggacacttctttcccgcacactgccgcaattacctctttcggtgtccgcgtgcttccataccagtgaatcttctcattgagccattttgtgatctcaccgattctgccgtctgccaggatctcatccacggagccgagttcctcctccatcttctcgaggtacatgccgtcatagatgctgcccagcagataggacggaaaatacccaaacgagccgtccgaccaatgtacatcctgcaagatgccttcggcgtcatttttcggagtgatatgcaagtattcctgcattttctgattccagagctccggaagtttttccaccggcacatgatcgtagaaaatcgctttttccatctcataacgcaatataatatggaagcaatacgttacctcatccgcctcggtgcgcaccatactgttctccacgcggttgatttcacgctcaaacgcttcgagtgtcacattcttaaactgtggaagcaattctcccagtttttcatagatcggcttccagaaattgatatttcttccgagaatattctcataaaagcgcgactggctctcatgcacccccatatagcagcagctgcccgccaccgtattgtcgtattccgggttgacattctgttcaaaaattgcatgtccgccctcatgaatcgcagaaaacatggcgctgagcggctccgtctcatagtagtggttcgtcacacgcacatcctttgaagaaaaattcgtcgtaaacggatgctcagtctccccgaccgctcccgcatccctgcagaatccgatgtaatcaagcagcagccactgtaccctgcgctgtgcgtccggatcagcataggcatgaaatgtcggattttccggcattttctttgcagtaatctgctctactaacggtatcagttccgtcttcacttcctcaaacagccggtcgatcgttgcctgatccatgccctcctcacactgttccagaagtgcgtcatacacatcctttcccggatctgtatagccgattacctgcttcgtcatctcaatcatattccggaggtgcggtgcataaatggaaaagtccgatgcattttttgcttcttcccatgcatttccggattccgccgctgcccgcacaaacgcctcatataaatccgccggtattcttttattgcggtcgtaatcgcgcttcatgcgttttacaataaatctccatgtgtcatctaacgcatcatattccgcaggctgcgccagtttctccagaaattctcccagtttctccgatgtccccatctcaaagctcttcgcggaaaaataggtcagcgcatccacatgcgccgcctgcccaagcttcgacactgtcgtctgcatatcccactgcaataatcctgtcacatgatcatactgattcatttcttttaaatattctttaaattcttctaataatctactcatcttatctcctgattttttctttattccgccggcataccgtcaatgatttatcgcggattccttctcctgaccgttgctttcccatacaccttcagtcgctctttgacgcatactttccatgtctgcgggtcttaccctgcgaacctgccagcactcgttttgtcacgctgattttgagttccggcaaaagtccataaacagctgctttctgcgcatccatatctcggcgatgctcttctgcacatccgatattccgtggaacttccgggaggcatccgctaggattcattttcccttgtttctgcactgctttctgtgcatccaatgttccgtggaacttccgggaggcatctgtcagcattcattttatcatatcttacatagactgtcacgaattatgtcgggtgacgaaaagccaggggagatgagcctggtggggatggaaatctgatagaatcctgagtctcacgggtctgggagtatatttttctctctccagacccggttttcttccttgggcgggtctggaagcgtatttttcttttcctagacccgttttccggacttgactgttcaaaatggttgacataatttcactccccgggtctagctgcttattttcacatctacagacccggtgtcgcacaaaaacaattcaaataagttaacataattccaactcatgggtctgagcgcaccttttctccactccagacccgcaaaacatctttagcactgtttctaaagcatatcccacaaaaatatagctttcttctaatattatagcttccttctaacccgcaaaaatgatacgataagagcgcaacccattgatttttctgacatttagcacaggtctgccgcactaccgcaccggcagccagaaaggcggttccattgaaacattttctccgattgaccgactataccaaagctgacatttacgaaatcttccatatcaccgatgagatcctggaggggcactatcagaatctgctgcagggcaaaagcgtcgttttatttttcccggaatccagcatccgcacaagggtcacgtttgagaagggcatcgcgcttttgggcggtcagccgattttgtttccaagttccactctcgacaaaaaggaagatttgcaagacgtcgtcggctacctcaacaactgggccaatctgcttgtcgtccgccaccgggatatggccgctttggaaaaaatcgccgcatctgcatccgtacctgtcatcaatgcgctgaccgacgcaaatcatccctgtgaaatggctgcagatctgtatgcgctctcaaaaatacggaatgattttaccaaggatcactttctgttctgcggtgtcacaggaaatatcgggctggcttggaaggaagcctccgaagtgatgggcttttcgctggagcagtgctgtattccgggatatgagatggatggcgtgccctcgcatcactgcatccgcgacgccatccgtggaaaagacatcatctgcaccgactcactgccggccgaccttctttccgcctcccgcggctgcaccgtcgatcttgctgccatgaagctggcaaacgagggtgccatcttaaatccctgcccgcctttttaccgcggcgaggaaatctcaaacgatgtcatcgactccgactatttcgtcggatatgaatttaaaaaacatctgctcaccgtccagcaggcaatcatggtgtactgcttaacacactaaacttttcatataacgcattaagcttttcattttttgacataacacaatattttctgcaagaaaaaatcctgttttgcaggattctccgcctgcggcgggttgctctagcgatataattcc

SEQ ID NO: 11522 - DNA, 56797 bp, Unknown
  gut microbiota DNA sequence
ccgacgcagtgcgatcctgcccggagggctttttcattcatagaacgtaatttcctatgaatcaaaaaaaactcccgtgcgcgtgatacctctcttttccacagcactctgtagaaaataccggcatcccacgaacgggagcttcctgtttctttttattctactttacctcgtcgatcgcgcgtccgatgtcatggcgcatgtacttattcgcaaaatcaacccactctgttgcctcgtatgcttttgcgcgcgcctcctttaaatcttttccggtcgccgtaatgccgagcacacgcccgccgttcgtgacgatcgtgccgttctcatcgaacttcgttcccgcatggaagcagaaataatcgtcctttccgtcgaacttttcaagtcctgtgatcggaaatcccttctcataggacaccggataaccgtcggatgcaagcaccacacataccgccgcattgtcctcaaactgaagatcaatcgtatccagctttccatcgacacatgcctccatcacatcaatgatgtcattcttcatgcgcgggagcaccacctgtgcctccggatcgccaaaacgcgcattgtactcaagcaccttcggtccgtcctccgtcagcatcagaccgaagaaaataacgccggtaaacggtcttccctccgccgccatcgcatccacagtcgcctgatagatgtgcttttggcagaactcgtccacttcctttgtgtagaacgggctcggggaaaaattacccatgccgccggtgttgagtccctgatcgccgtcctttgcgcgcttgtgatcctgcgctgaggacatgatcttgatcgtcttgccgtccacataggaaagcaccgatacctcgcgtccggtcatgaactcctccacgaccatcgtatttcccgcggagccgaacttcttgtcctccatgatctccttaacacccgcctttgcctcctcgagcgtattgcagatcaaaacaccctttccgagcgccagtccgtccgccttcaatacgatcggcatcttcgccgtctccagataagcaagcgcatcctctgcagatgtgaaattctcgtaggcagccgtcggaatgtgatattttttcatcagatccttggaaaatgccttggagccttcaaggatcgccgcattcttccgcggtccgaatacctttaagccctccgcctcaaacacatccacaattccgccaacgagcggatcatccatgccgacaattgtaaaatcaactgcatgctccttcgcgaacgccaccagtttgtcgaactccatcgctccgatcgcaacacactctgcaagcgatgcaattcctgcgtttcccggcgcacagtagatcttatccacgcgcgggctctttgccacactcgtcacgatcgcatgctcacgtccgccgcttccaactaccaataccttcatatccgcttcctcctgcactctgtaactcatacgcttatttctcaactgtcacatgtccgtttgcaacagacactctgccgtttgcaatcagatcgatcgcctgcggaagaatgatccactctgcctgctccatcacacggcgctgtaaaatctccggggtatctccctcttcgaccgccaccggcttctgcaaaatgatcggtcccgtatccgttccctcatccacaaaatgaaccgttgcacccgtaactttcacgccgcgcgcaagcgctccctcatgtactttcaagccgtaaaagcctttgccgcagaaagacgggatcagtgacggatgaatattgatgatccggttgcggtactgcgcgatcatctgctccggaattacaacgagaaatcctgccaacaccaccagatccacctgatagctgtcaagcttcgccagaaacgcttcattgaatgcctcacggctctcataatccttcggggaaatgcaaagcgcctcaatgccgtgccctttcgcacgctccaacgcatacgcccctggattgttgctgatcacaacgtctacccgggcgttcgtgattctgccctcatcgatggcgtctaagattgcctgcagattcgtgccgcctccggacaccagtaccgctacttttagcataaggttactcctttttcaccatccttgatctcgccgacaatatacggtgtgtctcctgctgccttcattgccgcgatcgtcttgtccacgtccgccggatccactgccacgatcatgccgatacccatattgtaggtgttgtacatcatctgctcctcaactttgccctcgcgtgccatcatctgaaagatcgccggaacttcgtagctgtccttccggataaccgcatgctttccctccggaagcatacgcgggatattctcatagaaaccaccgcctgtgatatggctgcatgcttttacgcggacgcccgcttccttcacctcacggagtgccttcacgtaaattctggtcggagctaaaagcgcctcgccaagtgttttgccaagctcctcatgataggtatttaacgtatccgcatccatggagaaaatctttctcaccagagagaatccgttggaatgaacgccggagcttgccataccgatcaaaacgtcacccgccgcaagatcagctcccgtaataatgtccttctcatccacgataccaacggaaaaaccggccagatcgtactcatcctccggcatcagccccggatgttctgccgtctcaccgccgatcaacgcacagcctgcctgcttgcagccctccgccacaccggacacgatcgtcgcaatcttctccggatagttcttgccacaggcaatatagtcaaggaaaaacagcggctcgccgccggcacatgcgatatcgttcacacacatggcaacacagtcaataccgatcgtgtcatgcttgtccagtaaaaatgccagttttaccttcgttccgcagccgtctgtgccggatactaacgtaggcttctccatattcttaaagctctccatggagaacgcaccggaaaatccgccaagtccgccaagcacctccgggcgcatggttccctttacatactttttcataagttctacagacttgtatcctgcctcgatatccacaccggaattcttgtaatccatcctattttcctcctatatgcttgtctgttgtctatccaacgcaacacgggcgactttttgcaaaatcatccgttcctgttcctagtaattctgatatcccacttcctgcagtctggcatccttcgcctgcacctgctcttttaattctttggaatattcttttaatttttgcaaaattgcatcatctgatgttgccagaatctttgctgcaagtaatcctgcatttgcaccgccgttgatcgccactgtggcaaccggaatgccggacggcatctgtacgatggagtacagggagtcgcgtccgccgagggacgtggtgtgcatcgggataccgatgaccggcatcgggaagatcgccgcgcacattcccggaagatgcgccgccatgcccgcgcctgcgataatgaccttaaagcccttcgcctctgcgctctttgcatactcgaaaaatacatccggctcacggtgtgccgagataatcgtcatctcatagtcaattccaagcttctctaaaatgtcggcagcctttgccattaccggcatatcggaatcactgcccatcacaatacctacttttgccatattgctcctcatttctgcgcacattctgccataccgggttcgtgccgggtgcgccggggcacgaatcctgcgcgcggaaccgaatccttcccttgcgccagtttctcaatctgctcttagtatagcgtccgcgcatttagaagtccaattaacactttttatgtgatttataaatacagctaatataagtatctatcccgcccggctcaccttcctacctgtccagcggtccgttcaacgcctccgttccggcaagcacaaaacgtccgtccgcgatgatatcctctgtcgtaccgtccttccggatcacagtgatcttatccagctcgtcgtacggaatcgtaatatcggtgtggcagtttaaatatgccttttccggattctcatggcgctgcgccgataccgtattctcccgcgctacaatcgcttttccatccggattgtaagagaggttgtcctcctcatggctgtagcaggtgtcccccaccgcaaagtgcgggccggtcttctccgcaatcagaatcggcagtttgtccgcaatgtcatagtcgcgcgccatccggtatgccgtcgtgttcgtgccgattgcaaattctcccatcggcagcgtctcatggtgcatcagcacattgtcgcggatatagtttttgttctccgcctcatcctcgaaattggtgcaggtgtatttttccaccatgccgtccttaaaatcgatctccagattcttgtagttcagaccgttcagatatacctgtccgacatgcagctttccgttcgttccctcaagcaccggcgatgtaaacacctcgcccaccggaatattcacgtccgccacacagttctcaaatgcggtctccccttcaggattccgaagcttccagatgttgacatataagtcggtcttattggctccttttccggtgatgtgcacacggtccgcctgatcgagcacgtcgatcatcttctgctgcatgttgcggtagagcatgtaatccagcgtattgatcttcaccgtctccgcgaaaatctcctcaaagcgggcgccgatcgacggaagcgggtaggcaatgatcgtaaaactgcgctcctcccccttgatgtactgattcgtgatctgtccgcgctggctcatctcatacacacagagctgctgctgtttttcaccgtaacggaatgcctctttttttgtctccggagaaaaaggttcttctccgaacacctcaatcaccgccggccccgccatgccgttcgcatgtactttttcttcctcaaatgcgtttttccacgtctcgagtccgcgctccacgtacgccttgtcaagatagtacgcgcgatcctccctgtgatcgtagtcatactgcttgttggctgccgttcccgaagccagcatggtcacttcgagtcccattttttcaaaattgcacactgctgcacgcaccatacgctcgaagccaatcggataccgtacctgcgccgccgtctttttggacagatccttgcccgtcgtatcaaaaccgatccggtagccttccgtgtatgtgtccgccatcgcctggatatccgcctccggcagtgtatttaaataagcggcaatctgtctctcattctccccgatataagcgccgtagcggtaaaggtaacgcagatccgacagatccgcctgcatcacgatctccttttcaaaatcctccgcaggattcacaagacgccgcaccgaccgctcgtcaaaaatctcccgataatcatgaaaataccagtacaaaatctgctgcacttctttttcctgcggcagggcatctgctgctgcgccttcaaaacagttgtagacctccacaaacagctccatcgcgatcgtaagctgcatcagatttccgcggaaaacctccccgcatgccgtccgaagatgtgccgcaagaagcgagagcgctccgccgaacgtctctcccagacgtgcagcggcgtaggccggattcgcatagctgtgcccgtaggcttccggcaggatctccccgtagagcgcctcattgtccgcctcacattcctccatgctccgcgccgcaagactgccgctttttcctttttcatacagtgcacgaaggctctgtaaatatgtggcattcgtccggaaatactccgcaaacggctccggcgcctgcgccgcctctgcaatctctgcaatccgttccgctaccagttcatagcgctccgccgccagttcatttgtctccttgtaacattcctgatatcccaaatcaattcctcctcacaaacaataaatcccgcgccattgcgggatttgtattaccttatgaaaacgtcagccatgcctgaacacaaatctatccggattacggctggagacgtcctttttttacattttcctcaatgagcgactttgcatacgcccacagttcctcggatccctcatgtgttctgctgttgcgcgcaagcacctgagactccctgacgccgtgttccacccaggatttgccgtccgaagcattgttcagaagaagcggctgtaccttgtccagcatattggcaaacttcgcctccgccgtcttcatcgcctcaaactcatcccacagaccgcggtactccatgcgctgtgcatccggaagcaacccgaaaatacggtccgccgccttcaactcgcgctcccgcttggtcttattgccctcggtatcgtatgcgtaggtatccccggcgtcgatctcgatcacatcgtgaagcagcaccatcttcatcgtctttagcacatcaatcttctcgttcgcataatctgcaaacacaaacgccatcagcgccagatgccaggaatgttccgcatcattttccttgcggcttccatccgacagataggtctgtcttgttatcttttttatcttatccaactccatgataaaagccatctgtttctcaaaatccgtcatattcttctcctatgccaaaaagccgatcacatacagcgccacccagattccggtaatcagaagcgagcagagcgtcgaaagatacgggaacagcttaaacgagttctcctccccaaggctcttcaccgccagaacgagcgcacagatgccgagcagcatcgatgtcactcccgcacttcccagatacatgctgccgttcccgcggctgtcaaaagaactgaccaccgccgccaccagtatcccgatggaaataatcgacaaaaaaagtgctgccacacccctctttgagtgtgtcttctctgtaaatctgtatccgtttctatgtcgtctcgccactttcttttcctctctgatttctctgatgataataacgcacaaacaggcgatataggccgtaacccgccataccgcccagcgtatttaacaggagatcgtccacatcaaagcttccgacccgaaagacaagctgcagcagttctaccagaagactcagttcaaaactgtaaaatgccgtccgccagaattttttacacctgcctgaaaaaacgggcagaaaaaatccaaacggcagaaacgccgccacatttcccaaaatattgagcagtacggctttcatgccgaggactctccagtattttacgaaacgcgcgatctccttcagcggaaccagattgtaatgatatgcccgctcgctgtaggtgcgccccatcttctccgaaaagaacagaaaatagaacagcaccacaaaataaaccagaaataaaattcctgctgcaagacgatgccctctcttagttgcagccatactgcttataatagtcgtcaatggcagctttgatggtatcgtcaatcacaacacgtccctggcatgtgcggttgtacagatgctctaccacctcttccatggtaacgatcgcattcgtctcaaatccatacttttcgcggatctcctccaatgcgctcttctcgccgccaagccccttttccatgcggtttaaggataccatcagccccacgatcgtgacatctgccgctcctctcaccttcggtaccgtctcctccatggatttgccggaagtcgtgacgtcctcaatcatgaccacacgatcaccgtcttttaacttactgccgaggaagcttcccttatctgctccgtgatccttctcctccttgcggtcagagcagtagcgtacctccttgccatacagattgtgaaacgccaccgcagtcacaacgctgatcggaattcccttgtatgccggtccaaacagcacatcaaaatcatccccataggtctcatgaatcgctctggcataatactcgcccagacgcatcagctgggatccggtcacataagcccccgcattcataaaaaacggggatttcctgccgctttttaaggtaaactccccgaacttgagcacatcgctctccaccataaattcaataaactcctgcttgtactgctccattctatctatatcctcctgttatcctaagccgtcttttgttttcattctattctactctaccataaaaaaaggagaaccgcaatgcgtcccggtagctttcggccttcctgttggcgtaaaaatattagcagactccatcataatgtgtccacattctaattattttcacggttccatcatacctcatccctttccattccactggctcactatacacctgataaaccagcctgtgctgaatattgattcttcgcgaataaactccctgcaaatttccaaccagcgcttcatagggtggtggattttgaaaaggggtttcccggatgacctctatcagctttttcgccttatcatcaagtctggcactcttcaaattcttaatatcttttactgcctgcttatcatatacaattctgtacatagatctaccattctacatcttcctctggcacacaatcttctaaccgcgtatccatcccgcttcttatagattcagccatacctggaattgcgttcaaatatactgtttcctgaattgcattccaatcactttcggaaacaagaactgcatttccttttttgcttacaattaaagccggttcgctgtagcgattaacgtcttctaccagactgtaaagttcctttcttgcatttgttatattgattgccgacataataaatctcccttttgcttgtagtgtaatttctatattttttttgttattttgtcatttgaaaatctcttgttccattctcgtacattcttgttcttcattttagttacatcaaatccgatgtagttgccttatgttcttttatgcttatgaatgtcgagatttttatgtcatagttattatagcgtacgtcattacgtacgtcaagttgctattttattctatacacaagtcacacaaatttttcccaaaagcaaataaaatatccagaatcccaaagtcagacttgtcttttccaactccggtttctggatatcttctgttcctccgatatacgcttataacgcctccgcttctcttccgtatacttcaatctgcgtcagcgcagggaacggcgacgggtcgtccgcttttttcagcttttccaaggtcagttctgtgataacccgctcctcgaatacgatctcgtgcggcttttcgcttttttccagctctgccacggcctcgcttccatccgagaaccggatcgtcacctgcttccaccagttatcgtgcgggaaatccgcccttgtgtacagacggatgcggctgaccgccacctttctgccgaattccagcttcatattcgcatcctcgcgccggttgattccccacgattcatacggccactctccgtgcgcatcattcaccgtgacaccgtcgatcgcgtttctggcggcgaacaccgcctccccgcgcgtctccacattcgccgatgcatgcggataacagttggtctccccatgctggtccatcacattttttgcaagattcctgcaggagccgaagcatgtcatatccgcaagctttgcggtgattaaatgccggttcccggaaaatgtcttgggcgagtaggaaatctttctctccccgaacggaatcctgtagtggacatccccggtcacatagacggttgccgccccgagcgcatcatccgccatcagttcgtagaaggcatttttcggggagatctcaaagatgatctcatctccctcctcgtattctttcgtgtagaccagtgccgcctcatcctctcctctggcaacacttaaggtcatgccatccttattctgtatcttaatcgttatcactgccatctttcctctcatctctccattcatactgtgaaaaaacaaacgtcaggatcttcgcgtgtacatatgcgattccgccggccgacacgaaaagcagcggccagaacacaaacagcgctgccgtgataaacagtgccgcggatgtcagcatcagaagcgtccagccgaagttcttaaacgacatcacaaacgcaagcgcaagcgtcttctttaaatccgcgtctgtccatgccagcagtgggaacacatacagggcaacgaagacaaaaatcaccgacagcaccagaaaaatccagaaaaacaccgttccgacgccgcctgcgaggtgataataaaaatataaatccgctccgaaaaagattccgagcgccagcattccgatccaggcgatcgtcgcagatttaaaattctccttaaacgcccgcacaaaatcttcccggatgtagccctccttgttggacgctaacgtcatggagcaatagcacagtgcacacgtcgccgccccgattgttacgaccggcagtgaaaaaagcagccacagacatgtcagaaaaaacatatccgtcacctttcccataaaacgccagaccggattgtccatatcaaacatttttcccatcgtctttcctccctgtctcttcctgcgaaatcatcgctttgtattcctctgccgaaaacgcggctgccaccccggcgttctcctcaaagatccaccggagcatcccgaccgcctgctccttcctctctgatccgctcacaatcccgatcaccgggtctaagagcgtaatcccgtactgcttcacaaacgcggtatctgtcagtgtgatgccgcatgccacaccgtttttttcatagatgcgcgcccccagcgcttcacatgccccagcgcccagcagttccctaagatcagcaaacgcattcaggttacagtaatagtcaaacacatctttttccagaatcatgaagtcgagctcgtgcgcatacacgtacgtcgtgatcgttgcgagggaatcctgcgtattggcatcggcgatcggcgtctgccccagcgcggctgcatccatggtaagcgctgtgtccacgacgacctcctccccgttaggatcgcccccgatcccggcgaggatcgcctcctccatccgggttgtcaccgcatcgtcctgcacattgttgaccacttctcccatgagaatctgtgtcttttcttttttccccatggtgtccgcgacatagaggaccgctgctgcgagaaccactgcaaaaataacgatacccttatgataagtccaccagtattccagtttttttcgcaccgcgcatcctcctttttgcttctctcctaccagttcaaaacgtcgcccaccagcacgtcccctgccttgtcaaaaacgatcacatttccgtaacccatgcagccgtctgcctccacgaggtcggtcggcgaattgacctcctgatggcagaggatcaccacatattccttttcccctgcggtaatctttaatgcctccgccatcgtctccggatagtctgtctgctttaatgccgagcgcaccggaagcttctcaatcgaaagcggacgtcccggctgtgcatcgatgaccgtgataaggctggtaaagccttctccctgctttgtcaccttgcacaccgtattttcctcttccacattataatgtcttgcaatgtggccgctcttaagctctgccttcacctgcgccgacacaaaataaaaatccgcttctgccattttaccacgataggccacacatgggaacttcttttctcccggcgcattttgtgtcaccgtgccgtgattgttaaaatgaaaatactgctggtaggtgtgacgatccccggtgtacatctcgtccgccagaacatacagatccggctttatgtaaaccaccttccggttcacatagacaccgctcggaagatccatgtagccgagctgccccgcctgtgcaaattccgccagctttgtgcaccggaaattctctttgaccggctgggaaagcttcgagcactcccaggaatccttgcagacggtaaacggcagatcatccaccgtgatcgtattgtgtcccgacggatccttgtacgaaaaacgctttggtcccgacacgtaggtatacctgccgccgtccatcagcacatcctcgccgttaacaaccagatcaatgtgcagcttatcggaatgtccgtgccccgctcccatcgtcccggaatgcagatgcagaaaattggcacgctccgaccagtccgaccggaaataggtgttcccgctgtgctccaggaacagcgatgtaaagtccggttttctgcgcgccatcccggcgtattcttcccctgctttcatgccgagatcccagatactctcataatcaagacggtcgaatccaccaaaccgcagcaccggatttaaaaacagatacgccgccacgctgatgcggtcccgcacatccacatcgtcgctgtcccccatcatcacgatgtggtgatccggctttaaccacgcgacatccgccattgccatcttctccgtctggcgcaggatcacgtccggcagtgcaatgtcgttccgctttgccagaaggatcacatctaacagacagtgcagcacctcgttgtgatacatcggcgactgctcccagtgcacgccgtccggcatgatctgcatccgcacctgcacctcaagattcttcacggcaaacgcgataaactgctttgtcttctcgctttgcgggagacacacgccgatctcaaacagcccgtgattctcaatgacgccccagttgctcatatagcggtaagcggaatgacattccatgatgtgttccgcctgcaggatcatgctgtcataatatttctgtaaaaacgcttccgtgagcgtcgggctgtcatgaaacagccagatcgccttgctccagtattccccgcggaagccggtgtctagacttctccacggtcccgccgcatacttctcgttcagcgggacatgatcgatccagtcctccgcaatctccataaacgctctcgcatatttctcatcccctgtcatctgatacgcctgaccgagcgtcatgaaaaagcggtgtctgttgaactgccagacaaattccggatcgtctgccggcatatacgtccagtcgatcgctccgtcaaactgtaccggctcgtcggtctgctccagatcccacttggagttgaacagaaaatatttccggcacacaccgtccgccaccgcaagcgtctgcgcgacatcttctggaaattgctccctgcagtacgccccgaccgcttttccatcctcacagtaatagtgtgatgcatccctgtcaaaaaatgcttctcttttcatcctgccataccttcctttttcctttgttaccaatacggattccagtcttttttcagccgcatgagcgcttccatgtaaaaatagtctccccagatattgcactcgtccaccccgtaatgattgcaggtattatacggagagtggttggaataggtgctgtgtaacaccagcccgttcgactcttttggatctttcaccgcgtatccgtcgtacaacgccttcatcaaccgttttgccgttgcacggtaagcttctgcctcgtccggctttagatattttgccatctcaagcattccgcatgctgcgatcgacgccgaggaggaatctctcggctgatcgtccccgtccgtgaactccagatcccagaacggcaccatatccttgggcagatgcgccaggaaaaagtccgtgacatcccggaacttctgaatgtattcttccctttccgtgtacttgtaggcgagcgccatcccgtagatgccccatgcctggcctctcgcccacgccgaaccgtcgcggtatccctgacaggtggctccgtgatccggtgcccccgtcttcatatcgaagaaaaaggtgtgccaggtggaatgatcctcacggatcacattggcgaccgccgtgtgaatatgcttctccgcaatgtcccgatacttcggatcgccggtctcctccgacgcccagtagagcagcggcagatttaaaagacagtcgatgatcagccggtagttttccggtgcatccatcgcaccccacgcctgtataaaattgcccaccgggtgaaatctgcggatgagctgatcggctgccagtatggctgcctttcttcccgtctcattcccggtcagtttatagcccgccacgcaggacggcgaatacaaaaatcccatatcgtggtgatcgacttcgatcttgttttcaatgcggttcaaaaagctgtcaatctggatttcaccggcttttttatagatgtctttcccggtatcctcgtaggacagccagatctcgcccgtccagaatcccgtcgtccagtccacattgtccgtcggcgcgtaaaacccgttctcgctgtaagccttctggaacttcgtcgtgaactccggcagattgcgctttacctgcgccgtggagaaatccatcgcctctctgatctcctgctctgtgatctgcggtttttcttcgtatcgcatacccttcttctccttttccgttttcaaatcatgttatgtttatccaacacgttattcctgtagagtaaaacaaagccgtcacacaaacgatctctttttgtgtgacagctttgttacataccttcggtcttagccctttaaaccggtagatgcaattccctctacaaagtatctctgcagacagataaatacgatgagtaccggaatcagggaaagtaccgagcctgccataatcagtccgtactgggaggaatactgaccgatgaacattttgagacctaactgaatggtcttcttctcctgggattttaagtaaatcaatggtccgaggtagtcattccacgttgccacgaaagtgaagattgtcagcgtggacagcgccggttttgacagcggaagcatgatgtgcgaataaattttgtattcactcatgccgtcgactctcgccgcctcacacagttcgttcggaataccgtcatagaactgtctcatcatgaacacgccgaatgcggaaaatgcctgcagacagatcattgcgagcagcttatcgttcaatcccatcttacgcatcatgataaactgcggaaccatgtatacctgccacggcatagcgatggtcgcaatgtatgccatgaacagtacattcttatgcttgaactccagttttgcaaaagagtatgctgcaaagctgcttgtcaaaagctgtaaggcggtcaccacgattgtgaggaacacggtgttcttcacgaacgtgccaaacggaatcttcgtccagatatccacgtaattgctccagcgcggtgtctccggaatcagaacaaacggcgtcatctggaatacttcacggtctgtcttaatggaagcggacagcatccagataaacgggatcaacattgccgccgtgataatcagtaaaatcagatacaggaagaacttcttgatcagattgtttcgtttcatcgatgtttcttttttctgctttgtcattatttctctcatctctgttctccccctttctagtcttctaacttcttctcatatgcaaactgtataatcgttacagcaagtaccagtacaaacagtaccattgcgaccgcactcgcataaccgagtttccagtagtcaaatgcattttcgtaaatgtagtaaacaagtacggatgcagagttgcttaacttgccctggcttccgcctgccagcatgatggcgatgtcgtacaccttaaagcagttgatcgtcagcatcacgacaacgaaaaaggtggtggatcgcagctgcggccaggtgatatatttaaatttctgccaggtcgtcgccccgtcgaggcttcccgcctcgtataattccgacgagattccctgcagtcccgcaaggtagattaccatgtagtaacccatatatttccagacactgaataaaataagtgtcagcataatcagatttccgctaaaccagttcggcagattcttctgctcgatcccgcagattgtcatcaaaagataattcaccggtcccttggtcggatgaaaaatcatggaccataccgttgtgatggcaacgagggatgctacatacgggaagaacgataccgttctaaaaaaacctcttcccttcaccttctggtttaagacaattgccagtgccagcgacacaaccatggtaagcggtaccgtgccgacacagtagataatcgtgttttttaaggatgccgtgaaaaaagtatccgacggcagtttcaagaaattggaaagtccgacaaactgaatcgggttgtttccatcccattccgtaaatgccagaataaaggcaaatatgatcgggatcaatgtaaatacggcgaatccgatgaagttcggcgcaatgaaagaataggcaaccagatcgtctctggtctgctttgacagtttgcggccgcttcgcattgcagcagccttccactgcagtttgtttctgttttgaattagtttctgttttttcttgttatcagtttcgttctgactttgttcccacagtcttgccatttcggcttccatctgctctaatttttctgctttcttcttatccataaccatgcccaaaagccagatacggcttatttcctttctcctttaagctgtttcatttttaagggccggctgttttcagccagcccttttatcagcaatcgtggttatgcttccgttccattactggttcagaatctttccaacctgctcattcatggatgctacaccctcttctacggtcacttcacggttcatgatggaagtgtggtaggtgtcgaggatactgttgatctctgatacgttctcagcatacggtacctcaaggtatgcatttgtgatgtttaatgcttccttgctgctctcgtctgtcgggaatcctgccatgccggcgattgtgttgataacatcgtccgtcataattgccgggaagttaccggtggaagccattaccttagcgccctctgtaccggatacccagtttacgaaatcaaatgctgcgtccttgtttgcggaagcgcttgtaacagcaagacctgtgatggtagcgatcgtgctgcctgcctctgctccgtccggatgcggatagcttgcgataccccagttgccgcagagagagctgtcatactcgccgctgtcaaggttggaaatcaaagtggagatgaaccaggaacccatattcatcatagcaacgtttccgttggagaatgctgcggagtaatgaagaccttctgtgcttaagtctgtgtaggtctggcatacaccgtcatcctcttcgcttaagatcatgtcatagtacggaatcatccagtcgtaattaccgtctaagatcgaatgctttccatccagaattccgaacagctcgactgcggatctccatgtgtgatagtggcatccgtatacctgtgaaccgtaggtggtatctgtcagctgtcttgccaatgcatcgtaatcttctatcgtcatatcgttggacggataagcaatgcctgccgcatcaaatacatctttgttgtaatagattaaccagtaatcacttctgaacggaagttcatataagcttccatctactgttacctgatctgtgattccgttgaagtctgcgaggttgattcctgcatctgcgatgtaatcatccagggactccagtgtgttcttctgaaccagtgtcgcatatcccggtacatccttgatcgtaaccacatcgaagtccgatccgcttccggataactccgttgcaaggacagtcatgtaatcggttgatccaaggtctaccatctcaatggtgacgtttggatttgcagcctcatatgcctccttgagtgcgttccagtaaggagtggtctcctgatcccagattgcccatttgagagtgactgcctctccatctgtcgcagccgcatctgctgctgtctcagtgcctgccgcagcggtgtttgtgtctgctgccgcatctgctgatgcatccgttgaagctgttcccccagagccacaacctgcaagtaacgcccctgtcatgcttgctacaagaagcatgctcaatactctttttttcatctgaatcctccttttcgtatctctatcgttctccgataagatgattttattatattggctttgccatacaatggacatagatttttttacgtttaaattcacatttttttcctctttctgttttcgtctgcattttttcttctcaaacctgtcttttttctcaaaacctgtctttttttcttcactttgcttttcgctctcccaaaatggatttttttctttccgaattttctttttgtgtctataatataaggtatgaagaaaaaatttacgacgattcgatcccgaattacactgactacgattacactctgtattttcttaagtatcgctgtgtcctatatcagctattctttctattataaaagtgtaaaacaaaatatgatccgcaccgcggagtcctctctgacattgctcggctcctccattgacagcaacatccaggatgcttattctttcgtccgcaactgtcaggcgaactcttttatcctgaattatctgtcgtcacagggttcccagagtgcgcgtatcaccgcctctacttatctgaagggaagctacaacagttacgatggccgctactatatcaagcgcatttttattgcctcctacaagaaccgggattttatccaggctcttgcttccaccaacaaccagcccttccactcggcagacgatatccgggatctctatttttttgacagctactacagcagcccttcctattcttatagcgaaggtatcctgacaaccgacggcggttcacagtatcttccgatcatccggccgctttacagccagtataattccgacgagctcggttttatctacatcgaaatgtcgccgaacgtcgtcaccataccgcttaagaccgccggaacctaccagaacaacgacttttacctgacgttggaagatcacagctatgtgtacagcaattacaccctgacggacgccaacccttcctatgagattacgggagatctctcctccattgcatctttctccgatacgatcgtaaaggagatttcaaatgccaacggaaagttcgtctccatctcggttccgctcgccgcggaacactgctatatcacgcagctgatcacggtcaatacgttttacggacagcttgcatccatcattttcgtcatcgtggcgtgcgccgtcattaccggtatcattcttcacacgatttttaatcatatgatcaatcatccggtacaggaactgcaggtccgaatgaagcacatttccgagggaaatttcgagcgcgactcctcgatcgagtggcagcacgagctcggcgacatcggcagaagcatcaacgatctcgccgaagatgtgaaaacactgatggatcaacggatccgcgatgaaaatgagaagcgtgagtacgagtacaaaatgctgcagagccagatcaatccgcattttctctacaacacgctcaattccatcaaatggatggcaacgatccagaatgcgcctggcatcgcggagatgacgacggcactctccagacttttaaaaaacatcgcaaagggaacagagaaggcggttccgctctctgcagaactctcccttctggatgattattttacgattcagaaataccgttatggaggaaccatctccttagaatacaggatcgatgacgaggcggcattaagctgtctgattccgcgcttcaccttacagccggtcgtggaaaattctatctttcatggcattgagccaaagggaacacccggaacgatcactattcacattttccggaaaaatgacgcgattcttcagatcgacattaccgacgacggcgtcggcatgacggaagaacaggcaagacagcttttgtccgagaacaagaacgaaaagactgaatttttcagggaaatcggcgtcagcaacgtgcacaagcggctgcagtatgaattcggcgaagattacggcctgcgtgtggaaagccggctttccgaatttaccactgtgtccgtcctgcttccgcttgcgccgcaggaagacatcggctaaatgcagacagatatttttacaacaaagaaatggggttacagttatggtacagcttcttatcgtggatgacgaaccgctggttcagatcggcatccgctccatgttaaactgggagagcatgggaattgaaattgcaggcactgccacaaacggcaggcaggcatatgatatcattctggaaaagcatccggaaattgtgattacagacatcaaaatgccgattatggacggcatgcagctgatcgagaaatgtcagtcccaagagcatccgcctctttttattctcttaaccagctatgaggaatttgctctggtaaaacaggcgatctcctaccaggtgctggattatctggtaaagctcgagctgacggaagatgtgttaaacgctgccatccagaaggctctcggcattctggaaaaagagagaaaacaggcagccatcccggaaaccggttccgatctctccttattgcaggataatttttatatccggctgcttctaaatctattcgagacagaggaacaatttgcgacacagtgcgatcttctgtccgtccgcttcactgccgccggctacacggtggcgtatctggaaatgcagaataccaggcagagtgcgtcagctgtcgcatcgtcggacatcacactctaccgcagcagctaccagatgatccggaatctgatcgtcaaatatgtgccatgccggattctgttccttgacacgacacaccttgcgattattttttccctgaccaaagaacagacgggcagctatcatcagcttctgaccgatgcactcacacaaacaggcgacatgctctacaattattacagcataaggattcttgcatcggtcggctctctcgtcgaaaatccgagagatctgtccgcctcctactcggacgccagacagattttcccggacgtccgccagagtgattctgccgttatctttgccgacgaggacaatcccgcccgcgaggagcacaacgtcttcaacattgccatctttaaggatgagctgcagaaagcgttcaacgaatacgatccggaagcactctccgcagtcttccacgacatcattgacctgttttccaatgataagagacattactcccaggccttatccgccgcgagcaacgtgctgcacttaaccctctcctgcctgagcaacggggaagaacagttaaaccagatctttggtgaatccgccaacgggtacaactgcctctacgaggcggaaacggtgccgcaggtgctctcctggatgaccgtgctgtgcgacggtctgtgccgcctgttttccgagcacaacaaggattacaagaaccgaaccatctccgcggtcaagaaatatatcaatgaacacgtcgatgagaagatcacgctgaatcagctctccgacgtcttcaacatcagcccgaattatctgtcgatcctgttttccaagtacaacgatatgggatttatagattatgtaaaccacgcaaagattgaatgtgccaaggaaatgctggatgagggaacgctcaagatctatgagatctccgacaaactggggtacgagagcgcgttctatttcagccgggtattcaaaaaggtggagggcgtgtcgccgcgcgactatatcaaccggacttgaggcacttctttcttttgcccgtgttaaatgttataccatttaatctcgtttgcctccatctccagaggaaaactgctgccatcaccacgataaaccacagttttctggcgggcatatgtattgttgaccacgcagaacctgccatttttcacataggcatgtacttccacattgaagttggaactgaaccactgatgcagatccttctctccgtgggtactccacagaatactgcggtacagaatacggctgttctcaaagctgtaaggcagaccgctgatataaacacagcgcccctttccaaactcatggacagccatctgcacttccttctcccgctgtaccagaatttccgtgtcctcgtaagcgaagatgttctttttaccctcaccaaagtccactggcttcgtggtatctgccagaatgaagtgatcgggatgctcctcccagttatatttatcgtagtttaaagtaaatccggtttctttttccacgccgagcatatctgcaagctgcaggtaatgcccctgaaactgatgaccagacggctcaccgacaccgataaaacctccgccgttatatacaaactcacggatagctgcggaaatggcaggattctcccagatgccgccaccggtatgagcagtatccccatctcccacattgataatcacatccagatctttaagaatttccggatttgccagaatatcatcaaaggaaataaatcgcacatcgaaaggggcaccacttaatgcttcaataattcccgcatagctgtaattctgtttctggtatagggcatggtgtaccatatggcatccccagcttctaattttaccccagctgttcaacacagctactttcctcacgcaataaggaatcgttccctttgcgttctcatacagctcgcggaactcgttgcacacattctctacataatccagaaattccggaaaatccagagtcagcttcagatatccaccatagccgatccggtcaataggttttctcagaatggcacgtcttgcggtaatccagttctcctttgcctccttcaccgggtctccgccgtcacaaaaagtatcggggaaaaagtacggtaaaaatctgccctctgtgtattttacaccttcaatatcggagatgagacgaagagtactaccgtttcctacactgcctaccaccgcatcaagaccaatggtggaaaattcctccataaacggctcggttccaatccagtgatccccaagaaacatcattgcctctttgccgtactcatgggtaatgtctaccatctctttggcaattttggcaacctccctgcgctggaatgcctggaaatctttgaactccctgctaggcacacggtactggttgttgtaataaccctggtcaatgatgtactcaggccggaacctgtaaccggcctccttttcaaactgctctaagatataagggctgacagaggcagaatagccataccagtccacatatttttctctctttaactcatcaaacatcaaggtaaactgatggaaaaaggttgtgtagcgaatcacattcacgtagggatgatccgcgcagtatttgcgaagacgctccagggaatatttgtgggtcttaggctgtctcacgtcgaaagtaatctgatgttcaaagtttttccagtcgttggtaaccgcattgtacatatgtaccggatcccagataatgtaagccagaaagctgaccgtgtattcatggaaaggaatggcatcatgaatgaccacacagcccttttcctcctcatattcccaatgatctgcggacacaacattaccggtagaacggtcgacaacctcccaccaccgttttttgtcgtctctggtattgaccatcatcagttcctgggatatacctttcataaggggaatctctaagtcagtatccacagcagtgtaaaaggatgtcatcacatagcactgctgtacttcatccgggtttgcctttgcccactcgttgtccttccgggtagtataataggtggcataaatttttgccccggttctgaccagttcctctggaaactctgtaccgtcgcagtcacgaatggcatcagcaccccagcgtttcatcaattctatggtttccggcaccacatccaggttggtaggaatggttacacgtccctcttttaaagtcattggtctcttttcctcctgcaaaagttaagtcgttgtaacagcgttttacaacggaataatcgtattatcctcctcggtataagttccaccgcccatcttgttacggacaaaaggcacaccctccctcacataaaaagtgttatgggcgagcaaagcatccgggttctccgacgggcttaccgtaccccccagatcgtcatagctcacattatggcaaaaactgttgtgaattgcttctgactggcagaacataatgcatccgccctcattttgtctgctgtaattatattcgtaaatggttccatcaccagaatccgcatcgtaagccatcccgtcctgatttaatcttgtatctgccacttcattgcagcggaacagggcatccttgcacttccatggccagatgcctgctgccacttttccggcacggttctccggccggcggtaaatcctgtcattgatttcgcatgcaacggaatctgccgtattgtgttctactaatgggcgcaaagcatacatcgcagtgatgccatcgcccccagcggcttttacataattgtcccggatgaccatattttcatgtccgtatttcaaaaaggtatcctcgggcagttccgccccctggaatttgtcatgtgcataggtgtatccaacagcgattccccaacggcttgtcttgtatacaaagcagccttccacagtgatatctttaaagcgcgccacaccggtagctttttcatcggcaggctttaaagctgtcatataaatgccgccgttgttcatatgtttgtcatagacattgccattcacatcatggatagaaaggttgcgcagggtaatgccgctgcgcactcccttatcctttgccaccacagccacgccagtgcggttcattttatgaggagcactgtaatcttcacccagaatttccactgcctgattgctaatctcaatatcatggatgaccacatgctctacatcatataaaagtacggcagaggatacataaccttgataaacatgcgcaggtgaatccaatgttgtaccgtaatcctgataccagatgccctgtcccccggctgctatcaggggattttttccctccccctcttcttccggtgaataagagccaatttcaatgggatgctccctggttccactgtcttttatctgcagaaactgatctgtaaaaacggaatcccgggccagcagcaccttatcgccagggtacagtctcaatctgtttacctgaaaaaggctggcaaacggggaatccatggtcagtccgtcgttactatcacgcccggttttctgattgacataatatgtcctgtatgagcctgtcataggcatcctccctcagtcttttttcgataatctgccggacatcctcatagtcaaacaaatccccatggtaacgcccgaacaaatcctggttattttcataaaatgcccgcttttcttcctcagtaaagccggggcagacccccagcttttttatctgctccgagggctgaacgaagtccagcttaaatcgtgtgagttcgtactgaagatacatggctggagaataaaaacggacaccataaagagaattttccttatttttcttcgcccgccttttttctaaagcctcgatactggcatcttcaatgagcccgaactgttttgcaagaagaagggctgcctgcgcctcctcccattcttttttatccagacaatatttccgattcattatttcactgctcctgcaattccattggcaaaactcttttgtaagcacagaaagataattgcggtaggaagggtacaaatcaatacccccagcattaacataccatagtctacgctgtaaccactttttaagtttgcaaccaacatgggcatggtaatctggttgctgtcctgtaaaataatcgttggccagagatagttattccaggcattcatgaaagttactgtcatggctgcgccgtaggtagacttcataattggcaggaacatggtaaaaaaaatcctgatctcactaagtccttccagacgggctgcctggataatatcatgagggaaagaacgggctgcctgccggaacatcataatgagaaatggtgtagaaagagaaggcagtgccagtgcaatccatgtattaaccagtttccatgaagaaaacattttaaacaaaggaatcataatagcaacaaagggaagcatcatggcaagaagcaggatgttcatcagaaggtctttgcccttgtcatgataaatctcaaagccgtagcctgcgatggaacagattaacagtgcaatcactgtaatcacaattgcattgcggaaagagttaaacatggctcgtcccagattctggtttgcaatgagactctggtaattttccatcagataaatacctgggaacagttttccacgtacaatatcaatgctggagttggttgctccacaaatcatatagtacaggggaaacgctgacaggaaactggcaatgattaaaataatataagcgatagttgtctttactttagtcacgtttgtcacctactttcatctggattgcagaaagaactgccacactcacaaggataaatacggaaattgctgccgcatagttaaatttgggtgtttccacaaaggagatattataaacataatgcgccagtgtcatggtggacttaccaggaccgccggaagtcaggttaacagactcatcaaacaactgtaacgtacctgaagttgacataatagccgtcaacaggatggtaggcctcaataagggaatggtaatcttcataaactgctgaaaaggggtcgctccatcaatataacttgcttcgtatacggaatcatcaatattctgtaagcccgcaagatagaaaaccatattgtatccggtccatctccagatcagtgcaatgatgatgacaaaacgggctgcccatgcattctggaaccagtccactctgtcaaagccaagggtcgtaataatattatttaccagaccgtcctgggcaaataaggatttgaaaatcatggaataggataccagtgatgtcgcacatggaagaaagataagagtacggaaaatactctttcctttaatcttcggactgttcaaaagctgtgccagccccagtgccagaagtaacatgacaggcacctggattataaagtaaaatacagtgttaaacagacactgctggaacgtcttatcctttaatattctctggtaatttgccagccctgcaaatcctgatccttttttggtaaaggacaggataattgcctgtatcataggataaaagcaaaagataaagataagaagtgcagccggaattaaaaatgcccatccggtcaggttatgttttttttccaaactcatttttgctttcttctgtttcatataaattctcctgattaaaaagaatatcgtttcgcgatattctgcgccgcttttacgccgctttgggcgacatatatttctgtaaaaacctgtgcatcctcgcctgtgaaaaaataccgggaacgcaatacgctgatcccggtactggctcatttttcacttacttattcactaatgttaaattcaacagcatcctgtgcattctgaatttcttcatcaatatcagcaccattctgtactacgttagtgattgcatcggtcagtgcacttctaatatcattataatatgcaccatagttaattgcgggaactttgcctgcaaactcaacaatgtctttgtatactgcctgtccaccatagaaatcagaagtctgattgtaaacatccgactgtgctgcaggcagatagctggaaattgcgccggcgttagggagtaaatcatcgtataattcaacgctgccaccaaaggttgtctttaggaaatcaaatgccagttcagtgttcttgcaattagaagatactgcccagcttgcaccaccacagtttgcgtaattggtggcaccatcaatgccgtctaaagcaggcatgtttacaatagcccacttaccagactggtcttctgccgactgaatggatgacataatccagcagccctggataacaccagcagcctcacccttgttcatggatgcaatgtactgatcccagtcggtgtagtcaaccataatcccctcatcgattaactgcttgtaaacctcgattgcttttttcaaagctgcgttgtctgccagatgaacttcaccattaacgataggagatgcgcctgcagactgcagcatctcgataacaatttcagaaccgccggaacttgtcagcatgggaacaccgtttgcatcgacaacttttttcgccagctccatgaactcagaccaggttgtgtccttgaaatcttcaacggtaagaccggcagcctctaccatatcagaacggattgccataatagatgctccattatcaaaaggaataccgtagtgttttccttctgcggtagaatctcctaatttaccaccggagaaatcgtcaaaattaataccggaatctgataattctgtgaacacctcgggatagtttgcaatatttttctggaaagaattatcctgcatcaggaaaatgtccggcagtgtgtcataattatcggcctcagcagcggtaatgatgttctgctcaatatcggtgtaaaccttctcctgaatgtccagtttaaaattgggatgatctttctggtaaattgcctcagcctgtttcattgcatatacattgaaggttggatcccagcaccatacagtaagaacttcttcgccatctgctgcatctgtgccttcagcttctgttgcagactctgccgggctggtttcagctgcaccgccggatgcagaagtgcctgctgtgctgttactgcttccgcagcctgcaagtgtggaagcggtcatcgctgctataagcagtgtgcctactaatttctttctcatattaaatcctcctttgaaacaatacatcatttgttgatggtttcattatagctttccatatcctactattcaatttctatgttgtcctattctatcaatatcttgctgtttttactaaaaatatgagtattttgacagccttttcattttcagcattattattttccgtcattttaacgtagtattttttatcacaccaatttcaatgtgcaaaatgacgattcactgctcttatattttattatattgttcagcaagatattgatattcagcaacaatttaacacaatacaccgctgtcttttcgtgatataatgaatcttgacggattcatattagaagttcctgcggaacttcagatgcgcagaaaacagcgcagaaacaacgcaaaaatgatattcatgaaaataagtttttggggaggtttttatgggaaatgaacgtttcgacatctccattccaaaagaatatttaacaagagataaagcaagacttttatatgtttcctctgcaacctacggtggtgactggatcagtacgccccacacccattactgttctgagcttttctatgtaattgacggtgtgggacaattccaggtagaagataatatcttcccggtttctgccaacgatctggtggtcatcaatcccaatgtgtcccatacggaacttggtttcaatgccaatccattaaaatatatcgttttgggcattgaagggctggaactttccgttgaaaataacaacgccaacttctgcattgtaaatttcagggaaatcaaagataccgttaacttctatttaaaagtaatgctccgtgaaatcgaaacccgctctgccggctatgaaacagtctgtcaggatttgatggaaatccttatcgttcttttcggacgccagaccaatttttctacgattctcagtcccgcaaacaaaagagcatcccacctctgcgattccgttcggcgctatattgatcagaactgcggggatgatctctccttggagcatctggcaaaattttcgcatgtaaacaaatattatctggtacatgcctttactgatgagtatgggatttctcccatcaactatctcatgcatgcccgcgtaaaaaaagctgaaaagctgctggcaaccacagattactctctttctgtcatcagccatacctgtggtttttcctcctccagctatttttcccagacctttaaaaaagtagcaggagtttctcccagcagctaccgcaagacggtcaaatctgaccatggagaaatggaagacctttcccgctgacatacaggcaggaggtcatttatttgtactcaaaattcgggatctgtccccagcgctccttaaaatagtgtgccgccatcttcggccgccggtctctggtaaagagaccttttttatttccgtcggcgcgcatgcagccctggattgtggcgaaatccgcaaaattccagacctgctcgccgatgaagaagctgcgcttgtcaaattccgcattctgtctgcggtaatattccttctggaactcctcggagaacatttccggcacgctctcgtggatacccgcaaccgcatccgcgccgtattctgtaatcatcaccggtttgttctgtttttcccagaaatccagttccatatttaatgcatagcatgccgcatcgagatcgccggacagattgtaccagccatagtaacggttcacacacaccacgtccatcgtcctcgtcacgagatctctctcgtagttgttctggcagcacacgaaagtcacaggacggtctgccggatcaaggctgtgcgtcagctcatagagcgagtgccagtaatcgtacgccgactccggaaaatgctcggtgtccggttcatttcccatcgaccacatgactacgcaaggatgattcttgtcccttgcaatcatctcgcgcagcacctgctcgtggtgctctctgatgtgaaaggtcttgtacgggtcgatcttatctcccgcgccgattccgaccgcaggcgtctcatcgatcacgacgataccctctctgtcgcacagctgatacatctcctccgcatacggatagtggctggtgcggaaagaattggcattcagccagtggatcagattgatatccttgacatccaggcacacatcgagtcctcttccacggaaagccgcatcctcgtgttttccaaagcccttaaaatagaacggttttccattgatcaaaaactgcgttccctctaccgccaccgtgcggatgccgaatgtctcctcgtagagatcctccccgtaagtgacactcgccgtatagaggtacggctcccccggccacggccaccacagtctggcatccgggattctgactgttccgcccgctccatccgccgctgccacctcattgccgtccgcgtccagaatacggatgcgcacctcatcctcacatacgctgcccgccgtcttaatctcataatttaccactccggtatcgccgtcaatgtccggcaccagcgtaatgtcatcaatataagccgccggcgtcgtatagatgcggaccggacggttgattcccgcataattaaagaaatcaaaattcggcagattctgcggttttctccataccttcgccgcttcaacactcggcacgcccggattgtccgatccgaaaaatgccgtgctgccctcatttccgaccggaagcgtgctgtgatttacccggttgtccgccgcaacgacgagttccgccgtctctcccggcacaagctgatctgtcacatccacctcaaacggaagaaagccgcctttatgcgcagtcagaaatctgccatttaagtacacctttgcagcatgtgtaaccgcgtcaaagcggagcacgagacgctgtcccttcagataggacggaaccgtgatctttcgctcgtaatacgcccagccgtaatggttccggtatttcgggtcgtccttctgatcgttgtacgatgccggcaccgccatcagctctgtgtcctcccccatcactaaggaatctcccggctccttctcatctcccagtttaaaattccatactccgccgagatctatcaccccgcgtactctgttctctcttggatacaacatcttttcttcctccattctttctactgatttcttcccgatagcttttgtctgggatttcttttattttacatttcttttgactgctctatgccgtctatcgcagcatggatttccccatcctgtttcgtgacagtatacatttttccacgcacccgcacggacgcatggaagtaatccacttcctttggaatatgcggtgcaaaatcgcagccgccttccggcgacagatggattccggcgatctcctctaagatcacaggcacgggcgcactcgcccacggatgacacaggctcgtgttccacttctgatctttcccccacgcctcaaagcaggtcgtcgctccctcccgcagcatgttacaccacccgtgatcgctgtcgtttagcagcagcctgtacacactttcataccgcccccgccgtgccagtgcaagcagcaggtaataacttaacatcacgccgcaggaaaatccccgtttttccagaaactcaatgacaggtgcttcctctgcctcctccagaagcccgaaatacagggcatacacgttggagtgaagcgatgtgtggctgcttgtttcactgtctgcaagaagccccgtctccttccggtaaaacgccctgcgatacgcgaaaaccggcttctccagctcatacggctcctctctgcccagcacacgggcgagcccgttgagcgtttttttcgcaccgagatacagggcattgatgacattatggcaccccgcccccacaacgggtcttgtcagcgcaaaatcatactcatcccgcagattttcgggccagtcgaccagattccacttgtctgccacctgcacaagcagcccgtccgcgcgctcgtactgcgcaaaatgccggatcatgccaagcgccgtcttatagtatggaagcagcgcagccgcgttgccggtgtagcggtagtatagtgccagcagctgcggatacatcagggaataatcggcgatctcctgcatcagtcctcccggtgcaaccgccagaagccccgggcagactgcccttgtctgcgcaaactgatcaatgcatttcaaaagcatctgcgtctccccggtcagcagtacctgcgcatgcgccgtcacaacgacatccccgagatattgtcctttttctctggtcgggcaatccacatagccctcctgcgttccgtattttaccgcgttcttacagatggaaaaaatctgctccagccgcttttcggaggacatcacctctgcgccctcctccatcggatagtggcgtgtctgcacaaaaatcccacaaatgttcacgcccttccccggaagcagctttgcgtagcggaatcccttgtaatcatacggttccagactgcagcagccgtctgagagcgtccagatctcgtggtaggagcagttgcagcgcatctcgtagcggacgctgccgctctcatccagttcctctccgcagaagatttccacggtatcccccgcgcttccctccgccgtcagacacaggcttccggcgacttcctctcccacatcgatccggatgctgccatcctcatagatctcgactttttccggcttgatgcgctccccgcaaagcatccgcgtcggctgtaaatacaaccggtaatccgcccactctgccgcagccggcgtcttccatccggcatcctcaaattccgcactgctccatccttccgggaattttctgctgtcaaagttttccagaaactgcgtatcatatccgattgttccgccgctgtacgcatccgtcctctcatagcaaaaacgaagcggtatccgacagccctgcgcatccatcaactctgcggcaaacgcaaagcgcaggtcgccactgttgtatacacggttgattaacccctgataatataaatgcagtccgaagcagtgctctccggcctccatcttccccagtggaatctcgttgtaatagtagtgatccggataaccgggcgcaggtccctccgccacaaatccggactccacgtacagcttgtagtgatcgtccgccgtcagtcttaacgtcaggttctcctgcgccgtctcaagcgtaaaacgcgcacgcaccagaacatgcagattccgccggaattccgctgtcagctgttgctctgcctccggttgtttttccccttcctcctgctccttgtggaacagattaaccggtgtgatatgtataaattcgcggatcgtaagccactctggactccattccgctttttctctgctcattttttctgtcatcccgccatcctttccgggcgtttgttcttctgtctgcagctttcctgattccttcttcttggcagtcgtactgcacagattcccttacagacagcttcctgattttttattatggtataaaaaaatagtgcatttttccatagactttcttatgaaaaaatacactatttctatgtcatttttatgctgcctgaaattacttactgcggctgttttccgatgtaagcaaggataccgccgtccacatacagtacgtggccgttgacaaaatcagatgcatccgaagccaggaatactgccggtccctgtaaatcctcggcgcttccccatcttgctgccggagtctttgcgatgatgaactggtcaaacggatgtctgcttccgtccggctggatctcgcggagcggtgcggtctgcggagtcgcgatatagcccggtccgataccgttgcactggatgttgtactcgccgtactccgatgcaatgtttctggtcagcatctttaagccgccctttgccgctgcataagcggatacagtctcacggccaagctcggacatcatggagcagatgttgatgatcttgccgtgtccttttttgatcatggacggaatcaccgccttggaaacgataaacggtgcgttcagatccacatcgatgacctgtctgaactctgctgcggacatctcgcacatcggaatacgcttgatgatgccggcattatttaccagaatgtcgatcacgccgacctctttttcgatctttgcaaccagtgcgtttacctgctcctcatctgtgacatcgcagacatatccgtgcgccttgatgcccagctcctcataagcggcaagtcccttgtcgacaagctcctgcttgatgtcgttgaatacgatcgttgcacccgcctgcgcatatgcagatgcgattgcgaatccgatgccgtaggatgcgcctgttacaagcgctacttttccctctaatgaaaaattaaccatagttttccgtcctttctttttccctcttattactctggtactgctcattgcttacacctagtatatcatgtgcaaaaccagcacatgatcaacattcgccgttcgtcaatcatgcaagcatgttgactcacttgcgctcattatatcatgtatgttattccatttcccgcaatattgtattataaatcttgcaaatattgaacttttgtcctatgctgtgtagagaaacatgccgcaaggcacatagcgccactggcgcattaaaaaacggcggcagctgccgcacggattgtaagaacggagaacctatgaatagctgtacaacctgcaaagaagccatcgcgcactgcatgagcacccacacattcgctttcgcccatctctacggcgacgagaaaatcatggacatgcacattcacaactgctgcgaagtctattactcgatttccggcggaaaacagtttctgatcgaccactgcctgtacgacatccgccccggcgatcttttcttaatcaaccagtttgaaagccaccacctgacgcagatcgatcagcagacacacgagcggatcatcctctccatcgacccggaatacttatcgaagctctccaccggcgcgacagatcttggcctttgtttttctttccgtgacaccagaatgccgcaccagatccatctctcccccaaggagcagaaccgctttatgtactttatccacgaactgcatgacgatggcggcattggggaagacctcttagatcaggcgatctttctggaattgatggtctttttaaacagagccttcgccgcccgctgcacagacgccgcagcccccgccccggctccatcttccaattaccacgcccaggtggacgccattttatcctacatcaactcccatatcggcgagccgctgacgctcgccggtctgtccgtgcatttttttatgagcacgtcctatctgtgccgtattttcaaggaggccaccggcaccaccatcaacaaatacatcaccgcaaagcgcatcaccctgtccaaatcgctgctcgatcagggctgctccgtctcggaagcctgcgaggcctgcggcttcaacgactacagcaattatctgcgtgccttcacaaaagcagtcggcatctctccgaaaaagtacgcgcagtttcactcctgaggttatgcacgtttcctttgtcttctcacatatgaaacgccgtgcccagcaagcacgatgagcatgctgacgcaaaacggcacatagaaatccatgccgcgcaccagcaccatggacgccttcacatactgtgcgccaaacactccgccgaacaccgccgcatacataagctccgtgattccctgcgcacccggaaccggaagcatgtccaccgcaatgtacaccgccgcctgcactgccagaatgtgaaaaagactgctccccgaaagtccgaagccaaggtacaccatccccgtgatcagaaacaccgtgcttctctgtaaaaatgtcaccgctccaatcacaaccagttcccctttgtgctctcttaaaaaatgcgtggtctcacggtaccgccctgcaaaagccgccgcgtcctgccgcagtttttccccgttttttacgatgccgcacctctctcccgccgccagtacgccgcacatgatattaaggatcagccccggcgaaaacatcacgccgcacagcagtgccacgagcacgacattcaacacgattccgaccacgtacagtccgagccaggagccgagatactccctcatatgtcccagccagaccaccgggagcatcaggccgatcacaaccagaaccagcttgtaaaacagcgccaccaccatgagaacgaccgtgctgtcggaggcattgtttccgtccttgcacatctcgtagagttgcgcgggctgcccgccggtcgcggacggtgtaatgcccgaataaaaatatccgataaacgaataccggatgcaccccggcagggtggcgtcattgcccgaaagccgcaaaagccgccagatcatataaccttccaggcagacaaaaagcaatcccagaaacactgcagaaagcagacagacgggattgctttttcttatcagtaaaagaagatcggaccagttctgtccccggaagagaaccgagagcgccagcaccgtgaccgtgataaaaaacactgcctcaaatatcttttttctatccttcatacactgtctccgttcctgcaagcagcatcgcgcgctcccgcacgggctcctcctccacaagttctctcaattttccgcggaaaatgcaggtatatccatcccactcataaaaatccttcggcgtcacaagcgattcatccttcgcaaacgatgtgatcccggcgtccgaaagaaactttgccgcgaaggaagaacaggtaaaatgccggctccggtgtacggcacgtcccatggcgataaacggaagctccatcaccgcatagtgataccgccaccgatgctcataccaaagccgcattttttccctgatctgttccttctgctccgcggtacagtctatcgctccgatcatgtaatccgcatccgggaaagagcgcaggatccgctccttatcctcccgctcataccctgccacaagcggaaccgccgggttgcgcctgccaaaactgtacgcctcatccagattttcatcgagcgagagtaaaacatgaatatatttctgcttcaaatatccgtgcagcgccgacgcaaacagtcccggcgtgtccacgaatgcaatgtatatcttttccatgtaatcctctcccgtctattgaaactgatagagttttctggcgatgcgatacccctgcacggtaatcttccctccgacttttcccggaagataggtaaatccgctcagcgtcgtgtacttcaatctgaggtagagcattttgtcctcctcacggatggtattccacagaagcttccgcttctccaacgcggcgcggtcgttgatcagaaggagatggatggaggaaattgccatcatgatggaaatatttctgcacatatagacggcaagcttcggatatttctgccgcacctcgtcgagatcgacgcaggacgccacaatcttcgtcaccttaatctgctggtcaatgcggcgcatcatcacttcctcgttcaccgactgatccgctcttcccagaaaatactggtacagatcgatgtccatatagtaaatctttttcacatacggcagcggctgatacgcaaaaatattatccacataaaacgtgtgctccggcaggcagactcccgtctcgcgcagcaccgatgtacggtagatgagcgcatgcataatcagatactgggacggtctgaaatgtccgatgtcattccaggtacagggcgtttccgccgggaatacattccggtacgccatcgtgtgcgccgttccctcctccaggtgattgtaagtataattgcacacgatcagatccggctgatccataagttctgccaccgctcccgtgcagaactccttcacgcgcgcaagcagtctgcggtacgcatcctccgaaagccagtcatccgaatccaccactttaaaataacagcccgtcgcaaggtgcagtcccgcgttgacgccggagccgtgtccgccgttcgacttgtgtaccgcacgcacgattcccggatagtttcgctcatattcgtccgcgatctcccccgtccggtcggtcgatccgtcatcaatcagcagaatctccacatcctccccgccgatcagcagggaatccacacagcgctccatatatgcagccgaattgtaacacggcaccgtaaatgtaatatatttcattttgtcaaaccgtcctttctctttcgcttcatcatctgctctctacgatactgcctgcagttaaacatttcgtgcagaaatttccaaagtttttccaaagaatccttaagtttttctctgttctcttaacataagggataaccttaaacgaagcgcacacaatttctaaacaatttctaaacggttcggtcgatcgggaaacacaaaatcgggaaacgcaaaaaccccggcggcgatgtacatctctgccatccccgtcggggtcttttcattatttcatttctatcattttcgcatctgcggaaactttgcgtgctatttcatattgaggcggtaccctgcaccccacacggtctctatgatcttcgggttcttgggatcttcctcaatcttctcacggatacggttgatatgcacggtcaccgttgcactgtccgacatataatcatacccccagatccgctcaaacaggtgctccttggaaaatacaatgttggggttcatcgccagatacttgagcagttcaaattcccggttcggaaaatggatctcctcaccgtcacgaatgaccttccagcttttggtcagaatcttcagaccgccgacctcaatgcagtagtcatcggcatcgtactcttttccttcctgtgccatctcatgcttgccggtcaaacgctcataccggagcagatggctttttacgcgcgcaaccagttccatagggtcaaacggctttacaatatagtcgtccgctcccagaccgagcccccggatcttgtccacagattccgtctttgccgtcaccatgagaatcggaatgtcaatctgctcccggatctcacggcagatatcatatccgctctttttcggcatcatgatgtcaagaatcagaaggtcaaacttctcctcattgatccgcttcattgcctcttctccgtccggtgcgatcaccacctcatgcccgctcatctccagataatcccgctccagatttgcgatttccctgtcatcttccgccagcaaaatgcgtgccatcatcgtttcctccccgcgtcatccgccatctgtcttctcacgccctgccaacttccagcatggccttttcttttcactccctgccctcttccggcatggcttttcttctcacgccctgccctcttccggcatggccttttcttttcactccctgccctcttccggcatggccttttccttctcgtgctccgccgcctccggcagacacatctccacatgaaatccgtctttcgtgtaggcacggatctttccgccgtgctcctttatgatatatctgcatacataaagtcccagcccgtttccgtcgcacccgctgcttctggactcatccccgcggtaaaactcgtcaaagaccgcgcccagtttttcctgctccataccgtcgccattatcgccaaaatccacgacaatccatccgtcattttccgcaatatgaatggaaatccgcagatcatcgggccggttggcatatttgcaggcattctccatcagattgtcaaatacccggatcatctgctccgtgtcaaggctgccgtatactggagcctttaagtcactgacaacctccgccgcaatccgccgctccgtaaattccggctctttttcctccacatagtcccgcaagaacctctcgacatcacactcgcggaagaagaacggcatattcccggtctcgagctttgaaaaataaaaaagctttgagagcaggacatccatatcgcaggatttccggtaggcaatctttaaatattccgtcctcttttcctcggtgttggcaatcccgtcaagcattcccttcacgtaacccttgattgacgtgagcggtgtccgaaggtcatgtgaaatcccgcttaccatttccgtccttgccttctcgtaggcggcatttttctccatctcttccctcagatgctcctgcatcaggtcaaaactgtcacacacgcccttaaattcatcctcgtaaggatagccgatcggtgtggtgagttctccgtccatgactcgctttgcggcgacgtcgagtgcttccgccggcgagaggatatgccggataagtctgcgcgagaaaatctggctgagcagcagaattccgccgattgccagaattcccaccaccaggaagacgacaataaacatctcaaacattccgcggtccatcccccggaatgacagttcactcggacagttgaccgcgtagatgtcataaaagttgtcgtccactgtcaccctggttgcaagcacggtcgtgctctccacaaggtaggttgtaatctttccggcatcgttcggcgtataaaaaagagcctccgttccctcctcctcactgtgctttgcgttattgtagacaaaattcctgtcctcatcgatcacaataaggcggaagccataatcggtcagttgttccgccatgccatcccagctgtcactctctaacacctccgggaacccggcatacacttccgtgtatctgtccgcaagctgtgagtggctgccgtaccatcttagaaattcatccttgaacaggcagatcatcgatccgccgattccaagcagcaccagcatggcaagaagcaccataaatgtgtttgtccaaaacagttttttcctgatcgtcattcgtgtgccgtctcccttttcttacaaaacctgtgttttttcacaatctcttctgccgcaagccagaatacttccgccgcatagctgattccggtgccaagcagcgctcccgcaagcacatcactcggataatgcacgcccagatacagtctggaaaatccgatcagtgcagcaagtacgagtgccggtattccatagcgcttcggcagtttccggaacagaagcactcccacggcaaacgatgccgccgtgtgccccgacggaaacgagtaatccgtcggaggcgtaatcaacggaatcagaccgcggatgcagtcataaggtctgcttctggcaatcagatgtttcaacagcatattgttgaaaagcagcgacagcacaagcgccagcagccccatgcagccgatccgccttgttttcttcggtaccagaaggagcagtgaaattgcaatccagaccgcccccgcatttcccagcgttgtgattccgcggaaagtccgggttgccgcatcatttctcataaactcctgtatgtacatcaaaaatccactgtccagatccatcagctgttctaacatgttttcctcttttctgcgccgtctcgtaactttcggcgccatgcacctatcccggtgcgatacgtttattctaggagccacgcctaaacagcatctcgaaaaaagttaaacattttctaaacaaccgttacagaatcatgagaagtgttcccgccacaatcagcacaagaccaaacgccgcctttttcgtcagcttctcatggaataccagataggaaaaagcgattgtgacaagaatgctcaatttatcaatcggcactaccacgctcgcaagtccgtcctgcagcgctttgtaatagcagagccaggaaccgcctgttgcaagtcccgacagacagataaatccaagttccctcctgtcaatcctgccaatctccttctgcttgcccttcgcaaataccatgatccatgccatcaagagcaccaccgccgtccggattgccgttccgagattggaattgagtccctcgatgccgatcttgccgagaatcgaagtgagacttgcaaaaacggctgataggcaggcgtacaaaagccagctctttttctcctgctccgcgctcttttccgtctccttcttctggatcataagaaaggtaccggcgccgattaagatgacgcacacgatcttaagcgcgctgacttcctctcccaaaaaaagaaacgccagcacaatggtcagaattgtactggacttatcaatcggaaccaccttattcacgtcacctgcctgcaaggcatgaaaatagcacagccaggatgctcccgtcgcaagcccggagagaatcagaaacagccatgtcttaccggacacagccgcaatgccgtcctgtgcccccacgacgaacaccataatccacgaaaaaatgagaaccacgatcgtgcggatcgccgtcgccacatccgagtctgtatggcggatgccgcattttgccagaatcgacgtaagtcccgcaaacagcgcagaaccaaacgcatagaaaatccacatacgaatgcctcctttacgatacgccttttctcccgcgtatcacaataatgtcatttaactttaagagcgtgtccttctgcggcaggatggataaatcgtcgcgcagaattaaaaacaccgtcagctgctgctcatcctgcacttctcccacggtctttcccgcatatcttctgtccacaaaaatctccgcaatctccttgatgtccgcatctcggatatttgagatgctgctctttctctgatactgctccacgaatccggcgctgatgataccggtcgggatcgctaccacgccgacgccgagatacgcaatacagatcgccatcagacgccccagcgtcgtgatcggataaatatcgccgtatccgaccgtaagaagcgttgacatgctccaccagacgccgctgaatgcattgcggaacacttccggctgcgcgtcatgctccacactgtacatgcacagactgctcgcaagcatcaggatcaccacgataaacaccgaggaaatgatctgattccgcttctcgtacagtaccgtcgtgatgacattaaatgaatcatatcttgcattcaggcggaagagatgaaagattcttgccacccggagcatccgaaagatcacaaatccggacaaaaagaacaccggaacaatggtcagaatgtccaccacgccgtcaaaagacaccataaagcgcagtctggcgcggcatttgcgcattcccggatataaaagatccgccgtccagatgcggagcacatactccacacaaaaaataaacagcgtgatgacctccaccacgaaaaagaaaccggacagaaagtccagttcctcaaacgtctgtaaaaatgtaaccagaatattggagacaatcgtaattgtgataaaaatatcgaacgcacggctgatccggttactcttatctccaatctggataatgttaaatattttttctctcaccttatgaatccatctcccagcgtaactctgatattttcggtgtccgacggatcctaccggtcatggacggctccgatcagttcccggatatcctccacctgatagcgctccatgtaggcgcggattccgtcaacgatctcctccgtcgcatgcggatgatagaagttcgccgtaccgaccgagactgcggtcgcaccggcaagaatcatctcgatggcatcctccgccgtctggattccgcccattccgataatcggaatctttaccgcctgcgcactctggtagaccatgcgcaccgcgaccggatgcactgccggaccagacataccgcccgtgcggtttgccagcgcaaagcatcttctgtgaatatcaatcttcattcctgtgatcgtattgatcatggagagtgcatccgcaccacccgcttccgctgcacgcgccatctccgtgatgtcggtgacattcggggaaagcttcatgatgaccggctgctttgcatggcgtttcatctcttttgtgacttcttcgaccatcttcggattctgtccgaacgcaataccgccctcctttacattcgggcaggaaatattgatctcaagcacatctaccggctggtcggagaggcgttccaccacatcaatgtattcctccgtcgtatgtccgcagacattgacgatgatcttcgtgtcatattttttgaggaacggaatgtctctgtcaatgaacagatcaatgcccggattctgtaaaccgatcgcattgagcatgccgccgtagacctccgccacacgcggcgtcggatttccttcccacggcacattcgcaacgcccttggtcacaactgctcccagcttattcaaatcgacaaactccgaatactcctccccggaaccgaacgtgccggatgccgtcataaccggattcttcagtgcgacaccgcacagatcaatgccaagattcatcagaaatccacctcctctgcccgaaataccggtccttccttacagactctcttgttcttcacattggaatgcgcatccttctctgtggacttgcagacgcaggcaaggcaggcgccgatgccgcacgccatgcgctcctccatggagatccaacattcgatgccttcctttgcggcatactcctttaaagcgcggagcatcagaagcggtccgcaggcgtagatcacatccgcggtcagcccgttctcgcggatggcgtcgagcacattgccctccgttcccacactgccgtcctccgttgcgatatagacctctccctgtttgcggaactcatccagcagaaacagctcatcccggtatccaagcacaatctgtttctcgcagtttaactcttttgcgagctctaacatcggcggaatcccaatgccgccgccgattaaaaacgcctttttctcctgcttcggaaagccgttgccgagtggtcctatcaccttaagctgcataccggtgtgcatggaagaaaactcttcggttccctttcccgccacgcggtataccagacggagcgcgccgtcctttctgtcgatctcacagatactgatcggtctcgggagcagcctgctgccttccttacagtagaccgatacaaactgccctgcctttgcatgcgccgcgatctgctcggtgtgcagccacatgctgtaaatatcgtccgcaatctcttcctgtttgattatgattgccgtctcttcaaatttctgttgtgttgtatgcatgatcttttatttttccttatcttcatataccacttgtccgttcacaagtgtcattcgcactttaccggtgacttttctgccgtcaaacggggtattcctgcccttgctgaaaaacgtgttcttgtcaatcacgtacgtctcgtccgggtcaaaaataacgatgtctgcgacctttccaggctcaatatctcccttgtcgattccgataatcttcgccggattgtaactcatcttctccgccatctgcatcggcgtcagatacccgccgagtacaagctccgtgtacgttaagcatgcggcggtctcaagacccacaataccgaacggtgcggatttcatggaggtattcttgtcctcaaacgtgtgcggcgcatggtcggttgcgatcacatccatcacgtcatcccgcagtccctcttttaacgcctgtacatcctccttcgtgcgcagcggcggattcatcttgtaattcgtgtccgcatccgcctcgatcgccacttttttctccgtatccacggtcggctcgatcttcctgatgtcatcggaagtcagtgtaaaatgatgcgggcacacctctgccgtcacatggattccctccatcttagcatgcttgaccatgctgacagaatccttcgtggagcagtggcacaagtgcagtctcgccccggtatcccggcttaacatgatgtccctggcaatgatgatgtcctccacggaattcgtgatgccgccaagtccaagttctctggcattgacatccgcattcatgacaccgccgttgacaagattgatgtcctcgcagtgagcgagcaccgcaatgttgtacttcgcagcaagttccatcgcctctctgtaaagctgtgcattcatgacggatttgccgtcctcactgatggcaggaatcccggctttcaccatgccctcgatgttggaaagctcctttccctgctgtcccttcgtcaccgcaccgacctgcagcacgttggcagcgccgacggtctttgctttgttgtgcacatagttcacaacatccggattatccacgaccggcttggtgttcggcatggcaagaatcgtcgtaaatccgccgtgcactgctgcccttgcgcctgtctcgatcgtctccttctgttcaaatcccggatctcttaaatgcacatgcatgtcgataaaccccggcatgacaaagcagcccttcgcatcgatcacgcggtcgcatttttccttgatactcttctcggttctggtcacaaccccgttctccaccagcacatccagtgtctcatccgttccggtggcaggattgattacgcgtccatttttgatcaatatggtcatctttttttcctccattgtatgagttcatcttatcatatccgcctacagttttccatacaattccagcggcacatacgccttcacatagatcccctccgggcggtaatcctccgctaaaagctctccctgctttctgatctgctgcaggattccggcatccgcataggcgatggttcgctcaatcagaactttgttctcgcgcagaagttccgcaagcagttcttttaactcatctaacccggttccctctcttgccgagactgccagggtatgatctgcccttaaatcgcgcagcggctcccgctccgtcaccgcatcctgcttgttaaagagcgtgatgaccgtcttttcccggatgtccagctgatagagcgtgtcatagacaatgtgcatctgcttctcgtgctgcgggttggaagcatccaccacatgcagaatgtagtccgcgtattttgcctcctcgagcgtactcttaaacgcctcgatcagatggtgcggcagcttccttataaaaccgaccgtatcggtcagaagaatctcctgtctgcccggaagttctaagacgcgcgttgtcgggtcaagtgtggcaaacagcttgtcctcctctaacaccccggcgtcggtaagccggttcaacagtgtggactttccggcattcgtgtagccgacgatcgccgccacaggcatcccgtttctcgtgcgcttcgcgcgtgtgatctcgcggtgctggcgcacctcctttaattcccggttcagctgtgcgatgcggtctttgatgagacgtctgtccatctccagctttttctcacccggccctctcgttccgattccgccgccgagtctggacatggaacgcccgaggccggtcagacggctgaggcggtattttaactgcgccagttccacctgtatttttccctcgctcgtcgtggcgcgtgccgcaaagatatccaggataatcagcgtgcggtccatcaccttggtgtctaacatctgctctaagttcttaagctgtgccggtgaaagttcatcgtcacagacgatgccggtcgcgccccgctctgcgatcatcgccgcgatctccgccacttttccggtgcccacataggtgcccgggtgcatcagttccctcttctggatcagtgtgccgaccacgacagctcccgctgtcctgacaagctccgccagctctgccacagagtcctcggcatcatccccatcctgctcgctcacgccgaccagaatcaccttttcgatctgatcttccaattcaataatttctgccatgctgctccttttctactgtccgctgtctccgcttccgtctgttccggcatcggctccgctgtcggttccatctgcaccgtctgttccgtccgttccgctgtctgcttctgctgttccgatatcctccgtcacgactacctcgccctgcacttctgtgcccgccggcgtatccacccggctttttaagaatgtgtattcgcgcagtgcctccgcatcatcagggtacgcggctgtataagcggtcatcacctcataagctcccgcaaaatctccagtatactccatgcagataatctgattctgcagcagcgcgcgcctgttcggaacactctccatcgaaagcccctgctcgatgtaggaaagcgcaccgctataattcagcttgcccatctcaatctgtgccaatgcattcatcgcttccgaatccgcgacacccgcatccacataagcctgataatacgtctgcgcgttcgccgtgtcctgctgtgcctcatatacctgcgcaagcgtcaggttcgccgctgcactgcctgcatcgatcgcggacgtcaattctttgattgcgttgtcatactgccccagcaggtagtaaatctcccctctgtatgcaagactttccgcatcatttcccttgatggaaaacgcgtcgtttaagtacgccgtgccgtcctccgccagatcataggcggcaagattcttgtaaatattgatataaagttcataatccgaatggttatacttgaccgcgtccgcaaaatcctgcttcgccccgtccgtatccccggtgccaagctttaaacatccgcgcagatagtaagcattggcgttcttcccgtcataatcaatcatggcgttgtacgtctcaagtgctccctcagtgtcctgtgcggcatactgggctgccgccttgtaatagcagatgtcgatctccagatcggtaatttttccggtgcagcacgcaagcgctccgtcaaatgccgccagtgccccctcataatccccgctctgcatgctctctatgccaatcttgcggtaggaaagctcatcctccgtgcgctcattcgcacatccggcaagaagcgcggctgtcacaagcaaaaacaccgccgcttttcccctgtatgttctatggtgattgatttccattcgtcttctcatcttaattcctctttttactataatgaagccaccaaaaagtataaacgatattttccttccccgcaaggtgatttcccgctgcaacaggcgatatcttccatgtacatgacttttctatctcatgccgtcccgaatcacgcgcgccgtgttctgataggcaatctgctccacggcgtcttcggagagtcctctctttcgcagcgcatcgaaaagcagcggcagcttcgtgcagtcactgatctcaaattcgcctgagattccgtcaaagtccgtgccgagtcccacacattcgataccgcccctgtcaatcagatgcattgcgtggtcgcagatgcgctcgatacggctgaccttatccgtctcgtcctcattcagaaaggtcggttccagattcagtcccgccactccgccacactctgccagttcgcggatcattgcgtcagtaagattgcgcgttgccggcgccagtgcccggcagttggaatgtgatgccacgaatggcacgccgcttcgccgggacgcttctgcgacatcccggaaacctccgtcggataaatgggagacgtcgactaagattcccagttcctgcatatagcgcactgcctcttttccaaatccggtcagcccacggctcatctcctccggcttttgggaatggcagtgtcccagacagttgtcgtcattccaggtcagtgtcacaagtcttacgccgagatcgtaaatttcccggattttgtccattttcccatcaatcagagaaccgttctcaatcgtgagaaacgccgatattttcccttcattctgattctgctttaattcctctgcattgtgcgctgcagcaaagcggtcaccgtactgctccatggtatggcagaaaatgtcatacattttcctcatgagtacttccgccgacggcatctcttctaagccgaaccagtccggatcatttctctgcggcagaaacatcgcaaaaaactgcgctcctgcctctgcctgctgcaggcgcagtccatccaccatcgtgcggtcaagttccagaaacgtctctgttttctgcgctaacgcgcttcccaatgtatcacaatgcatgtcaatataacgcatcattttctccatttccgggcagagttccttcttattttccagactgctgccctgtctttttcttattataaagaacccgcggactttatacaatatgccggccgccggattttgtacagcattttctctgtttccactgttttcatacaaaaaggagcgccttgcggcactcctctctgtgaaagaaatatataaattttgaagcaagctttttcttccgggcggttttccccggttttacagatgccagatgtcctcattgtactgtgcgatcgtacggtcagaggagaagaatccggctttgctgatgttgatgagcattttcttcgcccacgccatgcggtcttcataatccgcatagatgcgctccttggttgccacataatcctcgaaatccggaagcgtcatgaaccagtctttgttcagaagttcgttgtaaagacgctctaagttctctctgcatccgactgccatcatctcgtcgctgacgataaagtctaccgcacgcttaatgttcgcatcattctcatagtagcttctggacacataatccgccttctcgtagtgcttgatgacttcctcggaggactcaccgaagatgtaaatgttgtcgtcaccgacaaactgatgcatctccacatttgcgccgtccatggttccgatcgctaccgcaccgtttaacatgaacttcatgttggatgttccggatgcctccttggaagcaagggaaatctgctcatggatatctgccgccgggatcagcttttcagccagcgtgacattgtaattttctaccatcacaacctttaagtacggagatacctcagggtcttttgcaatcagttcggacaggcagaggatcagatgaatgatatcctttgcaatcacgtaagccggagctgccttggcaccgaaaatcacagtgatcggacgggtcggcttctttcctgccttgatctcaaaatatttgtggatgacatacagcgcattcatctgctgtctcttatactcgtgcagacgcttgatctggatatcgtaaatggaattgtcatccagcacgattccctgtgtttttgcaaggtaatctttcagctcggtctttctgctgctcttgacatcgagcagacgctgcagaacggaagcgtcatcgacaagcgcaccgagcttctccagttccatcgcatccttcttaaagcccggtccgatcagggattcgatcagatctgccagctcgtggttgcagtgcagcagccagcggcggaaggtaatgccgtttgtcttattgttgaatttctccggatagatcttgtagaagttgttgagctccgtatttttcaaaatctccgtgtgcaggtaggcaacaccgttgacactgtagccgtaatgaatatccatatgtgccatatgcacgcgtttctcgtcatcaatgatcgcaaccgacttgtcatcgtatttacgcaccacgcggctgttcagttcgtagatgatcggaagaagctgcggaactgccttttccaaaaaatgaatcggccatttttccagtgcctccgcaagaatcgtgtggttagtgtatgcgcaggtcttcgatacgatctcaatcgcctcatccatcagaattccacgctgcatcagaagacggatcagctccggaatcaccatgctcgggtgtgtatcattgatctggattgccgcgtactcattcaacttgtgcagatcaccgcctcttgccagcgtctcgtcgatgatgagctgtgccgcattgctgaccataaaatactgctggtatacacgcaggatgcgtcccttgtcatccgaatcgtccgggtataagaacagcgtcaggttctttgcaatatcctctttgtcaaaattgatgccgtcccccacaaggctctcgtccacggtctccacatcaaacaaatgaagctttgtggtgcggttctcgtaaccaatcacatcgatatcatacagtctggactgtaaggtaaaaccgccgaactgtaccgggtaggtcacgttcgttttcgtcagccagctctccttctcgatccacgggttcggctcctcgtgctgtaaattgtgctcaaatacctgcttgaacagaccgtagtgataattgagacccacgccgtcgccgtttaatccgagcgttgcaatggaatccaggaagcatgctgccagacgacccagaccgccgtttccgagagacggctccggctcaacctcctcgatctctgccaggttcttgccgttctccgccagaacctgctttacttcctcataaataccgaggttgatcaggttgttggataacagcttaccgatcaaaaactcggcggagatataataaagcttgcgctttccctcgttgctctccttttccttcgccatgctctttgtcatctcaagcagcgcgtaataaatctcttcgttggagcactgtgcaatgcccttaccgtatctgttgtttacgatttcctgtacgttcatgtgaatcctccttgttttgcgaagcaaaatccgagtcctttgacgaggagaggattttactccttgttttgcatccccaattactttttgtatttccctgctgtatgagaacattatatgcagaagtccactttttttcttgtcatattatccccaaaagtggtacaatcctatcatgaacattttagagtatgaaaactatcaggaaaaaattccacatggcaacccgctgtttccttatatcacctacccttgctcgattccgcttgacttttcgcgcgtgcctctgcactggcacgatgagatggaaatcatctatatcaaaaaaggaaccggagcaatcacggtcgatttcaaatcctacgtggtgactgagggaaccatcgcgctgattctgccgggcaggctacacagcattgaacagtacatgcaggaaagcatggaatacgaaaatatcattttccatccgggcatcctcatttccaaaaaaacggacaccagcaataccgaatttcttgcgccgctgttgtcgggcgtcctgtccgttccgctcttatatcagccgggatctccctgctatgcggagattgccgcctgcattgacgccaacgatgaaatcagccggacgaacccgcccggctatcagttctttatcaagagtcagctctttatgcttttttacattttattcagcaaatgcctcttaaaagagccggcaaagcgcgaccacaaatcgctggagaagatgaagctaatcttaaaatatctggagaaccattatatggagcgcattacaattgcagatatctcggcggaggtcgggctgagccagtcgcatttcatgaagtatttcaagaatacgatgggcacttccttcatcgaatatctcaatgaataccgcctgaccatggcttcccgcctgttgatctcctccgaatcctcgattcttgccatcgcggaggaagtcggctacgagaatctgtcgtactttaaccgcactttcaaaaaaagattcggcatgacgccccgggattaccgcaaacaatccacgaagcagttgtaaaacggatcccacagaggattttccttgttttagacccgtttttcttcatttttccagtcaaaatggtgctttttctatgcaaaacgggtccagagcagattttttcctctgccagacccgttttttgcaaaaatccgggtctcacagtcattttttcctcctgtggacccggatacctctttttcacacgtctgaacataccatctggacagtttttctttttctcgtgctttctcttacgattctatatcaaagtcaatgcttcccataccgcagtccagatcaatcgttcccacagccccggcattcgtgactttgtagcttccgctgagatcggaatagctttctccgtttaccgtgagatcccccatgccgcaggacatcttataattatagtcctcttccctgccgcgcagggtgatgctgccatcccccatgccgcaatgcgctttcacattctctgccacaatgccgtccagcgcaaatgatcccataccgcaatccagcttaatatctttataggtgcctccttccagatcaatatcaccggctccaagcttgatgtccagggttcctgtcacagcaaaatctgctcccgtcagttctcctgctcccacattcagctccatcgttctgcagttcacactgcccgatgcaaaatctgcatctgccgccccgatgtcaaagtccatggtatcaaaggtcattttctccggaatctcaatcacaatctgcgcatcataattgtccggaaactgcttatgaatctcatactgaatctgaagcgtatctttatttatatcctctttataatatttttctttgcagccgtaggttctcaccacaaggtttttatcatccgtcccctgcttgacatagatttccgcagcatcaatatcaatatccagattttttatgccggctgcctcataggtataaacttttgcatcgtcgtctgctccccagtcatcctctgtgtcttcttcatccgaagaatagtaaagttcatatggccggatatgccagttgcccgcatccagttctcctctttccgccattcgtctgactgctccaaaaccgccgccaagcagagcggagatgccgccgagcaataatcccattcccccgagaactgccacaatgatcaggcagatttttgaaaattttttcatgctgccgcacgctcctttctcttattaaatggctttttgcaaagcttccagattcctttcaatgcccatggcagaaatcctccgaaaatccagaccacgagcaccaccgcaagaataccgatcgccagcacgatgagtcctcctcccataagcccgattccgattgcaggatttcctgcaaatgcacttccgattcctgcaccaaagagcaccacaccgcagattaacagtgctcccatgactgccacaaccgctattgcaattccaaacagcgccgccacaatgccgagcaatgctgacagtatgaccagaatcattaccagccacaccggcgaagtgatgaccagaagaacgatcgcccatcccggcattccatccttctcctgcgtagaatacgctgcattctgcgctgctccctgtggtactcccttcgatgcgttctgcgctgccccctgcactgccggattccactctgctcctgttgctgctccctccggtgcgctctgcactgccggattccactctgctcctgccgatgctccctgcgcgccggaagaacacgcgtccccgggctgcacacccagatctttgataatgctgtccgccactttctgcggtgattccagttcttctaaaatctttgcctcattcgcctctccggcgtcctcaaaatagctgcggtagaatgcaagcgcctccgttctttcctcctgtgaaatcccggacaacaacacttccagctgccttaaaaattcatctttattcatcttcaaactccctcctcggaaaataactctgatattttcgaagaatagtcatcccattctctgcgataatcgtccagcttctttcttccctcatccgtaatcctgtagtagcgcctgttgcggcctccacattctctgtcatacaccataaggcatccatctttctgaagtctacgcaataccggataaagtgtggattccgaaacctcaatcgccactctcacatcctgcgtgatcttatatccatatgtgccttcctcctccttggagacgaccgccagaacaatcgcatccagcagggctgcacctgtattgaacaccatattaccggctcctttcctgttctgtctgatattatttatatgtttataatattattttgttatcaatactatatatcatataatatagtattgtcaatattattattcaaaaaaatgatacatttattttccaaaaaaag

SEQ ID NO: 11523 - DNA, 1038 bp, Unknown
  gut microbiota DNA sequence
gaaattgacgtatactgaattagttttttatgaaaagaaaggaggacgcaggatgaacggtctgggttatgcaccggtctgtagcagcagtgcattgtcaaaaacatgtatttttcgcgtgtacgggattactgcgcccttttttaagaaggtttagcgtttctgtacatagaaaaatgcggcagtaattccgaaacagtttgatctcacaatggtgtgggatcgggctgttttttcagtttattgataaaaataaaatgaaaagaggaattacagatgaacgaaaaacagaatcttcgacttaagagaaatgttggactggactatgtccatacgtttctttccaatatgaacatgcaaagctcgatctgggtgttgtatctcgcatattgcgggctgcacctggcacagatcggactcttagagggaatataccatgcgacaagcatcgtgtgtgagattccttccggggcggcagccgatctgtggggcagaaaacgctgcatgattttgagcaacctctgcatcgcggtttcctgcgtgatcatgctgttctcaaaaagtttcgggtggtttgcggtaagctttgccgtacaggcacttggaaataatttaaactccggctcggaggaagcgcttgtatatgacagcatgaagtgcctggggcaggaagaacactacatgggtgtctatggaagactcaatgtgttgatcgaagtggcgcaggggcttgcaacggtcgcaggcggtgtgctggcagaattctcctacttctggtgctatgcggcatgtgttgtgattgcggtgctggcattgctgcctgtactggggatggcggagccgccgcagtgcagcaaggcagctgatacggcaggcgggagcgcaaaagatgcgccggcggaaggaactccggcacagagaacgatctgggagaccgtgaagcatcattttgcagtcagtgcatgtatcctgcaaaaggatgccagaatcggaaaaatcatcggcttctattctgtcgtttttgcggcgcacacgctg

SEQ ID NO: 11524 - DNA, 13407 bp, Unknown
  gut microbiota DNA sequence
tgtctccggtgtgtcggacatgcacccgtcggattgtccaaacgtggaagagacacggaatccgatgcaaacctccggcaggaagaaatgctctcatttttttcaaataattgtatcctatgcagttccagctgaaatctacatgctgtgttttctggcatattacttatcgcttcaaaattcactgccctctaaagtaccagcccctttttggacacttcctcctgaaagatcatgcgaagctgccctttcagcggaacattcagttccctcagggtgtcatccaatgcatctaacgtctcgatcatgtccaccacgttcgcattgcttcccatgtgtccgatgcggattacctgccccgctagggagtcaaacgatccagccagcatgatgccgtgcttctgccgcatggtctgtaaaatggcatccgcggtcgtctctttcgggacgtcaaacaccgtgacggtattggagaaaccggacgcaaggtgtaagttcagtcccgctccgcggactgccgccctgcatgcctcaccgatccgcgcgtgccgcgccagcatatccggatcacccgcgatattgtcgaacgcggcgcgcagtccgtagatatcactgatcggcatggtgtacgggaaccactttttctcgtaatatccctcaaacaccttaaggtttgcataaaaagaggcaatcggtacacttctgccatcgatggctgcccatgccgcatcactcaccgtcacaaacgtcagtcccggaggcgccgaaacggctttctgggaaccgccgcagaggacatcaatctgaaaatcatccacgcgcacatcctcgccgaacatgccggagacggaatccaccaccgtgagtatcccgtattttttcagaagcggacaaagcgcagagatgtcatttaacatgccgctcggggtatcgcagtgcacgagcgtcgcatatttataatcgtgatgttcctttaaatattcttccagggcggccggatcaatcggatttttctcatccacggaatacagaaccggctttccgccatacatggaaacgaaatcagcaaaccctctgccgtatacgccgttatccagcaccagtaccggatcgcccggttccgtcagggaggcacaggcagcctcaagccccagaattccctctccgcctaaaatcagggtctcattcccggtgtgcagcaggcggctgatcagttcacaggtctccttataaaaatctacgaaagtttcatccagatccggattggtgcagggaaaactgcgcgccatgcggacattctctttgacctgcgtaggtcccggtgtcataatcttatacatggaaacgcctccttagttccacagttttgcagctactttctttaacggtgcaatgatgataagaacgatcacagctgctgttccgatctgaagcaggttgcccggaatcgatgtcaccggtgtgatccagttgccgtaaataattccctctgcgatgtaatatccgccgatcttgatcgcgcaggcagcaagcattgccacaacataccactgaaagccctgcttcttctctgtaatccatcccatcacaaatcccatgcatccgacgatcacaaaggtaaacggtgcccatgccgtccagccggacaacagatcaaacagtcccatgccgactccgccggcaatggctcccgtctttttgccaaacacgattgcgaaaataaacagtgggacatttcccagatgaatcagtccgccctgcggcgcaaacggcaggcgaatgttaatcagccaggtaaatacatataccagtgcgattccgatcgctgtgacggtaagaaaacgcacctgctctgtgctggttgtttttgtgctgctcatagttttggtttctgacatggctctatctctctttcttttttgttagagccatgataccccatttctggacgaatgaatatgtccagttttgctatttttgaccagtccagttcagctttcatctccggtgaatcccatatttctccggtattcgcttggtgaaacgccgcagctgctcttaaacaacttcataaaatgcttctcgttctcatagccgactgcctgggagatctccgcgatgcgcatatccgttccggcgagcagacgcttcgcctccttcatgcggatgtctcttaagtaattgacaaaattacttccggtatactgcttaaacgaataagaaaacagggaataattcatggacagataattggagacaaccgccatattcagatcactggcatagtgttcttcgatataggcgaccgcctgcttcattttctgctgattcccgtttgtgtcaaactggcttaaaatccgcgcctgcagaccggtcacaaatgccagcaccttctgttcgtagcggtcgattgcgtcctccccgaatgggtctgtaatctctttgatctccccgcagttttctttttcttccagcacattccggtatattttaaatgcctccgcaaggaaatccgtcatgcactcctcaaagtcccggacaccgatgcggccatgctttacctcgtaaaaaaattgcgtccagacgtgctgcagttcctcggtgcggtcggttccaagtaactgcacccgctgcagtttcatctcgtctgcaaccagctttgacgcctcctgcaccagcttctgtgggacacgcggcatctcctgcccatagcgcatctgactgcggttcgtgcaaaacgcgcacctgcgcatttcccgcgcctccagatatgcctcgcgcagttcgcggattccctgatgcggccggctgattccggtatattcctgcaaaaaaggatattcccccggacgatccgaaagtgcttccgcctcgattaaaaagagatcatttccctcgacatcgcccaggaacaggcagtccttcgggcaggattcctcctcttttttccggttcctgcagcagaccacatacggctttccgctcagatctaaaataaaatgctggtcatactgggtctccaacatggtaagctcctcttccggcatctctgccagaagcatcagatgacggatctgctgctgtccgagcttctggcgcgttttctcctgctccctgccctcctcaatctcctgattcagcctggcaagtatgtcgcagattttttcgcgctcgatcggttttaacagatattcccgcaccccgttgtgcatcatcgccaccgcatagttaaagtcatcgtaaccgctgatcgcaacggtgagcggtatgtgttcacattcctgcatgcgctccaccagctcgattccgtccatctttggcatacggatatccgtaaacatgacatcgatggactgctcttttaaaatctcaagcgccgtctcaccgttgttacattccataatcacttccaccgggacaccgctccgctgaatcatcttgcggagtccctgccggatcagtttttcatcctcaacaatcaatacagtcttcattctgcttctcccctgtgcgtcatcggaatgcggacgataattttggtatagcatccgatctgcgacgccacttctatgccatacgccccgccaaatgcaatctggatccggtcctgcacgttttttaagccgattccgtttccggaacccccgctcgaatccagttcccctgcaatcttctgacgaagctgtgccatctcttcctcggtcatgccgcgcccggcatccgtaatttcaatcacgcagtcgtttccttccacgcgccccttgatgtagatgttggtatcttccgccatctgctcgattccgtgatagatggcattttccacgatcggctgcagcgacattttgggaatctcctgctgtaaaataatctccggcagattgagtgataaatagatctcgtaatcaaaccgcagattgattaacgccatataattcttgatatattccagttcctgctccaccaggacattgcctgatacccacttcatgctgtagcgtaagagcttcccgagggatgtgaccgcatccgaaatatcgtactcctcgtcgatctccgccatcatcttgatggactccaagacattatagataaaatgcgcgttaatctgattctgcagcgcacggatctctgaattttttaccagcatttcgcgctttagattgtcgtccatgagctgcttgatcctcgttaacatcttgttgatctgtgttcccagctctcccatctcatccggtccgcagtgctcgatcaccacgtccagatctccgccctgcacgcggcggattgcgcgcagaatctcgtacagctgttttaacagatgttttacgatcgcattgataaaaaatgtcagaacaaccaaaaacacgagcatgaccgccacaaacgtgttgcgcatgcggtatacgtgatgaatgttggacgtaatatttttcacgcagagcagggtcccgtttaattcctgcaagggaaggtaggatacgatcagatgctgtccctgcagcttcagatagcaggtctgtatttcctcgtccgccgtatactgtgccatgatctcggcgagcagttcctgccgtcctgtgttttcgtcctccccgtcaccttctccaaaataacacccgccgtcctctgtcagaaaacagctccactcgtcctcaatgttctcgtagagactgggaaacatgttttccatcgtcatagccgcctcgatcattccgagcgtcccggaatcgctgtcctttatctccgtcacgagcgataagatcttgcggttctgtctcatcgtgtaagaattaaaaatctgatcgttaaagtcgtaatgccagccggtaacagtctcctccgactgccagggctgcttttccatgcgggaggctgcatagagaatcggcatcatctcctgtacccggtcgtttgacgcatacacacgcacgccgtagagaagcgggttgttgtttaccagacgctcgagggacacaatatcgctgttcttaaagctgtaccattcctccgccgaaaaagtctccccgtccttcgttcttttgagcatttccaaaagcggctcatcgctcaggaaaaactgtgtggacatgttgatggaattgatcttggttgcaacggcatctttgttgcgctccatggtgtactccatatatccggtattctccgatacgacgtttttctccatattgtaaaaaaggatgccggcaagaatgccgatgggaatcaccataaacagaataatcacaagggtaaactttacattcagtttctggctgacaaaccgttttttccaattcatgtaacactctccgtctctttactggatgccaagcttctctttggcgctgttcatatatgccgtcttcttctccatgacatccgtatagcccagctcatcccgcttctcaataaattcttcaaaaagggtgtcaaactcctcctccgatggtgccataagaagcgccggaagcgtctggctccagagctttgtaatcttgtcctcctccgatgcctccttggagccggagtcaaataccacatcatactgaccgttgtatacgacatattttcttccccattcctccagctgtgccgttgcaggcgatggttcctgtttccactgaagctgcatcacattgtcctgcagcatccagtaggcatcgtccgccccgtattccctgtcgtaagctgcgcggtccgtgtccagaatctgcttgatgctatcgcggagtaccggctttccgtcctttatatcgtaagtcacaccctcgacgcccagataggtgagaagctgcccgtgctcgctcatcagataatccagaaacgcaatcgcgcgctccgggtgtttgcagttcttggaaatcagcgtcaccgtccacccgttgatcgtggttgtcgggcgcagcggatcgtccccatttgcatttcttggaccttccaccgccatataaatgctgtccggatcattggcatataaaattttctgctgtgtcagcatatccgaatattgatacagcatgcagaagtagcggccctgcgccactttttcctccatctgtgtccgggtgtccacaaaaatatcattcgcaagataaccttcctctcccagctgtctgaatactttcagccagcgaaaatattccggatcggtatagcggtcatagtagacgccgtctttctcccacggaatggcaagaaaattcatcaggtatttgtcaaaggagacatttccctcgttgtcgaacacgtgcgcaccgatcgggatcagaggctctccgtctacttccggaaacatctccgctgccttctttaccgctgcgcaaaagccttccggtgttgtcatatccgggcttccgatcgcctcgtagatatccttgcgcaccagaaaggtctgattgctgcttaaatcctcgcactgctctacatcctgcggcgtgatggaggagttcgggtaggcgtaaatattgccgtcgtccgtggtataccagttcacggccaccgggtccgagacctcccagaaatacggatcatagctgtccgcaagctcattgagcgcatagaccatgccgttttctgtcatctcgctcacctgcggttcccaccatccgagcgtgattaaatccggcagcgagtcggacgcaatcagggcgttcagtttttcggattcatttccgagcggcgtgataaaatgaatatccacgcccgtctcctccgtgatcgtctgcgacaccagattctcgccccacggcgtcgaaaaccaggagtagttgatataccagtccagcgtcaccggatcgtctgcgtacgtctgccatgccggaagatccccgtccggctgcacttgtccggctgcttccgtttccggcacatttccggaagcgccggtcataacattcccgcaggcaccgcacagcgccgctgttataagagaaaaaagcgttacacacgcccattgttttttatatttgccacccattccaatcccccgtttttctccgtaaaatcaaagattttcctgtctctatcatataatatttcccggcatatttccagcaggaaaagccgtttcccacgctccttcgccagcataacgcacacaaagaagcaccttccgtttccggaaagtgcctctttctaagaggagaactatgaaaataaagttttgaaacctgctggcattttattctttgacgctgcccgccgaaatactgctgataatgtatttcgagcagaagcagaacacaatcaggatcggtatgacagagattgccaccgccagataaatagcgccctgatttctctgaatgtccgtcgatgcttttaacgtcgccatcatgaccggcaatgtaaacttctcatttttgtttaagataatcatcggaagcagataattgttccagtttccgataaatgccatgatcgccatcgtcgcaataccaggagacataatcggaagcgcaatcctgtggaaggaatataattcgcttgcaccgtcgattctagctgcctccaccagtgccggcggcatcaccgataaaatgtactgtcttaagaaaaacaccgttccgggtgccgcaaccgccggcacaatcagcgggatataggaatttaccagttttaatttggtacataaattgtaaaaaccgatcaggctgagctgtcccggaatcatcataaacacaaggatcgccgtaaagatcagcttgttgccgcggaatcgatacattgccagtccatatgccgtcatcgccgagaaatacgccgtcagcagtgtggcaggaactgcaaccagtaagctgtttgccattccgcggaacagattaaagaaactaaatacggtctcccagttttctttcagatgcgtgctcggtatcagcgtaaagaaatgtgtaatctccacaccgtccctggtcgcgttgaccatcatcagaagaaacgggaacaggcacgccgccgcaagcaggacaagcagaatataaataacgctcttttttatcttatcacccgtcgtcataactaatcctccttgttgactaattttaactgcagcacagatacaatcagaatgattaagaacaatgcatatgcaatggcagatgcatatccggtctgtgttgtgcctgtcgagaaaccaaatttatacagatacattaccacggtctcaattgagttgtaggatgccgccgtcttctccgacataaggaacggcaggtcaaacatctgcagtcctccgatcaaggaagtgattgccacgtaaagcatgatcggctttaacagcggcagcgtgatttttccaaatgtcgtccagcgccctgccccgtcaatcgctgcggcttcaaagtaatctttgttgattccctgcacgcctgccatcagcataatgaaggagttgccaaaccacatccatgcactgatgactgcgatgacgcttcctgcggtgccggaatttccaagccagtctaccggcgccttgttcactccgaagaactgatagacggaatttaagatctggttaaacgtaccgtatctccagtctaacagtgtcttaaagagaaaggcgacagaggtggctgcgatcaggttcggcagataatacagtgcccgaaacaccggcagccccttaaatttatatttaatatcactgaacacaacggtcagcaaaaatgcgagtcctaactgtagtacgatattaacgccccagatcctgattgtattccagagcgctctccagaaaaacttatcggtaaatacgcgtgtataatttttcagaccgacaaaatggtacggcattcctgccagcttgctgtcggtaaagcttaaaacgagtgtgcggaataccgggtacacactgaaaatcaggaaaacgatcacaaagggagccacgaaaaagtagcctgcccggttatactttgtgaggtttgatgtcttttttttcggatttgtttttgccataggaaatcccctctatctcattttgtattccccctccggcaccgccacaacatcctttggggacattgtggctgccgtccgggaggataccaagttaccctgctcttatctgtttactgtgatatcaggatatgtagattcaatcgtgtcatagaaatcattcactgcctcttccttggtcatctgtcctgtcttgaccgcagagatcgcattgccccatgcattaccgattgcctgatcgtaacgggttaccttggaggtatcaatctccttcgcctgctctaaccagaactggtacagtttctcaccgccgtagattgcattttcatcatctttgtgcttctcaagcgcggatttcagagaaacggtatcgccctgggagaaatcgatccaccagtctgcggtgtcttcatttaatgtacagaattttacaaactcccatgcggtatctttgcggttggactgggaggaaataccgatataggtaccaccgtcaaatccggaggaaggtcccttgcagacgccccacaaaccggaggtgtcgccgacattatctctcatggtaagtacgccccaggacggcagtccgaacgcgaagaccgtcgtggtgtccatgcccttggttgcctctgcaaactctgttgcatcccatacgttgacagaatcatccgcgtaattctggatatctgcggttaagatcggaacctctcccgccattgcctgataccacggcgtggaccactggttggcatatgcggtgagatccttctgatacagatccacgcaaagatccatgtaatcaaatcttgcctggtctacatttaagacaccgtcaaccacccatgcggaatcaccggaaaatacgcccatctctgcgtctgaggagaaaatacggtatcccgcgtccttcaacttctgcgcggtatccagaatagtcgggtaatccttaaataatttgccgacctcatccggatcatccgttccgaatacttccttggcaatatctcttctgtaatagatacctgccggggtgatctgataggaaatggctctctggatgccctcggaatcctgtccgactttccatacataatcaacgatctgatctgcatagtcctgtgcgttgtacggtgcctgattcagatcctcaaaaaatcctgcgtcgtaaaaatcctccagcatcttcggctcgcctacgataatatccggttcgctctcgccgcccaaaagcgctgtctgcaccttggtcggatagtttgcaggctcaatgacaaccgtgtcaacggcaactccggtctgctcttcaaagcgctcaccaaagtcgatcaggtcgtttgagagtgtccataccaccagcttatcatcgccggaagcggacgtgcctgcaccctccgtagattctgcggtacttcccccaccagaagctgcatctgtgcttgtttctcccgaatcgccgcatgcggtcattgataatgccataatgccaacgagcatgacggatactgcttttttccaattcataaaaatatcctccttttatttcaacatctctgttgttttgatacttgcattatagatgctttcattttctcaaaaaatgatccaaattttaaaaaggtatcatttttttagtccacggcaacctccatttttctgacccttccggcgcggatatcctccgccagttttccggagactttctccccctcaacggtcgcctgactgccattttcatagaaaaacaccatatggcggatccggtaggttcccggcacataatccctgtgcccgccaaattcatagcacacggtcgtcttgctcataaacgcagcggaaagtctgccatcctccggaatcagatacgccggaatggccggtgcaagcgaaaagaccagttcctcctgctccgtccggaaaggatgtgcgccgaacatcatctctttccacatgctgataaattcgatcgttgatccgctgagtcttgccacgaatcctcttccgcggcaggacggatttggattcctgctgctggctataaacgaggaattttcgtaaatacttcttccgtaagtctccgggttctggaacggtatcgcagccttcttgaaatccgcgaaaaattcttcatagagaccgctgcgcagaagttcaagaagatatttatattccatatgaagccagatggattcgttttcgagccagcccggggtaaatgcacgcgcacgcccaagttcaaaagaggaatccgcaagggaagcattcaccttgtacatggacagttccccgtcgtagagatcgctctctttgaccgcttcgtacagggcacgcttctcgccctgctccacaggcagcttcagatagcgcaccggtccctccagaaaatacggcatattttggggaacaaattttaacgggcggatgccgccgtcctttaacttttcatactccggcacctcgtaagtaaaatacgtcgggcagatctccccggagatccggcgcgcctttttgattccgcaggtaacaatctccaagaatccttccagaatcgccgcaagctgctccgtgtgatagaccatcttcttaccggatacgccctgataggtcttgtcgcggtaaatctccttcgcgtcattgatccggttccagaaggacaacagttcctcgtcccgcatgatattatcgtgctccagccgcgtgatcagattcagttcatccaggaaacatcccagttcctctatgagtgcgacttctcccggatattgctttaaggcctctatggtgtaggagagcatgcgcgccagctcgtaggtctccgccatggaagaaccgaaaagtcccggcataccgtttagggcgtcataccatccgggctttccgccctccatctcgattcccattccgtaagcatccagcgtggcaaatttcacagcactgagcagtatcaatttctccatcagcgtcatggtcagcacatccccgctgccgtattcggttctcaccagtttttcccccaagtccgctcgcctggacgcctcgtttaacgcccggtactgccttaagccattctccgtctccacatagcggcggaacctgcggtttacattgattctggacaaaaaggtggtatagacctcctcatagagcatttccttctcctgctccgggaacacggaaaggtaatccagaatcagatcgagattgtaggtccagtgatcgctccagtagccttccccgaacgatccgttcaccatctcttccgcaaaatcaatgacccggataaataacgtctcatcccaggtatcgccgaatacctccccgaacttccggcagagtgctccaggcgtaaacggctttgtcgcgaagtcaagcagcgctcttctttgctcctccttcacgtctgccagcagcttctttgcccgctcctttgaaaggcggtaggtcagtttctcgacgccaagcggattgtacccgtccagctggatcagactgtagaattcctgtatattctttctgccgacgaacggtgcaaaaaaggtgtcgcagcggcggttctgattgacatcgcggaagttcccgtttccctgcgaatagaattccggcagcacggaaaagtaattgtaatcccgctccagatcaccgtgttttctggaatagacataaaagatcttattgttccccagctgcatcggataaccgccgcgcagcacattgtccatataggtgtacctgcagtaggcatcgaacgccgcggaggctgtcctggtgcggataccgtctgtcagcgcctctgcaagttcatcagcttctcttttttttgcctcaaaataggcggcatctttcttttccgcaaaatattcctttaaaagctgcttgttctccacctgtccgatcagttcatataaggtgacgcttccgcccggggcaagggtgcgcgtgatgccgtaaaagctgcacggcagcaggttctgcgtcatctgttcttccagaagaagttcctttaacgggcgttcttcaaaaccgaccggtcttttcagcgacagatcataggaaaaaatcaaagacggatccacgatcggttgcaaccgtctgccgtccgcttcgcagcatgccgagaaattgccgccgtcgatcctgcgcaccgccgcggtgtcatccatgcttgcccgcacgcggtagtacggcagaccctcgtttaaatcctcgacctgcatccacgctttcgcggtctgccccatatttttcatgctgtccatggacacgccgtacggaatcactgccggcatgccgtcaagcagttccagctcgatgggctccccggactgattggtgacactcaccacgcgcacaagcgcgccgacattttctccgggcagtgtatagtacaccacttttgtgtccattccacttgaccggttctgctcctcgattgcaagaccattcatgtgaatctgcatc
